(19) United States
(12) Patent Application Publication
(10) Pub. No.: US 2009/0311680 A1
(43) Pub. Date: Dec. 17, 2009

(54) Method for Identifying Useful Proteins of Brewery Yeast

(75) Inventors: Yoshihiro Nakao, Osaka (JP); Yukiko Kodama, Osaka (JP); Tomoko Shimonaga, Osaka (JP); Takeshi Kanamori, Osaka (JP)

Correspondence Address: DRINKER BIDDLE & REATH (DC), 1500 K STREET, N.W., SUITE 1100, WASHINGTON, DC, 20005-1209, US

(73) Assignee: Suntory Limited, Osaka-shi (JP)

(21) Appl. No.: 12/224,371

(22) PCT Filed: Feb. 26, 2007
(86) PCT No.: PCT/IB2007/000551

§ 371 Date: Aug. 26, 2008

(30) Foreign Application Priority Data
Feb. 28, 2006 (JP) 2006-117198

(51) Int. Cl. C12Q 1/68

(52) U.S. Cl. 435/6

(57) ABSTRACT

The invention relates to a method for identifying a useful protein of brewery yeast. More specifically, the invention relates to (a) cultivating yeast under a predetermined cultivation condition; (b) extracting a protein sample from the cultivation product of the yeast; (c) separating the protein sample by a protein separation means, selecting a target peak or spot, and recovering the target protein or a fragment thereof contained in the peak or spot; (d) determining the amino acid sequence of the target protein; (e) comparing the amino acid sequence determined in step (d) with the amino acid sequence determined in advance based on all or a part of genome sequence information of bottom fermenting yeast; (f) identifying the target protein and the gene encoding the target protein based on the results of comparison; and (g) analyzing functions of the identified gene to identify characters given to the yeast by the gene.

### TECHNICAL FIELD

[0001] The invention relates to a method for identifying useful proteins of brewery yeast. More specifically, the invention relates to a method for identifying useful proteins of brewery yeast and genes encoding the proteins by proteome analysis using genome sequence information of brewery yeast.

[0002] The invention further relates to a gene identified by the above-mentioned method and uses thereof, in particular to breeding of brewery yeast useful for improving productivity of alcoholic beverages (for example beer) and/or for improving flavor such as stabilization or enhancement of flavor, the alcoholic beverages produced by using the yeast, a production method thereof and the like.

### BACKGROUND ART

[0003] In recent years, it is possible to introduce a target gene into desired cells and permits the gene to be expressed in the cell using genetic engineering techniques. Cells having desirable characters are prepared by gene engineering techniques with genes whose function have been analyzed using genome information.

[0004] In the production of fuel alcohol using industrial yeasts and alcoholic beverages using brewery yeasts, technologies for improving productivity and for stabilization and/or improvement of flavor have been successfully developed by using genetic engineering methods.

[0005] Proteome analysis is known as comprehensive protein analysis, and a method for identifying proteins and genes encoding the proteins as targets for genetic engineering. For example, it is used to identify the genes encoding said proteins separated by biochemical property and elucidate the function of the proteins by database searching (against known protein sequences).

[0006] An example of the most frequently used method in the analysis today is a peptide mass fingerprinting (PMF) method. A protein and a gene encoding the protein are identified by the PMF method, which comprises separating the protein by two-dimensional electrophoresis, digesting the protein with a protease such as trypsin, obtaining a mass spectrum of the resulting peptide mixture (peptide mass fingerprint) using a mass spectrometer, and comparing the mass spectrum obtained above with theoretical mass spectra calculated from amino acid sequences corresponding to nucleotide sequences from a genome data base.

[0007] A bottom fermenting yeast as one of the brewery yeast has been analyzed using a proteome analysis method (Joubert et al., Electrophoresis, 22, 2969 (2001)). However, it was not comprehensive analysis because almost half of the genome of bottom fermenting yeast has been unknown. Namely, the bottom fermenting yeast is an alloploid composed of at least two types of genome (Y. Tamai et. al., Yeast, 10, 923 (1998)). One of the genomes is considered to be derived from S. cerevisiae (Saccharomyces cerevisiae type; may be abbreviated as “Sc” hereinafter) whose genome has been sequenced (for example, see A. Goffeau et al., Nature, 387, 5 (1997)). However, remaining genome (Non-S. cerevisiae type; may be abbreviated as “Non-Sc” hereinafter) has not been sequenced

### DISCLOSURE OF INVENTION

[0008] Under the above-mentioned situations, it is desired to analyze whole genome of the bottom fermenting yeast for the comprehensive proteome analyses to identify proteins and the genes encoding the proteins useful for improving productivity and/or flavor of the alcoholic beverages.

[0009] In view of the above-mentioned problems, the present inventors have sequenced genome of the bottom fermenting yeast. The bottom fermenting yeast was proved to have a genome structure having a Sc type nucleotide sequence group that shows over 94% identity and a Non-Sc type nucleotide sequence group that shows about 84% identity. The function of proteins encoded by the gene of the bottom fermenting yeast was inferred by comparing with the amino acid sequences that are registered in the genome database (DB) of S. cerevisiae whose genome sequences have been already elucidated. The results proved that the proteins of the bottom fermenting yeast are roughly divided into two types: those with nearly 100% amino acid identity to S. cerevisiae (Sc type) and those with 70 to 97% (Non-Sc type). The present inventors have made intensive studies based on these discoveries, and have completed the invention.

[0010] The invention provides a method for identifying desired proteins of yeast or genes encoding the proteins based on information of the analyzed genome sequence of the bottom fermenting yeast.

[0011] In particular, the invention provides a method for identifying useful proteins of brewery yeast and genes encoding the proteins.

[0012] Specifically, the invention provides the following:

[0013] [1] A method for identifying a target protein of yeast or a gene encoding the target protein comprising the steps of:

[0014] (a) cultivating yeast under a predetermined cultivation condition;

[0015] (b) extracting a protein sample from the cultivation product of the yeast;

[0016] (c) separating the protein sample by a protein separation means, selecting a target peak or spot, and recovering a target protein or a fragment thereof contained in the peak or spot;

[0017] (d) determining the amino acid sequence of the target protein;

[0018] (e) comparing the amino acid sequence determined in step (d) with the amino acid sequence determined in advance based on all or a part of genome sequence information of the bottom fermenting yeast;

[0019] (f) identifying the target protein and the gene encoding the target protein based on the results of comparison; and

[0020] (g) analyzing functions of the identified gene to identify characters given to the yeast by the gene.

[0021] In addition, as used in the present specification, the term “cultivation product” broadly means those obtained by cultivation of yeast (or a yeast strain), and includes broth (or culture), culture precipitates, yeast cells contained therein, culture supernatant and the like.

[0022] [2] A method for identifying a target protein of yeast or a gene encoding the target protein comprising the steps of:

[0023] (1) referring to a database comprising all or a part of genome sequence information of the bottom fermenting yeast based on the amino acid sequence of the target protein of the yeast;

[0024] (2) identifying a gene encoding the target protein based on the result of reference; and

[0025] (3) analyzing functions of the identified gene to identify characters given to the yeast by the gene.

[0026] [3] A method for identifying a target protein of yeast or a gene encoding the target protein comprising the steps of:

[0027] (1) separating one or more proteins from a protein extract derived from yeast (including a protein directly extracted from yeast, a secreted protein in broth, and the like) and determining the amino acid sequences of the one or more proteins;

[0028] (2) referring to a database comprising all or a part of genome sequence information of the bottom fermenting yeast based on the amino acid sequence of the one or more proteins;

[0029] (3) identifying the gene encoding the one or more proteins based on the results of reference; and

[0030] (4) analyzing functions of the identified gene to identify characters given to the yeast by the gene.

[0031] [4] A method for identifying a target protein of yeast or a gene encoding the target protein comprising the steps of:

[0032] (1) cultivating yeast under a predetermined cultivation condition;

[0033] (2) extracting a protein sample from the cultured product of the yeast;

[0034] (3) determining the amino acid sequence of the one or more proteins contained in the protein sample;

[0035] (4) comparing the amino acid sequence determined in step (3) with the amino acid sequence determined in advance based on all or a part of genome sequence information of the bottom fermenting yeast;

[0036] (5) identifying the gene encoding the target protein based on the above-mentioned results of comparison; and

[0037] (6) analyzing functions of the identified gene to identify characters given to the yeast by the gene.

[0038] [5] A method for identifying a target protein of yeast or a gene encoding the target protein comprising the steps of:

[0039] (1) cultivating yeast under different cultivation conditions;

[0040] (2) extracting a protein sample from each cultivation product obtained in step (1),

[0041] (3) analyzing the protein sample and identifying a highly expressed or low expressed protein under each cultivation condition;

[0042] (4) determining the amino acid sequence of the protein identified in step (3);

[0043] (5) comparing the amino acid sequence determined in step (4) with the amino acid sequence determined in advance based on all or a part of genome sequence information of the bottom fermenting yeast;

[0044] (6) identifying the gene encoding the target protein based on the results of comparison; and

[0045] (7) analyzing functions of the identified gene to identify characters given to the yeast by the gene.

[0046] [6] A method for identifying a target protein of yeast or a gene encoding the target protein comprising the steps of:

[0047] (1) cultivating different strains of the yeast under the same cultivation condition;

[0048] (2) extracting a protein sample from each cultivation product obtained in step (1),

[0049] (3) analyzing the protein sample and identifying a protein whose expression level is different (higher expression or lower expression) in each cultivation product;

[0050] (4) determining the amino acid sequence of the protein identified in step (3);

[0051] (5) comparing the amino acid sequence determined in step (4) with the amino acid sequence determined in advance based on all or a part of genome sequence information of the bottom fermenting yeast;

[0052] (6) identifying the gene encoding the target protein based on the results of comparison; and

[0053] (7) analyzing functions of the identified gene to identify characters given to the yeast by the gene.

[0054] [7] The method according to any one of [1] to [6], wherein all or a part of genome sequence information of the bottom fermenting yeast comprises the nucleotide sequences of:

[0055] SEQ ID Nos.: 33 to 6236,

[0056] SEQ ID Nos.: 75337 to 82784,

[0057] SEQ ID Nos.: 166154 to 166181,

[0058] SEQ ID Nos.: 166490 to 167042; and

[0059] SEQ ID Nos.: 173125 to 174603.

[0060] [8] The method according to any one of [1] to [6], wherein all or a part of genome sequence information of the bottom fermenting yeast comprises two or more nucleotide sequences selected from:

[0061] SEQ ID Nos.: 33 to 6236,

[0062] SEQ ID Nos.: 75337 to 82784,

[0063] SEQ ID Nos.: 166154 to 166181,

[0064] SEQ ID Nos.: 166490 to 167042; and

[0065] SEQ ID Nos.: 173125 to 174603.

[0066] [9] The method according to any one of [1] to [6], wherein all or a part of genome sequence information of the bottom fermenting yeast comprises the nucleotide sequences of SEQ ID Nos.: 33 to 6236.

[0067] [10] The method according to any one of [1] to [6], wherein all or a part of genome sequence information of the bottom fermenting yeast comprises two or more nucleotide sequences selected from SEQ ID Nos.: 33 to 6236.

[0068] [11] The method according to any one of [1] to [6], wherein all or a part of genome sequence information of the bottom fermenting yeast comprises nucleotide sequences of SEQ ID Nos.: 166154 to 166181.

[0069] [12] The method according to any one of [1] to [6], wherein all or a part of genome sequence information of the bottom fermenting yeast comprises two or more nucleotide sequences selected from SEQ ID Nos.: 166154 to 166181.

[0070] The method of the invention allows efficient identification of genes associated with desired fermentation characteristics and the proteins encoded by the genes, and thus allows comprehensive analysis of the function of the translation products of the genes contained in the genome of the bottom fermenting yeast.

[0071] In addition, according to the present invention, the fermentation characteristics of the yeast can be controlled by identifying the nucleotide sequence of the gene considered to be involved in fermentation characteristics of brewery yeast, and by high expression or disruption of the gene using gene engineering techniques.

[0072] According to the invention, the yeast showing good fermentation characteristics may be bred, and fuel alcohol or alcoholic beverages may be produced with improved productivity and quality using the yeast. For example, using Non-Sc MET17 gene identified by the present invention, yeast modified so as to express the gene in high level resulting in reduction of hydrogen sulfide, can be provided. Use of such yeast enables the concentration of hydrogen sulfide to be suppressed in a low level, and allows production of alcoholic beverages without off-flavor.

### BRIEF DESCRIPTION OF THE DRAWINGS

[0073] FIG. 1 shows the cell growth with time upon beer fermentation test. The horizontal axis represents fermentation time while the vertical axis represents OD660 (optical density at 660 nm).

[0074] FIG. 2 shows the sugar consumption with time upon beer fermentation test. The horizontal axis represents fermentation time while the vertical axis represents apparent extract concentration (w/w %).

[0075] FIG. 3 shows the methionine concentration with time upon beer fermentation test The horizontal axis represents the fermentation time, and the vertical axis represents the methionine concentration (mM).

[0076] FIG. 4 shows the cell growth of the parent strain and Non-ScMET17 highly expressed strain with time upon beer fermentation test. The horizontal axis represents fermentation time while the vertical axis represents OD660 (optical density at 660 mm).

[0077] FIG. 5 shows the sugar consumption with time upon beer fermentation test using the parent strain and Non-ScMET17 highly expressed strain. The horizontal axis represents fermentation time while the vertical axis represents apparent extract concentration (w/w %).

### BEST MODE FOR CARRYING OUT THE INVENTION

### 1. Outline of the Invention

[0078] The present inventors created a database for identifying target yeast proteins and genes encoding the target proteins based on genome sequence analyzed by a method outlined in Japanese Patent Application Laid-Open (JP-A) No. 2004-283169. The data were not open to the public at the priority date of this application.

[0079] The database includes information of the genome sequence of the bottom fermenting yeast. The database specifically includes information of the nucleotide sequence listed in the attached sequence listing. The content of information of the nucleotide sequence (information of the nucleotide sequence of the genome of the bottom fermenting yeast) described in the attached sequence listing is as follows.

[0080] SEQ ID Nos.: 33 to 6236 represent nucleotide sequences of 6204 Non-Sc type open reading frames (may be abbreviated as ORF hereinafter). SEQ ID Nos.: 75337 to 82784 represent nucleotide sequences of 7448 Sc type ORFs. SEQ ID Nos.: 166154 to 166181 represent nucleotide sequences of 28 mitochondrial ORFs of the bottom fermenting yeast. While SEQ ID Nos.: 166490 to 167042 have not been identified as above ORFs, they represent 553 nucleotide sequences having significant similarity to the S. cerevisiae genes by homology search with NCBI-BlastX (http://www.ncbi.nlm.nih.gov/BLAST/). SEQ ID Nos.: 173125 to 174603 have been identified as other ORFs which represent 1479 nucleotide sequences encoding proteins which show significant similarity to the S. cerevisiae protein by homology search with NCBI-BlastP (http://www.ncbi.nlm.nih.gov/BLAST/).

[0081] Target proteins of yeast (or proteins having unknown functions) or genes encoding the target proteins can be identified by a proteome analysis method with use of the database based on yeast genome information. The proteome analysis methods include a method comprising the steps of: separating and purifying the target protein by a protein separation and purification method (for example two-dimensional electrophoresis (2-DE)) and high performance liquid chromatography (HPLC); and specifying the target protein by a protein identification method (for example, comparison of peptide maps obtained by mass spectral analysis or comparison of amino acid sequences obtained by amino acid sequencing). The target protein may be selected by utilizing known methods (for example two-dimensional electrophoresis (2-DE), two-dimensional fluorescence differential gel electrophoresis (2D-DIGE) or isotope-coded affinity tag method (ICAT method)). Functions of proteins having unknown functions in the protein sample can be comprehensively analyzed by using a shot gun method.

[0082] Accordingly, the invention provides a method for specifying the target protein of the yeast (or proteins having unknown functions) and the gene encoding the target protein based on the proteome analysis method using novel sequence information of the genome of bottom fermenting yeast. Optionally, the functions of the specified target protein and the gene encoding the target protein may be analyzed using known methods.

[0083] Specifically, the invention comprises the following aspects of the methods.

### Embodiment 1

[0084] A method for identifying a target protein of yeast or a gene encoding the target protein, the method comprising the steps of: (a) cultivating yeast under a give cultivation condition; (b) extracting a protein sample from cultivation products of the yeast; (c) separating the protein sample by a protein separation means to select a target peak or spot and recovering a target protein or a fragment thereof contained in the peak or spot;

[0085] (d) determining the amino acid sequence of the target protein; (e) comparing the amino acid sequence determined in Step (d) with the amino acid sequence determined in advance based on all or a part of genome sequence information of the bottom fermenting yeast; (f) identifying a gene encoding the target protein based on the results of comparison; and (g) analyzing the function of the identified gene to identify characteristics given by the gene to the yeast.

### Embodiment 2

[0086] A method for identifying a target protein of yeast or a gene encoding the target protein comprising the steps of: (1) referencing a database comprising all or a part of genome sequence information of the bottom fermenting yeast based on the amino acid sequence (including information capable of specifying the amino acid sequence of the target protein, for example a mass spectrum pattern of a protein obtained by using a mass spectrometer) of the target protein of the yeast; (2) identifying the gene encoding the target protein based on the results of reference; and (3) analyzing the function of the identified gene to identify characteristics given by the gene to the yeast.

### Embodiment 3

[0087] A method for identifying a target protein of yeast or a gene encoding the target protein comprising the steps of: (1) separating one or more proteins from a protein extract derived from the yeast (including a protein directly extracted from yeast, a secreted protein in broth, and the like) and determining an amino acid sequence of the one or more proteins (including a step for acquiring information for specifying the amino acid sequence); (2) referencing a database comprising all or a part of genome sequence information of the bottom fermenting yeast based on the amino acid sequence of the one or more proteins (including information capable of specifying the amino acid sequence); (3) identifying the gene encoding the one or more proteins; and (4) analyzing the function of the identified gene to identify characteristics given by the gene to the yeast.

### Embodiment 4

[0088] A method for identifying a target protein of yeast or a gene encoding the target protein comprising the steps of: (1) cultivating yeast under a given cultivation condition; (2) extracting a protein sample from cultivated products of the yeast; (3) determining an amino acid sequence of the one or more proteins contained in the protein sample; (4) comparing the amino acid sequence determined in Step (3) with the amino acid sequence determined in advance based on all or a part of genome sequence information of the bottom fermenting yeast; (5) identifying a gene encoding the target protein based on the results of comparison; and (6) analyzing the function of the identified gene to identify characteristics given by the gene to the yeast.

### Embodiment 5

[0089] A method for identifying a target protein of yeast or a gene encoding the target protein comprising the steps of: (1) cultivating the same strain of yeast under different cultivation conditions; (2) extracting a protein sample from each cultivation product obtained in Step (1); (3) analyzing the protein sample and specifying a highly expressed or low expressed protein under each cultivation condition; (4) determining the amino acid sequence of the protein specified in Step (3); (5) comparing the amino acid sequence determined in Step (4) with the amino acid sequence determined in advance based on all or a part of genome sequence information of the bottom fermenting yeast; (6) identifying the gene encoding the target protein based on the results of comparison; and (7) analyzing the function of the identified gene to identify characteristics given by the gene to the yeast.

### Embodiment 6

[0090] A method for identifying a target protein of yeast or a gene encoding the target protein comprising the steps of: (1) cultivating different strains of yeast under the same cultivation condition; (2) extracting a protein sample from each fermentation product obtained in Step (1); (3) analyzing the protein sample and identifying a protein whose expression level is different (higher expression or lower expression) in each cultivation product; (4) determining the amino acid sequence of the protein specified in Step (3); comparing the amino acid sequence determined in Step (4) with the amino acid sequence determined in advance based on all or a part of genome sequence information of the bottom fermenting yeast; (6) identifying a gene encoding the target protein based on the results of comparison; and (7) analyzing the function of the identified gene to identify characteristics given by the gene to the yeast.

[0091] As used herein, the term “target protein” refers to a useful protein to be specified in the invention, and all or part of the amino acid sequence is an object of search using a reference sequence database. The target protein includes a protein having unknown functions. Representative examples of the target protein include yeast proteins. While representative examples of the desired yeast proteins include proteins of the brewery yeast (for example the bottom fermenting yeast belonging to S. pastorianus and top fermenting yeast belonging to S. cerevisiae) and proteins of the baker's yeast, but are not limited thereto. An example of the preferable target protein includes a protein useful for brewing beer.

[0092] As used herein, the term “brewery yeast” refers to arbitrary yeast capable of being used for brewing of alcoholic beverages. Examples of yeast include those used for fermentation of beer, wine, sake, whisky and shochu.

[0093] The kind of beer is roughly divided into three categories depending on the kind of yeast and the method of fermentation. The three categories include natural fermentation beer fermented by utilizing wild yeast or microorganisms in a brewery; ale beer fermented at a temperature from 20 to 25° C. using top fermenting yeast belonging to S. cerevisiae with a short aging period thereafter; and lager beer fermented at a temperature from 6 to 15° C. using bottom fermenting yeast belonging to Saccharomyces pastorianus with low temperature aging thereafter. Bottom fermenting yeast used for brewing of lager type beer is most widely used in brewing of beer.

[0094] As used herein, the term “a part of proteins” refers to a fragment(s) of a protein (for example a peptide fragment obtained by protease digestion of the protein). The length of the protein fragment preferably consists of at least four amino acid residues so that the original protein can be identified by the analysis of a reference database by using the amino acid sequence of the fragment (for example, see Wilkins et al., J. Mol. Biol., 278, 599 (1998)). Synthetic polypeptides obtained by a peptide synthesizer may be included in the protein fragment.

[0095] As used herein, the term “determining the amino acid sequence” is used to mean to include determining all or a part of the amino acid sequence of the target protein, as well as to include acquiring information capable of specifying the amino acid sequence of the target protein (for example a spectrum pattern obtained by using a mass spectrometer). While it is preferable to determine the complete amino acid sequence of the target protein, the invention may be practiced when an amino acid sequence having a length capable of extracting similar sequences can be determined by comparing with amino acid sequences in a reference database. For example, the target protein is considered to be screened when an identifying software, for example MASCOT, indicates the presence of at least one fragment having an expected value (P-value) of less than 0.05 in the amino acid sequence in a reference database showing a hit with the target database, and the fragment covers 5% or more, 10% or more, 20% or more, 30% or more, 40% or more, 50% or more, 60% or more, 70% or more, 80% or more, 90% or more, 95% or more, 97% or more of the total length of the target protein (naturally, the larger percentage is more preferable). The term “all or a part of the amino acid sequence” refers to all or a part of the amino acid sequence of the protein to be searched, and examples thereof include the amino acid sequence of a protein whose amino acid sequence has been known or fragments thereof, and the amino acid sequence whose amino acid sequence has not been known or fragments thereof, wherein the amino acid sequence is identified by mass spectrometric analysis or other methods according to the method for analyzing proteomes. While the amino acid sequence may be theoretically derived from a mass spectrometric pattern of the protein (may be abbreviated as “mass pattern” herein) obtained using a mass spectrometer, the mass pattern and the amino acid sequence theoretically estimated from the mass pattern may be considered to be equivalent to the amino acid sequence of all or a part of the above mentioned protein. Accordingly, the phrase “determining the amino acid sequence of the protein” is meant to include inference of all or a part of the amino acid sequence of the protein from the mass pattern. The mass pattern is usually represented by peaks of respective peptides in a polypeptide sample subjected to the analysis by taking m/z (mass/charge) of the ionized peptide or protein in the horizontal axis and a relative intensity in the vertical axis. Usually, the amino acid sequence is theoretical induced from the mass pattern using exclusive use software (for example MASCOT).

[0096] As used herein, the term “reference database” or “reference sequence database” refers to a nucleotide sequence database comprising all or a part of genome sequence information of the bottom fermenting yeast or an amino acid sequence database theoretically translated from the nucleotide sequence database. The term “theoretically translated amino acid sequence” refers to an amino acid sequence predicted to be coded by a predetermined nucleotide sequence according to universal genetic code when the amino acids are encoded by the gene on the nuclear (chromosomal) DNA and “The Yeast Mitochondrial Code (http://www.ncbi.nlm.hih.gov/Taxonomy/Utils/wprintgc.cgi?mode=c#SG3)” when the amino acids are encoded by the gene on the mitochondria.

[0097] As used herein, the term “all of the genome sequence information of the bottom fermenting yeast” refers to an entire nucleotide sequence of the genome of the bottom fermenting yeast. As used herein, the term “a part of genome sequence information of the bottom fermenting yeast” refers to at least a part of the nucleotide sequence of the genome of the bottom fermenting yeast (for example at least one contig (contiguous nucleotide sequence)). The length of “at least a part of the nucleotide sequence of the genome of the bottom fermenting yeast” is 8 bases or more, more preferably 12 bases or more, 15 bases or more, 18 bases or more, 21 bases or more, 24 bases or more, 27 bases or more or 30 bases or more, further preferably 40 bases or more, 50 bases or more, 60 bases or more, 70 bases or more, 80 bases or more, 90 bases or more or 100 bases or more, far more preferably 200 bases or more, 300 bases or more, 400 bases or more, 500 bases or more, 600 bases or more, 700 bases or more, 800 bases or more or 900 bases or more, and most preferably 1000 bases or more. Examples of the database comprising a part of genome sequence information of the bottom fermenting yeast include, for example, a nucleotide sequence database comprising at least one contig of the genome of the bottom fermenting yeast, a nucleotide sequence information comprising at least one open reading frame nucleotide sequence of the bottom fermenting yeast, and a nucleotide sequence information comprising at least one nucleotide sequence of open reading frame classified according to respective function. The open reading frame of the nucleotide sequence of the genome may be identified by using a program such as ORF Finder (http://www.ncbi.nih.gov/gorf/gorf.gtml). As used herein, the term “function of the gene” may be used to include function of the gene and/or function of translation product of the gene.

### 2. Selection of Target Protein

[0098] The object of the invention is to identify the target protein of yeast or the gene encoding the target protein and/or the function, and the method for selecting the target protein is not particularly restricted. The target protein is usually obtained from a protein extract derived from yeast in the invention, for example from a cultivation product of yeast or yeast cells per se. However, according to the present invention, the target protein of yeast or the gene encoding the target protein and/Or the function may be analyzed by a proteome analysis method using the amino acid sequence of the protein as a clue. Accordingly, the target protein of yeast or the gene encoding the target protein and/or the function may be analyzed by determining the amino acid sequence of the protein, even when a method for obtaining the target protein is not known.

[0099] Specifically, in the present invention, a protein sample may be prepared from cultivation products obtained by cultivating the yeast under a predetermined condition.

[0100] In the present invention, protein samples obtained from two or more cultivation products may be prepared depending on the method for applied proteome analysis. For example, the same strain of yeast may be cultivated under different cultivation conditions, or different strains of yeast may be cultivated under the same cultivation condition, and the protein sample may be prepared from each cultivation product.

[0101] As used herein, the term “predetermined cultivation condition” may be any conditions capable of cultivating the yeast cells, and the compositions thereof are not particularly restricted. Accordingly, the “predetermined cultivation condition” may be appropriately selected as a condition suitable for cultivating the yeast cells in a liquid medium or solid medium, or as a specific condition which should be investigated with respect to specific characters of the cultivated products.

[0102] Examples of the cultivation condition include cultivation temperature, cultivation time, cultivation atmosphere, pH and the concentrations of substances (or kind of the medium) required for maintaining viability and growth of the yeast cells such as salts, carbon sources, nitrogen sources and vitamins. Naturally, various commercially available liquid media may be used. For example a YPD medium (2% (w/w) glucose, 1% (w/w) yeast extract, 2% (w/w) polypeptone) may be used. A preferable cultivation method is usually overnight shaking cultivation at a temperature from about 25 to 35° C. When a protein or a gene that exhibits its function under a specified culture condition is a target, the cultivation condition is changed depending on the function. For example, when a protein related to low temperature resistance or a gene encoding the target protein is a target, the yeast is cultivated at a low temperature, and a protein expressed in high level under the cultivation condition may be selected as a target protein.

### 3. Extraction of Protein from Protein Sample

[0103] In the present invention, the protein sample may be extracted from the cultivation product or yeast cells obtained as described above. Any protein extraction methods known in the art may be used as the extraction method. For example, the method described in O'Farrell, J. Biol. Chem., 250, 4007 (1975) may be used, wherein the protein may be extracted by dissolving the sample in a dissolution solution containing 8M urea, 2% NP-40, 2% carrier ampholyte and 5% 2-mercaptoethanol. Usually, in order to enhance extraction of the protein from the cells, the cells are homogenized before extraction using a homogenizer after suspending the cultivated yeast cells in a homogenizing buffer (for example 10 mmol/L Tris-HCl, pH 7.4, 5 mmol/L MgCl₂, 50 mg/L RNaseA, 1.6 mg/mL protease inhibitor (trade name COMPLETE; manufactured by Boehringer Mannheim Co.)), and a supernatant obtained by centrifugation is used for extracting the protein.

[0104] The protein is extracted at a low temperature (for example 4° C.) for suppressing the protein degradation by protease contained in the yeast cells during the extraction process of the protein, and a protease inhibitor is preferably added. Examples of the protease inhibitor include serine protease inhibitors such as PMSF and chymostatin, cysteine protease inhibitors such as leupeptin, aspartic acid protease inhibitors such as pepstatin A, and metalloprotease inhibitors such as phosphoramidon and EDTA.Na₂. These protease inhibitors may be used alone, or in combination. Various commercially available protease inhibitors (for example trade name COMPLETE; manufactured by Boehringer Mannheim Co.) may be used.

### 4. Separation of Protein

[0105] According to the present invention, subsequently, the extracted protein is separated by protein separation methods. As used herein, the term “protein separation methods” refers to a method for separating various proteins contained in the protein sample according to the molecular weight and/or charges of each protein. Examples of the “protein separation methods” include electrophoresis (for example SDS-PAGE, isoelectric focusing and two-dimensional electrophoresis), liquid chromatography (for example ion-exchange chromatography, gel filtration chromatography, affinity chromatography, HPLC and FPLC), gas chromatography, centrifugation (for example ultra-centrifugation), precipitation (for example ammonium sulfate precipitation, organic solvent precipitation (for example acetone precipitation and ethanol precipitation)), pH treatment (for example acid treatment) and membrane separation (for example ultrafiltration).

[0106] The target protein may be preferably separated using two-dimensional electrophoresis, two-dimensional fluorescence differential gel electrophoresis or the like.

[0107] Simple and preferable protein separation methods may include two-dimensional electrophoresis. The two-dimensional electrophoresis is a method comprising two steps. The first step is one-dimensional gel electrophoresis using a disk or a planar gel. The second step is placing the first-dimensional gel at the top of a plate of an electrophoresis gel under a different principle or condition from the first-dimensional electrophoresis, and separating the protein by electrophoresis in a direction perpendicular to the direction of the first-dimensional electrophoresis. In the present invention, two-dimensional electrophoresis by O'Farell (1975, supra) may be favorably used. (usually, isoelectric focusing is used as the first-dimensional electrophoresis followed by two-dimensional SDS-PAGE). Liquid chromatography (LC) may be also favorably used in the invention other than two-dimensional electrophoresis.

[0108] The proteins separated by gel electrophoresis may be detected by Coomassie brilliant blue staining or silver staining. The proteins may be stained with other pigments (for example, amido black, Ponceau S or fluorescent pigment). Various staining kits are commercially available.

[0109] In the method of the present invention, subsequently, a separation pattern (or separation profile) of the proteins separated by the protein separation methods is analyzed to select a target peak(s) or spot(s), and the target protein or a fragment of the protein contained in the peak(s) or spot(s) are recovered. The “separation pattern (or separation profile)” as used herein is intended to mean an elution profile or a two-dimensional electrophoresis pattern indicated by the separated protein by the protein separation methods. For example, the profile means an elution profile when the protein sample is separated by liquid chromatography, and the pattern (or profile) means the pattern (or profile) of the protein distributed on the gel when the protein sample is separated by two-dimensional electrophoresis. The molecular weight of each separated protein is usually indicated by the position (or mobility) of the peak or spot in the separation pattern, and the concentration of each protein is shown by the intensity of each peak or spot. The desired peak or spot (target peak or target spot) is selected from these peaks or spots with reference to the position, mobility or intensity of the peak or spot.

[0110] The yeast cells may be independently cultivated in the above-mentioned cultivation process under the conditions in which at least one parameter (for example temperature, osmotic pressure and addition of ethanol) is higher or lower (stress condition) as compared with a usual cultivation condition (non-stress condition) suitable for cultivation of the yeast cells so that yeast cells having desired characteristics may be selected, if necessary. The separation pattern of the protein sample derived from a yeast strain cultivated under the stress condition may be compared with the separation pattern of the protein sample derived from a yeast strain cultivated under the non-stress condition, and peaks or spots expressed in higher levels or lower levels than those under the non-stress condition are selected.

[0111] In another embodiment of the present invention, a wild strain of the brewery yeast and a mutant strain or a strain that more evidently exhibits desired characteristics than the wild strain may be cultivated under a condition suitable for cultivating the yeast. The protein samples extracted from these cultivation products are separated by the protein separation methods, and the separation pattern of the protein sample derived from the wild strain is compared with that from the mutant strain or the strain that more evidently exhibits desired characteristics than the wild strain. Thus, the peak or spot of the protein expressed in a high level (or low level) is selected from the mutant strain or the strain that more evidently exhibits desired characteristics than the wild strain. An example of the strain that more evidently exhibits the desired characteristics than the wild strain includes a strain that provides more beer flavor components than the wild strain. Consequently, the method of the present invention may be used for identifying proteins that are the causes of emergence of phenotypes of the strain that more evidently exhibits the desired characteristics than the wild strain or genes encoding the target proteins.

[0112] In another embodiment, the separation pattern of the protein sample may be compared with the separation pattern of the protein sample extracted from a strain of S. cerevisiae whose genome has been published, when the protein sample extracted from a fermentation product of brewery yeast is separated, and then a target spot or peak is selected. Then, the target protein contained in the peak or spot or fragments of the protein are recovered, and a peak or spot characteristic in the separation pattern of the brewery yeast is selected. The protein specific to the bottom fermenting yeast or the gene encoding the target protein can be efficiently identified by determining the amino acid sequences of the proteins of these spots, and by searching and identifying the nucleotide sequence corresponding to each amino acid in the database of the open reading frame of the genome sequence of the bottom fermenting yeast. The separation pattern of the protein sample extracted from the yeast strain of S. cerevisiae available may be arranged into a database in advance as a two-dimensional electrophoresis database.

[0113] In a further embodiment of the present invention, the protein may be extracted from the yeast cells sampled from a fermentation broth of beer in order to identify a useful protein of the brewery yeast and to select a desired protein. Specifically, beer is fermented using the bottom fermenting yeast, the fermentation broth is sampled with time from the start of fermentation, and the cell growth and apparent extract concentration are observed. The yeast cells are recovered from the sampled fermentation broth by centrifugation in parallel with sampling, and the protein is extracted from the recovered yeast cells. The fermentation (cultivation) supernatant is also recovered, and the amino acid composition is analyzed using the recovered fermentation supernatant. The protein extracted from the cells is then separated by the protein separation means to prepare a separation pattern or separation profile. The separation patterns or separation profiles of the protein extract derived from the cells, which are sampled at two or more different times (for example after 8 hours and after 32 hours) from the start of fermentation, may be compared to one another. Then, a spot or peak that shows an increased intensity in accordance with the decrease of the contents of valine, leucine, isoleucine, methionine or the like, which are obtained from amino acid analysis of the fermentation supernatant, may be selected. A desired protein may be also selected from the brewed broth or fermented broth of wine or sake, not only from the broth of beer.

[0114] Subsequently, the target protein contained in the target peak or spot or the fragments thereof is recovered. When the protein separated by two-dimensional electrophoresis is subjected to peptide mass fingerprinting or to amino acid sequence analysis by mass analysis, the separated protein is specifically fragmented with protease or using a chemical degradation method usually in a gel or on a membrane filter by transferring the protein on the membrane filter after separating by two-dimensional electrophoresis. Both the digestion method in the gel and the digestion method on the membrane filter are used in the invention.

[0115] An Eckerskorn-Lottspeich method (Eckerskorn, C. & Lottspeich, F., Chromatographia, 28, 92 (1989)) or an improved method thereof may be used as the digestion method in the gel. In the Eckerskorn-Lottspeich method, the gel fraction including the desired spot (target protein portion) on the gel stained by Coomassie brilliant blue is cut out, and the gel fraction is soaked in alkaline solution. Then, the gel fraction is dried, and the gel fraction is rehydrated by adding a protease solution to the dry gel fraction in order to permit the protease to permeate into the gel. The protein is digested by allowing the protease to contact the protein. Trypsin and lysyl endopeptidase may be used as the protease. The protein may be fragmented on the membrane filter by interposing a PVDF membrane on which trypsin or lysyl endopeptidase is bound between the gel and blotting membrane filter when the protein separated by two-dimensional electrophoresis is blotted. The protein can be digested when the protein is transferred from the get to the blotting membrane filter, and the protein is blotted on the blotting membrane filter as peptides.

[0116] In the present invention, the target protein can be separated with use of two-dimensional fluorescence differential gel electrophoresis (2D-DIGE) or isotope-coded affinity tag method (ICAT method; Nat. Biotechnol., 17, 994 (1999)). Since proteins obtained from two different cultivation products may be labeled with different fluorescent labels or isotope labels, respectively, according to 2D-DIGE or ICAT method, it is an advantage of these methods that differently expressed proteins in both cultivation products can be readily found.

### 5. Determination of Amino Acid Sequence of Target Protein

[0117] In the process of the present invention, subsequently, the amino acid sequence of the target protein or fragments thereof is determined. The amino acid sequence may be usually determined using a mass spectrometer (MS). In the mass spectrometric analysis, the mass of the sample is determined by ionizing a sample such as a protein or peptide using MS, separating the ions obtained according to mass/charge (m/z) ratios, and measuring the intensity of each separated ion peak. Various methods such as matrix-assisted laser desorption/ionization method (MALDI) method, electro-spray ionization (ESI) method, gas phase (EI, CI) method and field desorption ionization (FD) method may be used for ionization. An ion separation method compatible with the ionization method may be used for ion separation, and examples of the apparatus used for the method include a time-of-flight (TOF) mass spectrometer for MALDI and a quadrupole (QMS), ion trap or magnetic sector mass spectrometer for ESI. The mass spectrometer may be used in tandem. Examples of the apparatus include LC-ESI, MS/MS, Q-TOF MS and MALDI-TOF MS. Other methods for determining the amino acid sequence, for example a method for determining the amino acid sequence with a sequencer (for example gas phase sequencer), may be also used.

[0118] Mass spectrum (peptide mass fingerprint) of the peptide mixture obtained by protease digestion is produced by MS. While the mass spectroscopic method is not particularly restricted, representative examples include MALDI-TOF MS and ESI Q-TOF MS. The characteristics of the protein separated by two-dimensional electrophoresis can be elucidated (for example determination of the amino acid sequence) comparing the peptide mass finger print with the theoretical spectrum calculated from the amino acid sequence of the protein database. In addition, the gene encoding the protein can be identified by comparing the peptide mass finger print with the theoretical mass spectrum calculated from the amino acid sequence corresponding to the nucleotide sequence of the DNA database. An exclusive use software (for example MASCOT) may be usually used for such treatment.

[0119] A shot-gun analysis method (Nat. Biotechnol., 17, 676 (1999)) may be used for proteome analysis of the present invention. In the shot-gun analysis method, extracted proteins are digested with a protease, and digestion products are separated by multi-dimensional LC. Then, the amino acid sequences of the peptides in the digested products are analyzed by MS/MS, and a large amount of the sequence data are analyzed by a computer to sequentially identify the proteins. It is advantageous to use this shot-gun analysis method that proteins having unknown functions can be collectively analyzed from a cultivation product of a given yeast.

### 6. Identification of Gene

[0120] After determining the amino acid sequence of the target protein (or a part of the protein) as described above, the gene encoding the protein is determined from the amino acid sequence (or a part of the amino acid sequence) with reference to the reference database.

[0121] The reference database used in the invention comprises all or a part of genome sequence information of the bottom fermenting yeast.

[0122] Examples of the reference database used in the invention are described below.

### (Database: Reference Example 1)

[0123] Representative examples for identifying the target protein of yeast or the gene encoding the target protein, then comprehensively analyzing the functions of the translation products of the gene are genome sequence databases of the bottom fermenting yeast comprising the base sequences of the following SEQ ID Nos.:

[0124] SEQ ID Nos.: 33 to 6236,

[0125] SEQ ID Nos.: 75337 to 82784,

[0126] SEQ ID Nos.: 166154 to 166181,

[0127] SEQ ID Nos.: 166490 to 167042 and

[0128] SEQ ID Nos.: 173125 to 174603.

### (Database: Reference Example 2)

[0129] The database may be constructed by dividing into above-mentioned groups. For example, a database comprising one or plural sequence(s) of the following SEQ ID Nos. may be used for analyzing the functions of the translation products of the Non-Sc type genes of the bottom fermenting yeast:

[0130] SEQ ID Nos.: 33 to 6236

### (Database: Reference Example 3)

[0131] Furthermore, a database comprising one or plural sequence(s) of the following SEQ ID Nos. may be used for analyzing the functions of the translation products of the Sc type genes of the bottom fermenting yeast:

[0132] SEQ ID Nos.: 75337 to 82784

### (Database: Reference Example 4)

[0133] Furthermore, a database comprising one or plural sequence(s) of the following SEQ ID Nos. may be used for analyzing the functions of the translation products of mitochondrial ORF:

[0134] SEQ ID Nos.: 166154 to 166181

### (Database: Reference Example 5)

[0135] Examples of the databases used for the object of the invention are not restricted to those described above, and include databases comprising the following sequence information: 1 or more, 2 or more, 3 or more, 4 or more, 5 or more, 6 or more, 7 or more, 8 or more, 9 or more, 10 or more, 11 or more, 12 or more, 13 or more, 14 or more, 15 or more, 16 or more, 17 or more, 18 or more, 19 or more, 20 or more, 25 or more, 30 or more, 35 or more, 40 or more, 45 or more, 50 or more, 55 or more, 60 or more, 65 or more, 70 or more, 75 or more, 80 or more, 85 or more, 90 or more, 95 or more, 100 or more, 200 or more, 300 or more, 400 or more, 500 or more, 600 or more, 700 or more, 800 or more, 900 or more, 1000 or more, 1100 or more, 1200 or more, 1300 or more, 1400 or more, 1600 or more, 1700 or more, 1800 or more, 1900 or more, 2000 or more, 2100 or more, 2200 or more, 2300 or more, 2400 or more, 2500 or more, 2600 or more, 2700 or more, 2800 or more, 2900 or more, 3000 or more, 3100 or more, 3200 or more, 3300 or more, 3400 or more, 3500 or more, 3600 or more, 3700 or more, 3800 or more, 3900 or more, 4000 or more, 4100 or more, 4200 or more, 4300 or more, 4400 or more, 4500 or more, 4600 or more, 4700 or more, 4800 or more, 4900 or more, 5000 or more, 5100 or more, 5200 or more, 5300 or more, 5400 or more, 5500 or more, 5600 or more, 5700 or more, 5800 or more, 5900 or more, 6000 or more, 6100 or more, 6200 or more, 6300 or more, 6400 or more, 6500 or more, 6600 or more, 6700 or more, 6800 or more, 6900 or more, 7000 or more, 7100 or more, 7200 or more, 7300 or more, 7400 or more, 7500 or more, 7600 or more, 7700 or more, 7800 or more, 7900 or more, 8000 or more, 8100 or more, 8200 or more, 8300 or more, 8400 or more, 8500 or more, 8600 or more, 8700 or more, 8800 or more, 8900 or more, 9000 or more, 9100 or more, 9200 or more, 9300 or more, 9400 or more, 9500 or more, 9600 or more, 9700 or more, 9800 or more, 9900 or more, 10000 or more, 10100 or more, 10200 or more, 10300 or more, 10400 or more, 10500 or more, 10600 or more, 10700 or more, 10800 or more, 10900 or more, 11000 or more, 11100 or more, 11200 or more, 11300 or more, 11400 or more, 11500 or more, 11600 or more, 11700 or more, 11800 or more, 11900 or more, 12000 or more, 12100 or more, 12200 or more, 12300 or more, 12400 or more, 12500 or more, 12600 or more, 12700 or more, 12800 or more, 12900 or more, 13000 or more, 13100 or more, 13200 or more, 13300 or more, 13400 or more, 13500 or more, 13600 or more, 13700 or more, 13800 or more, 13900 or more, 14000 or more, 14100 or more, 14200 or more, 14300 or more, 14400 or more, 14500 or more, 14600 or more, 14700 or more, 14800 or more, 14900 or more, 15000 or more, 15100 or more, 15200 or more, 15300 or more, 15400 or more, 15500 or more, 15600 or more, or 15700 or more nucleotide sequences selected from nucleotide sequences of SEQ ID Nos.: 33 to 6236, SEQ ID Nos.: 75337 to 82784, SEQ ID Nos.: 166154 to 166181, SEQ ID Nos.: 166490 to 167042 and SEQ ID Nos.: 173125 to 174603.

### (Database: Reference Example 6)

[0136] In addition, databases which can be used, may comprise the following sequences information: 1 or more, 2 or more, 3 or more, 4 or more, 5 or more, 6 or more, 7 or more, 8 or more, 9 or more, 10 or more, 11 or more, 12 or more, 13 or more, 14 or more, 15 or more, 16 or more, 17 or more, 18 or more, 19 or more, 20 or more, 25 or more, 30 or more, 35 or more, 40 or more, 45 or more, 50 or more, 55 or more, 60 or more, 65 or more, 70 or more, 75 or more, 80 or more, 85 or more, 90 or more, 95 or more, 100 or more, 200 or more, 300 or more, 400 or more, 500 or more, 600 or more, 700 or more, 800 or more, 900 or more, 1000 or more, 1100 or more, 1200 or more, 1300 or more, 1400 or more, 1600 or more, 1700 or more, 1800 or more, 1900 or more, 2000 or more, 2100 or more, 2200 or more, 2300 or more, 2400 or more, 2500 or more, 2600 or more, 2700 or more, 2800 or more, 2900 or more, 3000 or more, 3100 or more, 3200 or more, 3300 or more, 3400 or more, 3500 or more, 3600 or more, 3700 or more, 3800 or more, 3900 or more, 4000 or more, 4100 or more, 4200 or more, 4300 or more, 4400 or more, 4500 or more, 4600 or more, 4700 or more, 4800 or more, 4900 or more, 5000 or more, 5100 or more, 5200 or more, 5300 or more, 5400 or more, 5500 or more, 5600 or more, 5700 or more, 5800 or more, 5900 or more, 6000 or more, 6100 or more, 6200 or more, 6300 or more, 6400 or more, 6500 or more, 6600 or more, 6700 or more, 6800 or more, 6900 or more, 7000 or more, 7100 or more, 7200 or more, 7300 or more, 7400 or more, 7500 or more, 7600 or more, 7700 or more, 7800 or more, 7900 or more, 8000 or more, 8100 or more, 8200 or more, 8300 or more, 8400 or more, 8500 or more, 8600 or more, 8700 or more, 8800 or more, 8900 or more, 9000 or more, 9100 or more, 9200 or more, 9300 or more, 9400 or more, 9500 or more, 9600 or more, 9700 or more, 9800 or more, 9900 or more, 10000 or more, 10100 or more, 10200 or more, 10300 or more, 10400 or more, 10500 or more, 10600 or more, 10700 or more, 10800 or more, 10900 or more, 11000 or more, 11100 or more, 11200 or more, 11300 or more, 11400 or more, 11500 or more, 11600 or more, 11700 or more, 11800 or more, 11900 or more, 12000 or more, 12100 or more, 12200 or more, 12300 or more, 12400 or more, 12500 or more, 12600 or more, 12700 or more, 12800 or more, 12900 or more, 13000 or more, 13100 or more, 13200 or more, 13300 or more, 13400 or more, 13500 or more, or 13600 or more nucleotide sequences selected from nucleotide sequences of SEQ ID Nos.: 33 to 6236, SEQ ID Nos.: 75337 to 82784 and SEQ ID Nos.: 166154 to 166181.

### (Database: Reference Example 7)

[0137] In addition, databases which can be used, may comprise the following sequence information: 1 or more, 2 or more, 3 or more, 4 or more, 5 or more, 6 or more, 7 or more, 8 or more, 9 or more, 10 or more, 11 or more, 12 or more, 13 or more, 14 or more, 15 or more, 16 or more, 17 or more, 18 or more, 19 or more, 20 or more, 25 or more, 30 or more, 35 or more, 40 or more, 45 or more, 50 or more, 55 or more, 60 or more, 65 or more, 70 or more, 75 or more, 80 or more, 85 or more, 90 or more, 95 or more, 100 or more, 200 or more, 300 or more, 400 or more, 500 or more, 600 or more, 700 or more, 800 or more, 900 or more, 1000 or more, 1100 or more, 1200 or more, 1300 or more, 1400 or more, 1600 or more, 1700 or more, 1800 or more, 1900 or more, 2000 or more, 2100 or more, 2200 or more, 2300 or more, 2400 or more, 2500 or more, 2600 or more, 2700 or more, 2800 or more, 2900 or more, 3000 or more, 3100 or more, 3200 or more, 3300 or more, 3400 or more, 3500 or more, 3600 or more, 3700 or more, 3800 or more, 3900 or more, 4000 or more, 4100 or more, 4200 or more, 4300 or more, 4400 or more, 4500 or more, 4600 or more, 4700 or more, 4800 or more, 4900 or more, 5000 or more, 5100 or more, 5200 or more, 5300 or more, 5400 or more, 5500 or more, 5600 or more, 5700 or more, 5800 or more, 5900 or more, 6000 or more, 6100 or more, or 6200 or more nucleotide sequences selected from nucleotide sequences of SEQ ID Nos.: 33 to 6236 and SEQ ID Nos.: 166154 to 166181.

### (Database: Reference Example 8)

[0138] In addition, databases which can be used, may comprise the following sequence information: 1 or more, 2 or more, 3 or more, 4 or more, 5 or more, 6 or more, 7 or more, 8 or more, 9 or more, 10 or more, 11 or more, 12 or more, 13 or more, 14 or more, 15 or more, 16 or more, 0.17 or more, 18 or more, 19 or more, 20 or more, 25 or more, 30 or more, 35 or more, 40 or more, 45 or more, 50 or more, 55 or more, 60 or more, 65 or more, 70 or more, 75 or more, 80 or more, 85 or more, 90 or more, 95 or more, 100 or more, 200 or more, 300 or more, 400 or more, 500 or more, 600 or more, 700 or more, 800 or more, 900 or more, 1000 or more, 1100 or more, 1200 or more, 1300 or more, 1400 or more, 1600 or more, 1700 or more, 1800 or more, 1900 or more, 2000 or more, 2100 or more, 2200 or more, 2300 or more, 2400 or more, 2500 or more, 2600 or more, 2700 or more, 2800 or more, 2900 or more, 3000 or more, 3100 or more, 3200 or more, 3300 or more, 3400 or more, 3500 or more, 3600 or more, 3700 or more, 3800 or more, 3900 or more, 4000 or more, 4100 or more, 4200 or more, 4300 or more, 4400 or more, 4500 or more, 4600 or more, 4700 or more, 4800 or more, 4900 or more, 5000 or more, 5100 or more, 5200 or more, 5300 or more, 5400 or more, 5500 or more, 5600 or more, 5700 or more, 5800 or more, 5900 or more, 6000 or more, 6100 or more, or 6200 or more nucleotide sequences selected from nucleotide sequences of SEQ ID Nos.: 33 to 6236.

### (Database: Reference Example 9)

[0139] In addition, databases which can be used, may comprise the following sequence information: 1 or more, 2 or more, 3 or more, 4 or more, 5 or more, 6 or more, 7 or more, 8 or more, 9 or more, 10 or more, 11 or more, 12 or more, 13 or more, 14 or more, 15 or more, 16 or more, 17 or more, 18 or more, 19 or more, 20 or more, 25 or more, 30 or more, 35 or more, 40 or more, 45 or more, 50 or more, 55 or more, 60 or more, 65 or more, 70 or more, 75 or more, 80 or more, 85 or more, 90 or more, 95 or more, 100 or more, 200 or more, 300 or more, 400 or more, 500 or more, 600 or more, 700 or more, 800 or more, 900 or more, 1000 or more, 1100 or more, 1200 or more, 1300 or more, 1400 or more, 1600 or more, 1700 or more, 1800 or more, 1900 or more, 2000 or more, 2100 or more, 2200 or more, 2300 or more, 2400 or more, 2500 or more, 2600 or more, 2700 or more, 2800 or more, 2900 or more, 3000 or more, 3100 or more, 3200 or more, 3300 or more, 3400 or more, 3500 or more, 3600 or more, 3700 or more, 3800 or more, 3900 or more, 4000 or more, 4100 or more, 4200 or more, 4300 or more, 4400 or more, 4500 or more, 4600 or more, 4700 or more, 4800 or more, 4900 or more, 5000 or more, 5100 or more, 5200 or more, 5300 or more, 5400 or more, 5500 or more, 5600 or more, 5700 or more, 5800 or more, 5900 or more, 6000 or more, 6100 or more, 6200 or more, 6300 or more, 6400 or more, 6500 or more, 6600 or more, 6700 or more, 6800 or more, 6900 or more, 7000 or more, 7100 or more, 7200 or more, 7300 or more, or 7400 or more nucleotide sequences selected from nucleotide sequences of SEQ ID Nos.: 75337 to 82784.

### (Database: Reference Example 10)

[0140] In addition, databases which can be used, may comprise the following sequence information: 1 or more, 2 or more, 3 or more, 4 or more, 5 or more, 6 or more, 7 or more, 8 or more, 9 or more, 10 or more, 11 or more, 12 or more, 13 or more, 14 or more, 15 or more, 16 or more, 17 or more, 18 or more, 19 or more, 20 or more, 21 or more, 22 or more, 23 or more, 24 or more, 25 or more, 26 or more, or 27 or more nucleotide sequences selected from nucleotide sequences of SEQ ID Nos.: 166154 to 166181.

### (Database: Reference Example 11)

[0141] In addition, databases which can be used, may comprise the following sequence information: 1 or more, 2 or more, 3 or more, 4 or more, 5 or more, 6 or more, 7 or more, 8 or more, 9 or more, 10 or more, 11 or more, 12 or more, 13 or more, 14 or more, 15 or more, 16 or more, 17 or more, 18 or more, 19 or more, 20 or more, 25 or more, 30 or more, 35 or more, 40 or more, 45 or more, 50 or more, 55 or more, 60 or more, 65 or more, 70 or more, 75 or more, 80 or more, 85 or more, 90 or more, 95 or more, 100 or more, 200 or more, 300 or more, 400 or more, or 500 or more nucleotide sequences selected from nucleotide sequences of SEQ ID Nos.: 166490 to 167042.

### (Database: Reference Example 12)

[0142] In addition, databases which can be used, may comprise the following sequence information: 1 or more, 2 or more, 3 or more, 4 or more, 5 or more, 6 or more, 7 or more, 8 or more, 9 or more, 10 or more, 11 or more, 12 or more, 13 or more, 14 or more, 15 or more, 16 or more, 17 or more, 18 or more, 19 or more, 20 or more, 25 or more, 30 or more, 35 or more, 40 or more, 45 or more, 50 or more, 55 or more, 60 or more, 65 or more, 70 or more, 75 or more, 80 or more, 85 or more, 90 or more, 95 or more, 100 or more, 200 or more, 300 or more, 400 or more, 500 or more, 600 or more, 700 or more, 800 or more, 900 or more, 1000 or more, 1100 or more, 1200 or more, 1300, or 1400 or more nucleotide sequences selected from nucleotide sequences of SEQ ID Nos.: 173125 to 174603.

[0143] In one preferable embodiment of the invention, amino acid sequence databases theoretically translated from the nucleotide sequence database for the genome of the bottom fermenting yeast may be used as the reference databases. For example, the amino acid sequence database corresponding to the database of the above-mentioned nucleotide sequence may be used. However, these databases are presented merely as examples, and the reference database used in the invention is by no means restricted to these examples.

[0144] As used herein, the term “refer to the reference database” is intended to mean to determine whether a nucleotide sequence or amino acid sequence corresponding to all or a part of the amino acid sequence of the target protein or the mass pattern thereof is present in the database by searching the reference database. Usually, such operations are conducted by running common software on a computer. While software such as BLAST, FASTA, Smith & Waterman, pep-pat (http://peppat.cbi.pku.edu.cn/) may be used for search of all or a part of the amino acid sequence of the target protein, but are not limited thereto. While commercially available software such as MASCOT may be used for search of all or a part of the mass pattern of the target protein, but is not limited thereto.

[0145] The reference database may be used by being stored in an external recording medium such as a hard disk of a computer or CD-ROM, or in a recording medium such as a server.

[0146] Not only amino acid sequence 100% identical to the sequence to be searched, but also amino acid sequences 60% or more, preferably 70% or more, more preferably 80% or more, further preferably 90% or more, and most preferably 95% or more, 96% or more, 97% or more, 98% or more, or 99% or more identical to the sequence to be searched are searched in the database by taking the possibility of mutation into consideration in searching the above-mentioned amino acid sequence. Software such as BLAST, FASTA, and Smith & Waterman may be used for such search.

[0147] As used herein, the term “identical to”, for example, “an amino acid sequence at least 95% identical to the sequence to be searched” is intended to mean that the amino acid sequence to be searched is identical to the reference sequence, except that mismatch of up to 5 amino acid residues in a sequence consisting of 100 amino acids may be included in the reference amino acid sequence. “Mismatch” is caused by substitution, addition, deletion and/or insertion of one or more amino acid residue(s) in an arbitrary position of the sequence.

[0148] In a further another aspect of the invention, results of search are analyzed using a comparative database associated with genome sequence information of S. cerevisiae in which genome sequence information has been published. The function of ORF identified in the reference nucleotide sequence may be deduced by homology search with the amino acid sequence of ORF of S. cerevisiae. Genome sequence information is registered as a database Saccharomyces Genome Database (SGD: http://www.yeastgenome.org/) and open to the public.

### 7. Analysis of Function of Identified Gene

[0149] When the gene encoding the target protein could be identified as described above, the function of said gene could be deduced by searching a known database. Such search is possible by using a sequence alignment algorithm, for example BLAST algorithm. Thus, the function of the gene may be considered to be similar with the gene identified by this search. As used herein, the term “analyze the function of the gene” is used to mean to deduce the function from known information.

[0150] To be more practice, Non-Sc gene of the bottom fermenting yeast may be identified by using the reference database used in the present invention. The function of such Non-Sc gene may be considered to be similar with the function of the gene hit by homology search for the comparative reference database, for example, the amino acid sequence and nucleotide sequence of ORF of S. cerevisiae registered in the Saccharomyces Genome Database (SGD: http://www.yeastgenome.org/), and a non-redundant (nr) database described in National Center of Biotechnology Information (NCBI: http://www.ncbi.nlm.nih.gov/).

[0151] Annotations of the functions of 6204 Non-ScORFs (SEQ ID Nos.: 33 to 6236) and 28 mitochondrial ORFs (SEQ ID Nos.: 166154 to 166181) encoded in the genome of the bottom fermenting yeast are listed at the end of the present specification.

[0152] For confirming the function of the target protein and the gene encoding the target protein, the gene identified by the above-mentioned method is inserted into a vector. Then, the yeast cells are transformed with that vector to evaluate to the function of the target protein.

[0153] Such vector is usually constructed so that the vector comprises (a) a promoter capable of transcription in the yeast cells, (b) a polynucleotide (DNA) linked to the promoter in a sense direction of antisense direction and identified by the above-mentioned method, and (c) an expression cassette comprising a signal that functions in yeast as a constituting element with respect to termination of transcription of RNA molecules and polyadenylation.

[0154] For example, when the protein identified as described above is allowed to be expressed in a high level in fermentation of alcoholic beverages such as beer, a polynucleotide is introduced in a sense direction relative to the promoter so as to enhance expression of the polynucleotide (DNA) of the gene encoding the above-mentioned identified protein. When expression of the above-mentioned protein is to be suppressed in fermentation of alcoholic beverages such as beer, a polynucleotide is introduced in an antisense direction relative to the promoter so as to suppress expression of the polynucleotide (DNA) of the gene encoding the above-mentioned identified protein. Expression of the above-mentioned DNA or expression of the above-mentioned protein may be suppressed in the invention by disrupting the target gene (DNA). The gene can be disrupted by adding a single base or plurality of bases to, or deleting a single base or plurality of bases in regions related to expression of gene products in the target gene, for example within coding regions or promoter regions, or by deleting entire regions. Published reports may be referenced with respect to the method for disrupting these genes (for example, see Proc. Natl. Acad. Sci. USA, 76, 4951 (1979), Methods in Enzymology, 101, 202 (1983) and JP-A No. 6-253826).

[0155] The vectors available for introducing them into the yeast are any of vectors of a multiple copy (YEp) type, single copy (YCp) type and chromosome-integrated (YIp) type. For example, examples of YEp vector include YEp24 (J. R. Broach et al., Experimental Manipulation of Gene Expression, Academic Press, New York, 83 (1983)). Examples of YCp vector include YCp50 (M. D. Rose et al., Gene, 60, 237 (1987)). Examples of YIp vector include YIp50 (K. Struhl et al., Proc. Natl. Acad. Sci. USA, 76, 1035 (1979)). These vectors are readily available.

[0156] Examples of the promoter/terminator available for regulating expression of the gene in yeast include a promoter for glyceraldehyde triphosphate dehydrogenase gene (TDH3) and a promoter for 3-phosphoglycerate kinase gene (PGK1). These genes have been already cloned as described in detail in, for example, Tuite et al., EMBO J., 1, 603 (1982). They are readily available by known methods.

[0157] While auxotrophic makers cannot be used as the selection maker used for transformation in the brewery yeast, a geneticin resistance gene (G418r), copper resistant gene (CUP1) (Marin et al., Proc. Natl. Acad. Sci. USA, 81, 337 (1984)) and cerulenin resistant marker (fas2m, PDR4) may be used (J. Inokoshi et al., Biochemistry (seikagaku), 64, 660 (1992); Hussain et al., Gene, 101, 149 (1991)). The vectors constructed as described above are introduced into host yeast. Examples of the host yeast include those available for fermentation, for example brewery yeast for beer, wine and sake. While specific examples include yeast of genus Saccharomyces, brewery yeast such as Saccharomyces pastorianus Weihenstephan 34/70, Saccharomyces carlsbergensis NCYC453 and NCYC456, and Saccharomyces cerevisiae (Saccharomyces cerevisiae) NBRC1951, NBRC1952, NBRC1953, NBRC1954) may be used in the invention. While whisky yeast such as Saccharomyces cerevisiae NCYC90, wine yeast such as yeast for wine of brewing society of Japan #1, #3 and #4, and sake yeast such as yeast for sake of brewing society of Japan #7 and #9 may be also used, but are not limited thereto. Beer yeast, for example Saccharomyces pastorianus, is preferably used in the present invention.

[0158] Yeast may be transformed by a well known method used commonly. For example, an electroporation method “Meth. Enzym., 194, 182 (1990)”, a spheroplast method “Proc. Natl. Acad. Sci. USA, 75, 1929 (1978)” and lithium acetate method “J. Bacteriology, 153, 163 (1983), Proc. Natl. Acad. Sci. USA, 75, 1929 (1978), Methods in Yeast Genetics, 2000 Edition: A Cold Spring Harbor Laboratory Course Manual” are available, but are not limited thereto.

[0159] More specifically, the host yeast is cultivated in a standard yeast nutrient medium (for example YEPD “Genetic Engineering. Vol. 1, Plenum Press, New York, 117 (1979)”) to OD 600 nm of from 1 to 6. The fermented yeast is collected by centrifugation, and is pretreated with an alkali metal ion, preferably lithium ion, at a concentration form 1 to 2M. The cells are allowed to stand still for about 60 minutes at about 30° C., and additionally allowed to stand still at about 30° C. for about 60 minutes by mixing with DNA (from about 1 to 20 μg) to be introduced. Polyethylene glycol, preferably polyethylene glycol with a molecular weight of about 4000 dalton, is added to a final concentration of from about 20% to 50%. After allowing the cells to stand still at 30° C. for about 30 minutes, the cells are heat-treated at about 42° C. for about 5 minutes. Preferably, the cell suspension solution is washed with the standard yeast nutrient medium, and allowed to stand still for about 60 minutes at about 30° C. by pouring the suspension solution into a fresh standard yeast nutrient medium. The cells are seeded thereafter on a standard agar medium containing an antibiotics used as a selection marker to obtain a transformant. References may be made to “Molecular Cloning (Methods in Yeast Genetics, A laboratory manual (Cold Spring Harbor Laboratory Press, Cold Spring Harbor, N.Y.))” with respect to other standard cloning techniques.

[0160] Measurement of the expression level of the target gene is possible by quantification of mRNAs or proteins as the target gene products extracted from yeast cell culture. Methods known in the art may be used for quantification of the mRNA or protein. For example, mRNAs are quantified, for example, by Northern hybridization or qualitative RT-PCR, while proteins are quantified by Western blotting (Current Protocols in Molecular Biology, John Wiley & Sons 1994-2003).

[0161] The assimilation property of amino acids, sulfate ions and ammonia, low temperature resistance, foam stability, haze formation, ester formation and flocculation property of the yeast can be evaluated by a beer fermentation test and so on, and thus the function of the gene encoding the target protein can be evaluated.

### 8. Evaluation of Yeast

[0162] Yeast favorable for brewing of desired alcoholic beverages may be selected by comparing characteristics of the test yeast with that of the standard yeast. The yeast transformed with above-mentioned vector, the yeast in which said gene expression is genetically controlled, the yeast subjected to mutation treatment and spontaneously mutated yeast may be used as the test yeast or standard yeast. The mutation treatment can be applied by a method known in the art such as UV irradiation and EMS treatment (see, for example, Yasuji Ohsima, Seikagaku Jikkenho (Method of Biochemical Experiments), Vol. 39, p 67-75, published by Japan Scientific Societies Press) or by them with appropriate modification.

[0163] Thus, yeast whose genome has been sequenced, mutant strains of said yeast and yeast strains selected from a culture collection may be subjected to proteome analysis to identify proteins showing variations of the expression level. Further, the proteome analysis of wild type of industrial strains and production strains having favorable phenotype can be used for identification of target proteins for breeding to improve productivity of desired products. To be more practice, when wild type strain and mutant strain which produces much amount of beer flavor compound are subjected to proteome analysis, spots corresponding to mutant strain may be identified, and consequently, protein contained in each spot may be analyzed and identified to show contribution to increasing the amount of beer flavor compound. Alternatively, spots showing different amounts of proteins among the conditions are found by the proteome analysis of the strains cultivated under different cultivation conditions, and the spots are subjected to search of the database. Consequently, the protein necessary for adaptation to the cultivation condition and the gene encoding the target protein may be identified.

[0164] Further, the present invention may enable not only a nucleotide sequence encoding a protein but also a nucleotide sequence locating upstream of the coding region to be searched. Therefore, for example, a nucleotide sequence that functions as a high-expression promoter may efficiently be selected by identifying a protein showing a high level of expression in the bottom fermenting yeast cells by proteome analysis. Moreover, since modifications of proteins can cause changes in separation of proteins in proteome analysis, the modified protein may efficiently be identified by search using nucleotide sequence information and amino acid sequence information of the bottom fermenting yeast of the present invention, or search using a recording medium on which the nucleotide and amino acid sequence information are recorded.

[0165] Actually, through the proteome analysis of the proteins extracted from the bottom fermenting yeast cells in the beer brewing, the present inventors identified one of the proteins that showed the increases of expression levels along with the decrease of the methionine concentration in the beer fermentation broth as Non-ScMET17. Furthermore, according to this result, the present inventors identified and isolated the gene encoding Non-ScMET17. The gene was introduced into the yeast cells by gene engineering techniques and highly expressed in the transformant cells. This resulted in large decrease of H₂S production in the yeast cells during beer fermentation.

### EXAMPLES

[0166] Hereinafter, the present invention will be described in more detail with reference to working examples. The present invention, however, is not limited to the examples described below.

### Example 1

### Proteome Analysis of the Yeast During Beer Fermentation

### 1. Beer Fermentation Test and Sampling of the Yeast Cells

[0167] A fermentation test using bottom fermenting yeast Saccharomyces pastorianus Weihenstephan 34/70 strain (pYCGPYNot plasmid introduced strain) was performed under the following conditions.

| | |
|---|---|
| Wort extract concentration: | 12% |
| Wort content: | 2 L |
| Wort dissolved oxygen concentration: | about 8 ppm |
| Fermentation temperature: | 15° C. constant |
| Yeast pitching rate: | 5 g of wet yeast cell/1 L wort |

[0168] The fermentation broth was regularly sampled, and the time-course changes in the yeast cell growth (FIG. 1) and the apparent extract concentration (FIG. 2) were observed. At the same time, yeast cells corresponding to 90 mg (wet weight) were harvested by centrifugation (3,000×g, 4° C., 10 minutes). The harvested cells were allowed to be preserved for about several days at −80° C. The frozen cells were defrosted immediately before use at room temperature. The supernatant of the fermentation broth was also recovered, and amino acid composition thereof was analyzed as described below.

### 2. Analysis of the Amino Acid Composition of the Supernatant of the Fermentation Broth

[0169] The amino acid composition of the supernatant of the fermentation broth was analyzed using a high speed amino acid analyzer (trade name: L-8800, manufactured by Hitachi Co.) and standard amino acid analysis column (trade name: P/N 855-3506, manufactured by Hitachi Co.). The time-course change in the methionine concentration is shown in FIG. 3.

### 3. Preparations of Electrophoresis Samples

[0170] Yeast cell extracts for two-dimensional electrophoresis were prepared by the following procedure. After washing once with lysis buffer (10 mmol/L, Tris-HCl (pH 8.0), 2 mmol/L MgCl₂), the cells were resuspended in 500 μL of lysis buffer containing Protease Inhibitor Cocktail for use with Fungal and Yeast Extracts (manufactured by SIGMA Co.) (hereinafter, represented by protease inhibitor cocktail) at a final concentration of 1% together with 0.5 g of dry-heat sterilized glass beads (425 to 600 μm, manufactured by SIGMA Co.). Cells were then disrupted by stirring at 4° C. for 45 minutes using a TWIN 3-28 Tuple mixer (manufactured by Asahi TechnoGlass Co.). In this process, the sample was placed on ice for 2 minutes for every 15 minutes. After disruption, non-disrupted cells and insoluble substances were removed by centrifugation (15,000×g, 4° C., 10 minutes), and the supernatant fraction was recovered. Benzonase nuclease (manufactured by Novagen Co.) was added to the supernatant fraction at a final concentration of 0.25 U/μL sample, and the sample was placed on ice for 30 minutes. Then, 5 mol/L of NaCl was added at a final concentration of 1 mol/L and the sample was placed on ice for another 5 minutes. Insoluble substances were removed by centrifugation (15,000×g, 4° C., 5 minutes) to retrieve the supernatant fraction. The supernatant was divided into two portions, each portion was applied on a ultrafiltration spin column (trade name: Microcon YM-10, manufactured by Millipore Co.), and each supernatant was concentrated to a volume of 100 μL or less at 14,000×g and 4° C. 400 μL of cold ultrapure water containing protease inhibitor cocktail at a final concentration of 1% was added thereto and mixed by pipetting, and each was concentrated to a volume of 100 μL or less at 14,000×g and 4° C. again. After desalting and concentration of the sample by repeating the same concentrating operation 3 times, the concentrated sample was recovered. While a part of the solute was precipitated in this concentration process, the precipitated solute was also recovered. The sample including the precipitate was solubilized by adding 4-fold volume of sample buffer (9.3 M urea, 2.3% (w/w) of CHAPS, 46.5 mM DTT, 0.002% (w/v) BPB), and the protein concentration of the sample was determined using 2D-Quant Kit (manufactured by Amersham Biosciences Co.). The sample corresponding to 111 μg of protein (usually, the volume of the sample was less than 50 μL) was mixed with 2.5 μL IPG Buffer (pH 4-7, manufactured by Amersham Biosciences Co.) and 430 μL of sample buffer, and was used as a electrophoresis sample after diluting to a total volume of 500 μL with ultra-pure water.

### 4. Separation of Proteins by Two-Dimensional Electrophoresis

[0171] The first-dimension separation of the proteins by isoelectric focusing was carried out as follows. After applying 450 μL of the electrophoresis sample (corresponding to 100 μg of protein) to 24 cm Strip Holder (manufactured by Amersham Biosciences Co.), a ready-made, dried immobilized pH gradient (IPG) strip gel (trade name: Immobiline DryStrip pH 4-7, 24 cm, manufactured by Amersham Biosciences Co.) was placed onto the solution. Then, IPG Cover Fluid (manufactured by Amersham Biosciences Co.) was applied into the holder until the entire IPG strip was covered. The holder was positioned onto the platform of IPGphor isoelectric focusing apparatus (manufactured by Amersham Biosciences Co.), and rehydration of the gel and following isoelectric focusing were performed at a controlled temperature of 20° C. The electric current limit during isoelectric focusing was 50 μA/strip.

[0172] Rehydration: 10 hours

[0173] Isoelectric focusing, first step: 2 hours at a constant voltage of 500 V

[0174] Isoelectric focusing, second step: 1 hour under a gradient mode from 500 to 1000 V

[0175] Isoelectric focusing, third step: 3 hours under a gradient mode from 1000 to 8000 V

[0176] Isoelectric focusing, fourth step: 5.6 hours at a constant voltage of 8000 V

[0177] After isoelectric focusing, the IPG strip gel was taken out of the holder and the excess cover fluid was removed for the second-dimension separation, SDS-PAGE. When it was difficult to perform SDS-PAGE immediately after completing isoelectric focusing, the IPG strip gel was allowed to be stored in a hermetically sealable tube at −80° C. for several days. The gel after freeze storage was subjected to SDS-PAGE by the same procedure as the sample not preserved by freezing after defrosting at room temperature. SDS-PAGE was performed as follows. The IPG strip gel was immersed in 20 mL/strip of SDS equilibration buffer (50 mM Tris-HCl (pH 8.8), 6 M urea, 30% (v/v) glycerol, 2% (w/v) SDS, 1% (w/v) DTT, 0.002% (w/v) BPB), and was equilibrated by gently shaking at room temperature for 15 minutes. DALT Gel 12.5 (manufactured by Amersham Biosciences Co.) was attached to Ettan DALT Precast Gel Cassette (manufactured by Amersham Biosciences Co.). The equilibrated IPG strip gel was rinsed by dipping in cathode buffer (packaged in DALT Buffer Kit, manufactured by Amersham Biosciences Co.) and then attached so as to closely adhere on the top surface of DALT Gel 12.5. A piece of filter paper impregnated with molecular weight marker (trade name: LMW SDS Electrophoresis Calibration Kit, manufactured by Amersham Biosciences Co.) was also attached to the top surface of DALT Gel 12.5, and they were sealed with sealing solution (packaged in DALT Buffer Kit, manufactured by Amersham Biosciences Co.) melted by heating at 95° C. A prescribed volume of anode buffer (packaged in DALT Buffer Kit, manufactured by Amersham Biosciences Co.) was injected into the electrophoresis tank of Ettan DALT electrophoresis apparatus (manufactured by Amersham Biosciences Co.). The gel was inserted into the unit and the cathode chamber was filled with a prescribed volume of cathode buffer (packaged in DALT Buffer Kit, manufactured by Amersham Biosciences Co.). Electrophoresis was performed at a constant temperature of 25° C., and after running at 5 W/gel for 30 minutes, continued at 17 W/gel until the dye front of BPB included in the sealing solution reached the lower end of the gel.

### 5. Detection of Protein Spots

[0178] After completing SDS-PAGE, silver staining of the gel was performed with reference to the method by Shevchenko, A. et al (Anal. Chem., 68, 850 (1996)) and the protocol attached to Silver Staining Kit, Protein (manufactured by Amersham Biosciences Co.). The gel after electrophoresis was immersed in a fixing solution (40% (v/v) ethanol, 10% (v/v) acetic acid) for 30 minutes to overnight. After placing the gel for additional 30 minutes after exchange of the fixing solution, the gel was immersed in a sensitizing solution (30% (v/v) ethanol, 0.2% (w/v) Na₂S₂O₃, 6.8% (w/v) sodium acetate, 30 minutes), ultra-pure water (5 minutes)×3, silver reaction solution (0.25% (w/v) AgNO₃, 20 minutes) and ultra-pure water (1 minute)×2 in this order, and was developed by immersing in developing solution (2.5% Na₂CO₃, 0.04% (v/v) of 37% (w/v) formaldehyde) until the protein spots were stained until an appropriate chromatic intensity was reached. The gel was immersed in stopping solution (1.46% (w/v) EDTA.Na₂.2H₂O, 10 minutes), ultra-pure water (5 minutes)×3 and preserving solution (8.7% (w/v) glycerol, 20 minutes) in this order thereafter to complete staining. The gel was gently shaken at room temperature in each step of staining, and the volume of all the solutions used was 250 μL/gel.

[0179] The proteins extracted from the cells were separated through the above-mentioned operations, and were able to be detected as spots.

### 6. Preparation of Mass Spectral Analysis Sample

[0180] The gels of two-dimensional electrophoresis carried out by using the yeast cells sampled at 8 and 32 hours after the start of fermentation test were compared to one another, and protein spots that showed increased intensities along with the decrease of methionine in the fermentation broth were selected and excised. When the amount of protein contained in a spot was not sufficient for mass spectral analysis, the identical spots were excised from two or more sheets of the gel on which the same electrophoresis sample was applied, and the excised gel pieces were collected in one fraction. The excised gel piece was transferred to a low adsorption tube, and was subjected to destaining and in-gel digestion steps described below. When it was difficult to perform the following treatments immediately, the gel pieces were stored at 4° C. for a maximum period of several days with soaking in 500 μL/tube of fixing solution (33% (v/v) ethanol, 7.5% (v/v) acetic acid).

[0181] The gel pieces were destained by the following procedure. 100 μL of 50/50 30 mM K₃Fe(CN)₆ in 100 mM Na₂S₂O₃ was added to the gel pieces, and the solution was removed after shaking for 10 minutes at room temperature in the dark; Subsequently, the gel pieces were washed with 500 μL of ultra-pure water by shaking for 10 minutes at room temperature and then water was removed. This operation was performed three times. After that, the gel pieces were washed with 300 μL of 0.1M NH₄HCO₃/50% acetonitrile by shaking for 15 minutes at room temperature. This operation was repeated again.

[0182] After destaining, the proteins contained in the gel pieces were subjected to reductive alkylation as follows. 200 μL of reduction buffer (10 mM DTT, 98% 0.2M Tris, 2% EDTA.Na₂ (pH 8.0)) was added to the gel pieces and they were incubated at 37° C. for 1 hour. After adding 4 μL of 4-vinylpyridine, the gel pieces were allowed to stand in dark for 1 hour, and 4 μL of 2-mercaptoethanol and 1 mL of ultra-pure water was further added. The supernatant was removed after allowing the gel pieces to stand for 30 minutes. Subsequently, 1 mL of ultra-pure water was added to the gel pieces and removed after incubation for 30 minutes. This operation was performed three times, and then, the gel pieces were incubated with 1 mL of 0.1M NH₄HCO₃/50% acetonitrile for 30 minutes. After removing the supernatant, the gel pieces were frozen at −80° C. and were dried for 2 hours using SpeedVac vacuum drier (manufactured by Thermo Electron Co.).

[0183] The proteins in the dried gel were digested as follows. 5 μL of trypsin solution (0.1 μg/μL) was added to the gel pieces, and the solution was allowed to stand at 4° C. for 10 minutes. 200 μL of digest buffer (50% 0.2M NH₄HCO₃, 10% acetonitrile, 0.5% 0.1 M CaCl₂) was added to the gel pieces and they were incubated at 37° C. overnight. After retrieving the liquid phase, the gel was shaken for additional 30 minutes with 200 μL of 0.1% TFA/60% acetonitrile. This liquid phase and the liquid phase recovered in advance were combined, and the combined liquid phase was frozen at −80° C. followed by vacuum drying. After adding 10 μL of 2% acetonitrile/0.1% TFA to the freeze-dried samples and shaking them for 10 minutes, insoluble fractions were removed by centrifugation for 5 minutes, and the supernatant was used as a sample for mass spectral analysis.

### 7. Mass Spectral Analysis and Amino Acid Sequence Analysis of Target Protein Using Liquid Chromatography/Tandem Mass Spectrometer (LC-MS/MS)

[0184] The sample for mass spectral analysis was separated using Paradigm MS-4 HPLC apparatus (manufactured by Michrom BioResources Co.) and Magic C18 column (manufactured by Michrom BioResources Co.). Depending on the separation states, either solvent A (2% acetonitrile, 0.1% formic acid) and solvent B (90% acetonitrile, 0.1% formic acid), or solvent A (2% acetonitrile, 0.1% TFA) and solvent B (90% acetonitrile, 0.1% TFA) was chosen as the combination of mobile phases. Separation was carried out at a constant flow rate of 1.0 μL/min under the following gradient mode:

[0185] First step: 5 to 65% gradient mode of solvent B for 50 minutes, and

[0186] Second step: 65 to 5% gradient mode of solvent B for 10 minutes.

[0187] Each fraction obtained was sequentially subjected to LCQ Advantage mass spectrometer (trade name: manufactured by Thermo Electron Co.).

### 8. Identification of Target Protein

[0188] Through the operations mentioned above, the list of peptide masses derived from the target protein was obtained. Based on this information, ORF corresponding to the protein was identified by searching the genome sequence database. Commercially available program, MASCOT (manufactured by MATRIX SCIENCE Co.), was used for identification of the protein. S-pyridylethyl (C) and ESI-TRAP were selected for Fixed Modifications and Instrument, respectively, as search parameters, and default setting values were used for the other parameters.

### 9. Search and Identification of Gene Encoding Protein Regulated by Methionine Concentration

[0189] Among the proteins that showed the increases of expression levels along with the decrease of methionine concentration in the fermentation broth, the protein contained in the spot detected at a molecular weight of 50 kDa and pI of 6.0 was identified according to the method mentioned above. The result showed that the spot corresponded to the protein encoded by Non-Sc type O-acetyl homoserine-O-acetyl serine sulfhydrylase (Non-ScMET17) gene represented by SEQ ID No. 1817. The amino acid sequence of Non-ScMET17 gene was represented by SEQ ID No. 197022.

[0190] The results mentioned above indicated that identifying the protein extracted from the bottom fermenting yeast cells using the genome sequence database constructed in the present invention enabled the nucleotide sequence of the ORF corresponding to the protein to be searched. Moreover, since it was possible to search the nucleotide sequence locating upstream of the ORF together with the nucleotide sequence of the ORF, these results also indicated that identification of the protein whose level of expression was regulated by the methionine concentration in the fermentation broth enabled the nucleotide sequence that functions the methionine-concentration responsible promoter to efficiently be searched.

### Example 2

### Introduction of Non-ScMET17 Gene into Yeast Cells and Expression of the Gene in the Cells

### 1. Cloning of Novel O-Acetyl Homoserine-O-Acetyl Serine Sulfhydrylase Gene

[0191] Based on the nucleotide sequence information of the gene that encodes the protein identified in Example 1, two primers for amplification of whole length of the gene, Non-ScMET17_for (SEQ ID No: 197023) and Non-ScMET17_rv (SEQ ID No: 197024), were designed. Using these primers, PCR was performed using chromosome DNA of the genome-sequenced strain, Saccharomyces pastorianus Weihenstephan 34/70, as a template and DNA fragment (about 1.3 kb) comprising the whole length of Non-ScMET17 gene was obtained.

[0192] The amplified DNA fragment was inserted into pCR2.1-TOPO vector (manufactured by Invitrogen Co.) by TA cloning. The nucleotide sequence of Non-ScMET17 was analyzed by Sanger method (F. Sanger, Science, 14, 1215 (1981)) and verified.

### 2. Construction of Non-ScMET17 Highly Expressed Strain

[0193] Non-ScMET17/pCR2.1-TOPO was digested with restriction enzymes SacI and NotI to prepare a DNA fragment comprising the entire length of the protein-encoding region of Non-ScMET17. This fragment was ligated to pYCGPYNot pre-treated with the restriction enzymes SacI and NotI, thereby constructing the Non-ScMET17 high expression vector, Non-ScMET17/pYCGPYNot. pYCGPYNot is a YCp-type yeast expression vector, and the gene inserted into the vector is highly expressed by the pyruvate kinase gene PYK1 promoter. This vector includes the geneticin-resistant gene, G418^{r}, as the selectable marker in the yeast, and also includes the ampicillin-resistant gene, Amp^{r}, as the selectable marker in Escherichia coli.

[0194] Using the high expression vector prepared by the above method, Saccharomyces pastorianus Weihenstephan 34/70 strain was transformed by the method described in Japanese Patent Application Laid-open No. H07-303475. The transformants were selected on a YPD plate medium (1% yeast extract, 2% polypeptone, 2% glucose and 2% agar) containing 300 mg/L of geneticin.

### 3. Quantification of the Amount of Production of H₂S in Test Brewing of Beer

[0195] Fermentation tests using the parent strain and Non-ScMET17 highly expressed strain obtained in the sections above were performed under the following conditions.

| | |
|---|---|
| Wort extract concentration: | 12% |
| Wort content: | 2 L |
| Wort dissolved oxygen concentration: | about 8 ppm |
| Fermentation temperature: | 15° C. constant |
| Yeast pitching rate: | 5 g wet yeast cell/L Wort |

[0196] The fermentation broth was regularly sampled, and the time-course changes in amount of yeast cell growth (OD 660: FIG. 4) and apparent extract concentration (FIG. 5) were observed. Quantification of H₂S production during fermentation was performed according to the method described by Takahashi et al. (Brauwissenschaft, 31, 1 (1978)). Measurements of H₂S to create the standard curve were performed used samples containing known concentration of H₂S, and then the standard curve for H₂S quantification was created according to the peak areas of detected H₂S. The fermentation samples were analyzed under the same condition as samples for the standard curve and the amount of H₂S contained in the fermentation samples were determined by comparing the peak areas of H₂S thereof with the standard curve.

TABLE 1
The amount of H₂S in fermentation broth at the end of fermentation

| | Parent strain | Non-ScMET17 highly expressed strain |
|---|---|---|
| H₂S (ppb) | 22.1 | — |

(Note)
—; below detection limit (No H₂S peak was detected.)

[0197] As shown in Table 1, the amount of H₂S produced by Non-ScMET17 expressed strain was below detection limit at the end of fermentation, though that by the parent strain was 22.1 ppb. This indicated that the amount of production of H₂S was largely reduced by expression of Non-ScMET17 in a high level.

### (References)

[0198] Putative functions of 6204 Non-Sc type ORFs (SEQ ID Nos.: 33 to 6236) and 28 mitochondrial ORFs (SEQ ID Nos.: 166154 to 166181) encoded in the genome of the bottom fermenting yeast by the present inventors are listed below.

[0199] The functions of genome sequence information as shown below were inferred by homology search using sequence alignment algorithm such as BLAST algorithm. When using BLAST algorithm, for example, the amino acid sequences or nucleotide sequences of ORFs of S. cerevisiae registered and released in Saccharomyces Genome Database (SGD: http://www.yeastgenome.org/) and/or non-redundant (nr) database of amino acid sequence or nucleotide sequence information provided by National Center of Biotechnology Information (NCBI: http://www.ncbi.nlm.nih.gov/) can be used for the comparative reference database.

### (SEQ ID Nos.: 33 to 6236)

[0200] 33; putative polyol dehydrogenase
34; NAD-dependent (2R,3R)-2,3-butanediol dehydrogenase, a zinc-containing medium-chain alcohol dehydrogenase, produces 2,3-butanediol from acetoin during fermentation and allows using 2,3-butanediol as a carbon source during aerobic growth
35; Putative peroxisomal membrane protein required for import of peroxisomal proteins, functionally complements a Pichia pastoris pex22 mutation
36; Acetyl-coA synthetase isoform, expressed during growth on nonfermentable carbon sources and under aerobic conditions
37; Protein of unknown function; green fluorescent protein (GFP)-fusion protein localizes to the cytoplasm in a punctate pattern
38; Evolutionarily-conserved tail-anchored outer mitochondrial membrane GTPase which regulates mitochondrial morphology; cells lacking Gem1p contain collapsed, globular, or grape-like mitochondria; not required for pheromone-induced cell death
39; Protein localized to COPII-coated vesicles, forms a complex with Erv41p; involved in the membrane fusion stage of transport
40; G1 cyclin involved in cell cycle progression; activates Cdc28p kinase to promote the G1 to S phase transition; plays a role in regulating transcription of the other G1 cyclins, CLN1 and CLN2; regulated by phosphorylation and proteolysis
41; Pyruvate kinase, functions as a homotetramer in glycolysis to convert phosphoenolpyruvate to pyruvate, the input for aerobic (TCA cycle) or anaerobic (glucose fermentation) respiration
42; Hypothetical protein
43; Member of the DRG family of GTP-binding proteins; interacts with translating ribosomes 44; GTPase, required for general translation initiation by promoting Met-tRNAiMet binding to ribosomes and ribosomal subunit joining; homolog of bacterial IF2
45; Essential component of the MIND kinetochore complex (Mtw1p Including Nnf1p-Nsl1p-Dsn1p) which joins kinetochore subunits contacting DNA to those contacting microtubules; critical to kinetochore assembly
46; Cytoplasmic Glc7p-interacting protein, potential Cdc28p substrate
47; One of two type V myosins; required for mother-specific HO expression, for the bud tip localization of ASH1 and IST2 mRNA; facilitates growth and orientation of ER tubules along with She3p
48; Integral membrane Ca(2+)-ATPase, potential aminophospholipid translocase required to form a specific class of secretory vesicles that accumulate upon actin cytoskeleton disruption; mutation affects maturation of the 18S rRNA
49; Essential nuclear protein, constituent of 66S pre-ribosomal particles; required for normal concentration of free 60S ribosomal subunits; required for maintenance of M1 satellite double-stranded RNA of the L-A virus
50; Putative GDP/GTP exchange factor required for mitotic exit at low temperatures; acts as a guanine nucleotide exchange factor (GEF) for Tem1p, which is a key regulator of mitotic exit; physically associates with Ras2p-GTP
51; Protein O-mannosyltransferase, transfers mannose residues from dolichyl phosphate-D-mannose to protein serine/threonine residues; acts in a complex with Pmt1p, can instead interact with Pmt5p in some conditions; target for new antifungals
52; Component of the CCR4-NOT transcriptional complex, which is involved in regulation of gene expression; component of the major cytoplasmic deadenylase, which is involved in mRNA poly(A) tail shortening
53; One of two (see also PSK2) PAS domain containing S/T protein kinases; coordinately regulates protein synthesis and carbohydrate metabolism and storage in response to a unknown metabolite that reflects nutritional status
54; Regulatory subunit A of the heterotrimeric protein phosphatase 2A, which also contains regulatory subunit Cdc55p and either catalytic subunit Pph21p or Pph22p; required for cell morphogenesis and for transcription by RNA polymerase III
55; DNA N-glycosylase and apurinic/apyrnmidinic (AP) lyase involved in base excision repair, localizes to the nucleus and mitochondrion
56; Endosomal SNARE related to mammalian syntaxin 8
57; Cystathionine gamma-lyase, catalyzes one of the two reactions involved in the transulfuration pathway that yields cysteine from homocysteine with the intermediary formation of cystathionine;
58; Subunit of the mitochondrial sorting and assembly machinery (SAM complex); has a role in assembly of the TOM complex, which mediates protein import through the outer membrane; required for normal mitochondrial morphology and inheritance
59; Integral nuclear/ER membrane protein of unknown function, required for normal nuclear envelope morphology and sporulation
60; Mitochondrial protein of unknown function
61; Protein that forms a heterotrimeric complex with Erp1p, Emp24p, and Erv25p; member, along with Emp24p and Erv25p, of the p24 family involved in ER to Golgi transport and localized to COPII-coated vesicles
62; ATPase involved in protein folding and nuclear localization signal (NLS)-directed nuclear transport; member of heat shock protein 70 (HSP70) family; forms a chaperone complex with Ydj1p; localized to the nucleus, cytoplasm, and cell wall63; Subunit of the nuclear pore complex (NPC), functions to anchor Nup2p to the NPC in a dynamic process that is controlled by the nucleoplasmic concentration of Gsp1p-GTP; potential Cdc28p substrate
64; Protein that forms a heterotrimeric complex with Erp2p, Emp24p, and Erv25p; member, along with Emp24p and Erv25p, of the p24 family involved in ER to Golgi transport and localized to COPII-coated vesicles
65; Subunit of heterotrimeric Replication Factor A (RF-A), which is a highly conserved single-stranded DNA binding protein involved in DNA replication, repair, and recombination
66; N-succinyl-5-aminoimidazole-4-carboxamide ribotide (SAICAR) synthetase, required for ‘de novo’ purine nucleotide biosynthesis; red pigment accumulates in mutant cells deprived of adenine
67; Nonessential protein kinase with unknown cellular role
68; Protein kinase of the Mitotic Exit Network that is localized to the spindle pole bodies at late anaphase; promotes mitotic exit by directly switching on the kinase activity of Dbf2p
69; Hypothetical protein
70; Protein with roles in exocytosis and cation homeostasis; functions in docking and fusion of post-Golgi vesicles with plasma membrane; homolog of Sro7p and Drosophila lethal giant larvae tumor suppressor; interacts with SNARE protein Sec9p
71; Protein serine/threonine kinase essential for cell wall remodeling during growth; localized to sites of polarized growth and the mother-daughter bud neck; homolog of the alpha, beta, and gamma isoforms of mammalian protein kinase C(PKC)72; Non-essential tetra-spanning membrane protein found mostly in the late Golgi, can suppress some sed5 alleles; may be part of the transport machinery, but precise function is unknown; similar to mammalian syntaxin 5
73; Non-essential protein of unknown function; promoter contains several Gcn4p binding elements
74; RNA polymerase II holoenzyme component
75; Methionine aminopeptidase, catalyzes the cotranslational removal of N-terminal methionine from nascent polypeptides; function is partially redundant with that of Map1p
76; Mitochondrial ribosomal protein of the large subunit; MRP21 exhibits genetic interactions with mutations in the COX2 and COX3 mRNA 5′-untranslated leader sequences
77; Protein kinase, primarily involved in telomere length regulation; contributes to cell cycle checkpoint control in response to DNA damage; functionally redundant with Mec1p; homolog of human ataxia telangiectasia (ATM) gene
78; Subunit of the Anaphase-Promoting Complex/Cyclosome (APC/C), which is a ubiquitin-protein ligase required for degradation of anaphase inhibitors, including mitotic cyclins, during the metaphase/anaphase transition
79; Cytoplasmic isoleucine-tRNA synthetase, target of the G1-specific inhibitor reveromycin A
80; Protein component of the small (40S) ribosomal subunit; identical to Rps8Ap and has similarity to rat S8 ribosomal protein
81; Protein required, along with Dph1p, Dph2p, Jjj3p, and Dph5p, for synthesis of diphthamide, which is a modified histidine residue of translation elongation factor 2 (Eft1p or Eft2p); may act in a complex with Dph1p and Dph2p
82; Peripheral membrane protein that interacts with the plasma membrane ATPase Pma1p and has a role in its targeting to the plasma membrane, possibly by influencing its incorporation into lipid rafts
83; Mitochondrial peroxiredoxin (1-Cys Prx) with thioredoxin peroxidase activity, has a role in reduction of hydroperoxides; induced during respiratory growth and under conditions of oxidative stress
84; Kinesin-related motor protein required for mitotic spindle assembly and chromosome segregation; functionally redundant with Cin8p
85; Type 2C protein phosphatase; dephosphorylates Hog1p (see also Ptc2p) to limit maximal kinase activity induced by osmotic stress; dephosphorylates T169 phosphorylated Cdc28p (see also Ptc2p); role in DNA checkpoint inactivation
86; Hypothetical protein
87; Histone acetyltransferase catalytic subunit of NuA3 complex that acetylates histone H3, involved in transcriptional silencing; homolog of the mammalian MOZ proto-oncogene; sas3 gcn5 double mutation confers lethality
88; Protein involved in G2/M phase progression and response to DNA damage, interacts with Rad53p; contains an RNA recognition motif, a nuclear localization signal, and several SQ/TQ cluster domains; hyperphosphorylated in response to DNA damage
89; Protein of unknown function, has homology to kinase Snf7p; not required for growth on nonfermentable carbon sources; essential for viability in stationary phase
90; High affinity uridine permease, localized to the plasma membrane; not involved in uracil transport
91; 20S proteasome beta-type subunit
92; Identified by homology to Ashbya gossypii
93; Major CTP synthase isozyme (see also URA8), catalyzes the ATP-dependent transfer of the amide nitrogen from glutamine to UTP, forming CTP, the final step in de novo biosynthesis of pyrimidines; involved in phospholipid biosynthesis
94; Mitochondrial ribosomal protein of the large subunit
95; Alpha-adaptin, large subunit of the clathrin associated protein complex (AP-2); involved in vesicle mediated transport
96; Single-domain racemase, possibly non-specific due to the lack of the second domain, which presumably determines specificity
97; B subunit of DNA polymerase alpha-primase complex, required for initiation of DNA replication during mitotic and premeiotic DNA synthesis; also functions in telomere capping and length regulation
98; GTP cyclohydrolase II; catalyzes the first step of the riboflavin biosynthesis pathway 99; Cytoskeletal protein of unknown function; overexpression causes growth arrest 100; Major ADP/ATP carrier of the mitochondrial inner membrane, exchanges cytosolic ADP for mitochondrially synthesized ATP; required for viability in many common lab strains carrying a mutation in the polymorphic SAL1 gene
101; Protein of unknown function; green fluorescent protein (GFP)-fusion protein localizes to the cell periphery; has potential orthologs in Saccharomyces species and in Yarrowia lipolytica
102; Hypothetical protein
103; Hypothetical protein
104; Protein involved in promoting high level transcription of rDNA, subunit of UAF (upstream activation factor) for RNA polymerase I
105; Protein involved in DNA replication; component of the Mcm2-7 hexameric complex that binds chromatin as a part of the pre-replicative complex
106; Subunit of the heme-activated, glucose-repressed Hap2p/3p/4p/5p CCAAT-binding complex, a transcriptional activator and global regulator of respiratory gene expression; contains sequences contributing to both complex assembly and DNA binding
107; Class II abasic (AP) endonuclease involved in repair of DNA damage; homolog of human HAP1 and E. coli exoIII
108; Hypothetical protein
109; haspin
110; Cytoskeletal protein binding protein required for assembly of the cortical actin cytoskeleton; contains 3 SH3 domains; interacts with proteins regulating actin dynamics and with proteins required for endocytosis
111; Transcriptional activator of the pleiotropic drug resistance network, regulates expression of ATP-binding cassette (ABC) transporters through binding to cis-acting sites known as PDREs (PDR responsive elements)
112; Component of the small-subunit (SSU) processome, which is involved in the biogenesis of the 18S rRNA
113; One of two nearly identical (see also HTA1) histone H2A subtypes; core histone required for chromatin assembly and chromosome function; DNA damage-dependent phosphorylation by Mec1p facilitates DNA repair; acetylated by Nat4p
114; One of two nearly identical (see HTB1) histone H₂B subtypes required for chromatin assembly and chromosome function; Rad6p-Bre1p-Lge1p mediated ubiquitination regulates transcriptional activation, meiotic DSB formation and H3 methylation
115; Non-essential protein of unknown function, likely exists as tetramer, may be regulated by the binding of small-molecule ligands (possibly sulfate ions), may have a role in yeast cell-wall biogenesis
116; Putative neutral trehalase, required for thermotolerance and may mediate resistance to other cellular stresses
117; Cis-prenyltransferase involved in dolichol synthesis; participates in endoplasmic reticulum (ER) protein sorting
118; Functional ortholog of human PIG-V, which is a mannosyltransferase that transfers the second mannose in glycosylphosphatidylinositol biosynthesis; the authentic, non-tagged protein was localized to mitochondria
119; Succinate semialdehyde dehydrogenase involved in the utilization of gamma-aminobutyrate (GABA) as a nitrogen source; part of the 4-aminobutyrate and glutamate degradation pathways; localized to the cytoplasm
120; Deletion suppressor of mpt5 mutation 121; One of two identical histone H4 proteins (see also HHF2); core histone required for chromatin assembly and chromosome function; contributes to telomeric silencing; N-terminal domain involved in maintaining genomic integrity
122; One of two identical histone H3 proteins (see also HHF2); core histone required for chromatin assembly, involved in heterochromatin-mediated telomeric and HM silencing; regulated by acetylation, methylation, and mitotic phosphorylation
123; Cytoplasmic inorganic pyrophosphatase (PPase), catalyzes the rapid exchange of oxygens from Pi with water, highly expressed and essential for viability, active-site residues show identity to those from E. coli PPase
124; Transportin, cytosolic karyopherin beta 2 involved in delivery of heterogeneous nuclear ribonucleoproteins to the nucleoplasm, binds rg-nuclear localization signals on Nab2p and Hrp1p, plays a role in cell-cycle progression
125; Galactose-1-phosphate uridyl transferase, synthesizes glucose-1-phosphate and UDP-galactose from UDP-D-glucose and alpha-D-galactose-1-phosphate in the second step of galactose catabolism
126; UDP-glucose-4-epimerase, catalyzes the interconversion of UDP-galactose and UDP-D-glucose in galactose metabolism; also catalyzes the conversion of alpha-D-glucose or alpha-D-galactose to their beta-anomers
127; Uracil permease, localized to the plasma membrane; expression is tightly regulated by uracil levels and environmental cues
128; Phosphatase that is highly specific for ADP-ribose 1″-phosphate, a tRNA splicing metabolite; may have a role in regulation of tRNA splicing
129; Chitin synthase III, catalyzes the transfer of N-acetylglucosamine (GlcNAc) to chitin; required for synthesis of the majority of cell wall chitin, the chitin ring during bud emergence, and spore wall chitosan
130; Hypothetical protein
131; 2-enoyl thioester reductase, member of the medium chain dehydrogenase/reductase family; localized to in mitochondria, where it has a probable role in fatty acid synthesis
132; Hypothetical protein
133; Phosphatidate cytidylyltransferase (CDP-diglyceride synthetase); an enzyme that catalyzes that conversion of CTP+phosphate into diphosphate+CDP-diaclglyerol, a critical step in the synthesis of all major yeast phospholipids
134; Nuclear SAM-dependent mono- and asymmetric arginine dimethylating methyltransferase that modifies hnRNPs, including Npl3p and Hrp1p, thus facilitating nuclear export of these proteins; required for viability of npl3 mutants
135; Pyridoxine (pyridoxamine) phosphate oxidase, has homologs in E. coli and Myxococcus xanthus; transcription is under the general control of nitrogen metabolism
136; Endoplasmic reticulum membrane protein, required for mannosylation of inositolphosphorylceramide and for growth at high calcium concentrations
137; Copper-binding protein of the mitochondrial inner membrane, required for cytochrome c oxidase activity and respiration; may function to deliver copper to cytochrome c oxidase; has similarity to thioredoxins
138; Gamma subunit of the F1 sector of mitochondrial F1F0 ATP synthase, which is a large, evolutionarily conserved enzyme complex required for ATP synthesis
139; Integral membrane protein required for efficient mating; may participate in or regulate the low affinity Ca2+ influx system, which affects intracellular signaling and cell-cell fusion during mating
140; Zeta-crystallin homolog, found in the cytoplasm and nucleus; has similarity to E. coli quinone oxidoreductase and to human zeta-crystallin, which has quinone oxidoreductase activity
141; The authentic, non-tagged protein was localized to the mitochondria
142; Regulatory subunit of the Glc7p type-1 protein phosphatase; involved with Reg1p, Glc7p, and Snf1p in regulation of glucose-repressible genes, also involved in glucose-induced proteolysis of maltose permease
143; Protein of unknown function; member of a flavodoxin-like fold protein family that includes Pst2p and Ycp4p; green fluorescent protein (GFP)-fusion protein localizes to the cytoplasm in a punctate pattern
144; Hypothetical protein
145; Putative plasma membrane protein of unknown function, transcriptionally regulated by Haa1p; green fluorescent protein (GFP)-fusion protein localizes to the cell periphery and bud
146; Hypothetical protein
147; Protein that stimulates the activity of serine palmitoyltransferase (Lcb1p, Lcb2p) several-fold; involved in sphingolipid biosynthesis
148; Subunit of the origin recognition complex, which directs DNA replication by binding to replication origins and is also involved in transcriptional silencing; may be phosphorylated by Cdc28p
149; 2′-O-ribose methyltransferase, methylates the 2′-O-ribose of nucleotides at positions 32 and 34 of the tRNA anticodon loop
150; Pre-mRNA splicing factor, facilitates the cooperative formation of U2/U6 helix II in association with stem II in the spliceosome, function may be regulated by Slu7p
151; Transcriptional repressor that mediates glucose repression and negatively regulates filamentous growth; has similarity to Nrg1p
152; Major cell wall mannoprotein with possible lipase activity; transcription is induced by heat- and cold-shock; member of the Srp1p/Tip1p family of serine-alanine-rich proteins
153; Amino acid transport protein for valine, leucine, isoleucine, and tyrosine, low-affinity tryptophan and histidine transporter; overexpression confers FK506 resistance
154; Hypothetical protein
155; Small heat shock protein with chaperone activity that is regulated by a heat induced transition from an inactive oligomeric (24-mer) complex to an active dimer; induced by heat, upon entry into stationary phase, and during sporulation
156; Subunit of the core complex of translation initiation factor 3(eIF3), essential for translation; part of a subcomplex (Prt1p-Rpg1p-Nip1p) that stimulates binding of mRNA and tRNA(i)Met to ribosomes
157; ATPase required for the release of Sec17p during the ‘priming’ step in homotypic vacuole fusion and for ER to Golgi transport; homolog of the mammalian NSF
158; Subunit of the SAGA transcriptional regulatory complex, involved in proper assembly of the complex; also present as a C-terminally truncated form in the SLIK/SALSA transcriptional regulatory complex
159; Transcription factor required for full Ty1 expression, Ty1-mediated gene activation, and haploid invasive and diploid pseudohyphal growth; TEA/ATTS DNA-binding domain family member
160; Mitochondrial inner membrane ADP/ATP translocator, exchanges cytosolic ADP for mitochondrially synthesized ATP; expressed under anaerobic conditions; similar to Pet9p and Aac1p; has roles in maintenance of viability and in respiration
161; Hypothetical protein
162; Plasma membrane protein that may be involved in osmotolerance, localizes to the mother cell in small-budded cells and to the bud in medium- and large-budded cells; mRNA is transported to the bud tip by an actomyosin-driven process
163; Subunit of heteropentameric Replication factor C(RF-C), which is a DNA binding protein and ATPase that acts as a clamp loader of the proliferating cell nuclear antigen (PCNA) processivity factor for DNA polymerases delta and epsilon
164; Proliferating cell nuclear antigen (PCNA), functions as the sliding clamp for DNA polymerase delta; may function as a docking site for other proteins required for mitotic and meiotic chromosomal DNA replication and for DNA repair
165; High-mobility group non-histone chromatin protein, functionally redundant with Nhp6Ap; homologous to mammalian high mobility group proteins 1 and 2; acts to recruit transcription factor Rcs1p to certain promoters 166; Constitutively expressed acid phosphatase similar to Pho5p; brought to the cell surface by transport vesicles; hydrolyzes thiamin phosphates in the periplasmic space, increasing cellular thiamin uptake; expression is repressed by thiamin
167; Hypothetical protein
168; Hypothetical protein
169; Subunit of the structure-specific Mms4p-Mus81p endonuclease that cleaves branched DNA; involved in recombination and DNA repair
170; Essential protein with dual roles in spliceosome assembly and exocytosis; the exocyst complex (Sec3p, Sec5p, Sec6p, Sec8p, Sec10p, Sec15p, Exo70p, and Exo84p) mediates polarized targeting of secretory vesicles to active sites of exocytosis
171; Putative mitochondrial inner membrane transporter, member of the mitochondrial carrier (MCF) family
172; Peripheral membrane protein located at Vid (vacuole import and degradation) vesicles; regulates fructose-1,6-bisphosphatase (FBPase) targeting to the vacuole; involved in proteasome-dependent catabolite degradation of FBPase
173; Probable membrane protein, involved in phosphate transport; pho88 pho86 double null mutant exhibits enhanced synthesis of repressible acid phosphatase at high inorganic phosphate concentrations
174; Protein with a role in kinetochore function, localizes to the outer kinetochore in a Ctf19p-dependent manner, interacts with Ch14p and Ctf19p
175; Mannosyltransferase, involved in asparagine-linked glycosylation in the endoplasmic reticulum (ER); essential for viability, mutation is functionally complemented by human ortholog
176; Alpha aminoadipate reductase, catalyzes the reduction of alpha-aminoadipate to alpha-aminoadipate 6-semialdehyde, which is the fifth step in biosynthesis of lysine; activation requires posttranslational phosphopantetheinylation by Lys5p177; Transketolase, similar to Tkl1p; catalyzes conversion of xylulose-5-phosphate and ribose-5-phosphate to sedoheptulose-7-phosphate and glyceraldehyde-3-phosphate in the pentose phosphate pathway; needed for synthesis of aromatic amino acids
178; Protein required for translation of the mitochondrial COB mRNA
179; Cytoplasmic and mitochondrial glycyl-tRNA synthase that ligates glycine to the cognate anticodon bearing tRNA; transcription termination factor that may interact with the 3′-end of pre-mRNA to promote 3′-end formation
180; Subunit B of the eight-subunit V1 peripheral membrane domain of the vacuolar H+-ATPase (V-ATPase), an electrogenic proton pump found throughout the endomembrane system; contains nucleotide binding sites; also detected in the cytoplasm
181; Subunit of an autophagy-specific phosphatidylinositol 3-kinase complex (with Vps34p, Vps15p, and Vps30p) required for organization of a pre-autophagosomal structure; ATG14 transcription is activated by Gln3p during nitrogen starvation
182; High affinity polyamine permease, preferentially uses spermidine over putrescine; expression is down-regulated by osmotic stress; plasma membrane carnitine transporter, also functions as a low-affinity amino acid permease
183; Protein arginine N-methyltransferase that exhibits septin and Hsl1p-dependent bud neck localization and periodic Hsl1p-dependent phosphorylation; required along with Hsl1p for bud neck recruitment, phosphorylation, and degradation of Swe1p
184; Subunit of the Cdc28 protein Idnase, required for mitotic proteolysis, may also be involved in the proteolysis of the G1 cyclins
185; Protein of unknown function; localized to the cytoplasm; binds to Replication Protein A (RPA); YBR137W is not an essential gene
186; GTPase-activating protein that negatively regulates RAS by converting it from the GTP- to the GDP-bound inactive form, required for reducing cAMP levels under nutrient limiting conditions, mediates membrane association of adenylate cyclase
187; Putative protein of unknown function; green fluorescent protein (GFP)-fusion protein localizes to the nucleolus; YBR141c is not an essential gene
188; Dubious ORF unlikely to encode a protein, based on available experimental and comparative sequence data; overlaps the uncharacterized ORF YBR141c; identified by gene-trapping, microarray analysis, and genome-wide homology searching
189; Essential nucleolar protein, putative DEAD-box RNA helicase required for maintenance of M1 dsRNA virus; involved in biogenesis of large (60S) ribosomal subunits
190; Polypeptide release factor involved in translation termination; mutant form acts as a recessive omnipotent suppressor
191; Alcohol dehydrogenase isoenzyme V; involved in ethanol production
192; Mitochondrial ribosomal protein of the small subunit
193; Putative protein of unknown function; YBR147W is not an essential gene; resistant to fluconazole
194; Protein expressed specifically in spores
195; Large subunit of NADP+ dependent arabinose dehydrogenase, involved in carbohydrate metabolism; small subunit is unidentified
196; Protein of unknown function, required for normal localization of actin patches and for normal tolerance of sodium ions and hydrogen peroxide; localizes to both cytoplasm and nucleus
197; mRNA splicing factor, component of U4/U6.U5 tri-snRNP; interacts genetically and physically with Prp38p
198; Diaminohydroxyphoshoribosylaminopyrimidine deaminase; catalyzes the second step of the riboflavin biosynthesis pathway
199; RNA polymerase subunit ABC27, common to RNA polymerases I, II, and III; contacts DNA and affects transactivation
200; Catalytic subunit of the main cell cycle cyclin-dependent kinase (CDK); alternately associates with G1 cyclins (CLNs) and G2/M cyclins (CLBs) which direct the CDK to specific substrates
201; Covalently-bound cell wall protein of unknown function; identified as a cell cycle regulated SBF target gene; deletion mutants are highly resistant to treatment with beta-1,3-glucanase; has sequence similarity to YJL171C
202; Protein whose expression suppresses a secretory pathway mutation in E. coli; has similarity to the mammalian RAMP4 protein involved in secretion
203; Soluble GTPase with a role in regulation of membrane traffic; regulates potassium influx; G protein of the Ras superfamily, similar to ADP-ribosylation factor
204; Ubiquitin-conjugating enzyme suppressor that functions as a general positive regulator of Cdc34p activity; nuclear protein that may represent a link between nucleocytoplasmic transport and ubiquitin ligase activity
205; Subunit of both RNase MRP, which cleaves pre-rRNA, and nuclear RNase P, which cleaves tRNA precursors to generate mature 5′ ends
206; Peroxisomal integral membrane protein, involved in negative regulation of peroxisome size; partially functionally redundant with Pex31p; genetic interactions suggest action at a step downstream of steps mediated by Pex28p and Pex29p
207; Endoplasmic reticulum and nuclear membrane protein, forms a complex with Cdc48p and Ufd1p that recognizes ubiquitinated proteins in the endoplasmic reticulum and delivers them to the proteasome for degradation
208; Short-lived chaperone required for correct maturation of the 20S proteasome; degraded by proteasome upon completion of its assembly; involved in ubiquitin-mediated proteolysis; mutant defective in degradation of short-lived proteins
209; Ketopantoate hydroxymethyltransferase, required for pantothenic acid biosynthesis, converts 2-oxoisovalerate into 2-dehydropantoate
210; Multidrug resistance dityrosine transporter of the major facilitator superfamily, essential for spore wall synthesis, facilitates the translocation of bisformyl dityrosine through the prospore membrane
211; Putative protein of unknown function; green fluorescent protein (GFP)-fusion protein localizes to the vacuole; YBR187W is an essential gene
212; Mitochondrial pyrimidine nucleotide transporter; imports pyrimidine nucleoside triphosphates and exports pyrimidine nucleoside monophosphates; member of the mitochondrial carrier family
213; Glycolytic enzyme phosphoglucose isomerase, catalyzes the interconversion of glucose-6-phosphate and fructose-6-phosphate; required for cell cycle progression and completion of the gluconeogenic events of sporulation
214; Subunit (90 kDa) of TFIID and SAGA complexes, involved in RNA polymerase II transcription initiation and in chromatin modification
215; Putative mannosyltransferase involved in protein glycosylation; member of the KRE2/MNT1 mannosyltransferase family
216; Protein containing SH3-domains, involved in establishing cell polarity and morphogenesis; functions as a scaffold protein for complexes that include Cdc24p, Step 5p, Step 20p, and Rsr1p
217; Endoplasmic reticulum membrane protein, required for ER-associated protein degradation, involved in the retrograde transport of misfolded or unassembled proteins; N- and C-termini protrude into the cytoplasm, has similarity to Dfm1p
218; Component of the hexameric MCM complex, which is important for priming origins of DNA replication in G1 and becomes an active ATP-dependent helicase that promotes DNA melting and elongation when activated by Cdc7p-Dbf4p in S-phase
219; Protein required for wild-type resistance to the antifungal drug ciclopiroxolamine; not related to the COS family of subtelomerically-encoded proteins
220; Putative alpha-1,2-mannosyltransferase involved in O- and N-linked protein glycosylation; member of the KRE2/MNT1 mannosyltransferase family
221; Putative high affinity iron transporter involved in transport of intravacuolar stores of iron; forms complex with Fet5p; expression is regulated by iron; proposed to play indirect role in endocytosis
222; Bifunctional dehydrogenase and ferrochelatase, involved in the biosynthesis of siroheme; also involved in the expression of PAPS reductase and sulfite reductase
223; One of two S. cerevisiae homologs (Sds23p and Sds24p) of the Schizosaccharomyces pombe Sds23 protein, which genetic studies have implicated in APC/cyclosome regulation; may play an indirect role in fluid-phase endocytosis
224; Ubiquitin-like modifier, conjugated via an isopeptide bond to a lysine residue of Atg5p by the E1 enzyme, Atg7p, and the E2 enzyme, Atg10p, a step that is essential for autophagy
225; Putative protein of unknown function; YBR220c is not an essential gene
226; E1 beta subunit of the pyruvate dehydrogenase (PDH) complex, which is an evolutionarily-conserved multi-protein complex found in mitochondria
227; Peroxisomal AMP-binding protein, localizes to both the peroxisomal peripheral membrane and matrix, expression is highly inducible by oleic acid, similar to E. coli long chain acyl-CoA synthetase
228; Hypothetical protein
229; RNA binding protein with similarity to mammalian heterogeneous nuclear RNP K protein, involved in the regulation of telomere position effect and telomere length
230; Essential protein, component of the DASH complex; involved in spindle integrity and kinetochore function; interacts with Duo1p and Dam1p; localizes to intranuclear spindles and kinetochore
231; Essential subunit of the ARP2/3 complex, which is required for the motility and integrity of cortical actin patches
232; Putative ion transporter, similar to mammalian electroneutral Na(+)-(K+)—C1-cotransporter family; YBR235W is not an essential gene
233; RNA helicase in the DEAD-box family, necessary for prespliceosome formation, bridges U1 and U2 snRNPs and enables stable U2 snRNP association with intron RNA
234; Putative protein of unknown function; green fluorescent protein (GFP)-fusion protein localizes to the cytoplasm and nucleus; YBR239c is not an essential gene
235; Zinc finger protein of the Zn(II)2Cys6 type, probable transcriptional activator of thiamine biosynthetic genes
236; Putative protein of unknown function; green fluorescent protein (GFP)-fusion protein localizes to the vacuolar membrane; YBR241C is not an essential gene
237; Phospholipid hydroperoxide glutathione peroxidase induced by glucose starvation that protects cells from phospholipid hydroperoxides and nonphospholipid peroxides during oxidative stress
238; Hypothetical protein
239; Protein associated with U3 and U14 snoRNAs, required for pre-rRNA processing and 40S ribosomal subunit synthesis; localized in the nucleus and concentrated in the nucleolus
240; 3-deoxy-D-arabino-heptulosonate-7-phosphate (DAHP) synthase, catalyzes the first step in aromatic amino acid biosynthesis and is feedback-inhibited by tyrosine
241; Mitochondrial ribosomal protein of the small subunit
242; One of 10 subunits of the transport protein particle (TRAPP) complex of the cis-Golgi which mediates vesicle docking and fusion; mutations in the human homolog cause the spondyloepiphyseal dysplasia tarda (SEDL) disorder
243; Protein of unknown function, required for normal growth rate at 15 degrees C.; green fluorescent protein (GFP)-fusion protein localizes to the cytoplasm in a punctate pattern
244; Riboflavin synthase; catalyzes the last step of the riboflavin biosynthesis pathway
245; Subunit of the COMPASS (Set1C) complex, which methylates histone H3 on lysine 4 and is required in transcriptional silencing near telomeres
246; Protein of unknown function involved in bud growth in the mitotic signaling network; proposed negative regulator of Swe1p and Gin4p; contains dispersed C₂H₂ zinc finger domains
247; Mitochondrial ribosomal protein of the large subunit
248; Putative S-adenosylmethionine-dependent methyltransferase of the seven beta-strand family; green fluorescent protein (GFP)-fusion protein localizes to the cytoplasm; YBR271W is not as essential gene
249; Protein that binds to the Rap1p C-terminus and acts synergistically with Rif2p to help control telomere length and establish telomeric silencing; deletion results in telomere elongation
250; Protein phosphatase with specificity for serine, threonine, and tyrosine residues; has a role in the DNA synthesis phase of the cell cycle
251; Putative protein of unknown function; green fluorescent protein (GFP)-fusion protein localizes to the cytoplasm and nucleus; YBR281c is not an essential gene
252; Mitochondrial ribosomal protein of the large subunit
253; Subunit of the Ssh1 translocon complex; Sec61p homolog involved in co-translational pathway of protein translocation; not essential
254; Putative protein of unknown function; YBR284W is not an essential gene; null mutant exhibits decreased resistance to rapamycin and wortmannin
255; Putative protein of unknown function; YBR287W is not an essential gene and deletion of the YBR287W leads to poor growth on glucose-minimal medium at 15C
256; Protein of unknown function; mutation results in a zinc sensitive phenotype
257; Mu3-like subunit of the clathrin associated protein complex (AP-3); functions in transport of alkaline phosphatase to the vacuole via the alternate pathway
258; Heavy metal ion homeostasis protein, facilitates trafficking of Smf1p and Smf2p metal transporters to the vacuole where they are degraded, controls metal ion transport, prevents metal hyperaccumulator, functions in copper detoxification
259; Na+/Pi cotransporter, active in early growth phase; similar to phosphate transporters of Neurospora crassa; transcription regulated by inorganic phosphate concentrations and Pho4p
260; Catabolic L-serine (L-threonine) deaminase, catalyzes the degradation of both L-serine and L-threonine; required to use serine or threonine as the sole nitrogen source, transcriptionally induced by serine and threonine
261; S-phase checkpoint protein found at replication forks, required for DNA replication; also required for Rad53p activation during DNA replication stress, where it forms a replication-pausing complex with Tof1p and is phosphorylated by Mec1p; protein involved in replication checkpoint
262; Essential nucleolar protein required for the synthesis of 18S rRNA and for the assembly of 40S ribosomal subunit
263; Hypothetical protein, has similarity to proteins in S. pombe, C. elegans, D. melanogaster.
264; Zinc metalloendopeptidase, found in the cytoplasm and intermembrane space of mitochondria; with Cym1p, involved in degradation of mitochondrial proteins and of presequence peptides cleaved from imported proteins
265; Protein of unknown function; green fluorescent protein (GFP)-fusion protein localizes to the cytoplasm in a punctate pattern
266; Transcription factor required for induction of KAR3 and CIK1 during mating, also required during meiosis; exists in two forms, a slower-migrating form more abundant during vegetative growth and a faster-migrating form induced by pheromone
267; Essential component of glycosylphosphatidylinositol-mannosyltransferase I, required for the autocatalytic post-translational processing of the protease B precursor Prb1p, localizes to ER in lumenal orientation; homolog of mammalian PIG-X
268; Protein involved in control of cell wall structure and stress response; inhibits Cbk1p protein kinase activity; overproduction confers resistance to cell-wall degrading enzymes
269; Diadenosine 5′,5″-P1,P4-tetraphosphate phosphorylase I (AP4A phosphorylase), involved in catabolism of bis(5′-nucleosidyl) tetraphosphates; has similarity to Apa2p
270; Hypothetical protein
271; Hypothetical protein
272; Subunit, with Yme1p, of the mitochondrial inner membrane i-AAA protease complex, which is responsible for degradation of unfolded or misfolded mitochondrial gene products; required for growth of cells lacking the mitochondrial genome
273; Glucokinase, catalyzes the phosphorylation of glucose at C6 in the first irreversible step of glucose metabolism; one of three glucose phosphorylating enzymes; expression regulated by non-fermentable carbon sources
274; Protein of unknown function, involved in proteasome-dependent catabolite inactivation of fructose-1,6-bisphosphatase; contains six WD40 repeats; computational analysis suggests that Gid7p and Moh1p have similar functions
275; Protein required for the breakdown of autophagic vesicles in the vacuole during autophagy, putative integral membrane protein that localizes to vacuolar membranes and punctate structures attached to the vacuole
276; Protein of unknown function; binds Las17p, which is a homolog of human Wiskott-Aldrich Syndrome protein involved in actin patch assembly and actin polymerization
277; Protein involved in mating response, invasive/filamentous growth, and osmotolerance, acts as an adaptor that links G protein-associated Cdc42p-Step 20p complex to the effector Ste11p to modulate signal transduction
278; Essential protein involved in rRNA processing and ribosome biogenesis
279; Multifunctional enzyme containing phosphoribosyl-ATP pyrophosphatase, phosphoribosyl-AMP cyclohydrolase, and histidinol dehydrogenase activities; catalyzes the second, third, ninth and tenth steps in histidine biosynthesis
280; Microtubule-associated protein, component of the interface between microtubules and kinetochore, involved in sister chromatid separation; essential in polyploid cells but not in haploid or diploid cells; ortholog of mammalian CLIP-170
281; [PIN(+)] prion, an infectious protein conformation that is generally an ordered protein aggregate
282; Protein of unknown function, involved in the integration of lipid signaling pathways with cellular homeostasis
283; Beta-isopropylmalate dehydrogenase, catalyzes the third step in the leucine biosynthesis pathway
284; Cysteine desulfurase involved in iron-sulfur cluster (Fe/S) biogenesis; required for the post-transcriptional thio-modification of mitochondrial and cytoplasmic tRNAs; essential protein located predominantly in mitochondria
285; Subunit of a complex with Ctf8p and Ctf18p that shares some components with Replication Factor C, required for sister chromatid cohesion
286; Protein involved in bud-site selection and required for axial budding pattern; localizes with septins to bud neck in mitosis and may constitute an axial landmark for next round of budding
287; Poly(A+) RNA-binding protein, involved in the export of mRNAs from the nucleus to the cytoplasm; similar to Hrb1p and Npl3p; also binds single-stranded telomeric repeat sequence in vitro
288; SaGa associated Factor 29 kDa; Probable 29kKDa Subunit of SAGA histone acetyltransferase complex
289; Regulatory subunit of acetolactate synthase, which catalyzes the first step of branched-chain amino acid biosynthesis; enhances activity of the Ilv2p catalytic subunit, localizes to mitochondria
290; Protein of unknown function; null mutant shows a reduced affinity for the alcian blue dye suggesting a decreased net negative charge of the cell surface
291; Phosphatidylglycerolphosphate synthase, catalyzes the synthesis of phosphatidylglycerolphosphate from CDP-diacylglycerol and sn-glycerol 3-phosphate in the first committed and rate-limiting step of cardiolipin biosynthesis
292; Protein involved in retention of membrane proteins, including Sec12p, in the ER; localized to Golgi; functions as a retrieval receptor in returning membrane proteins to the ER
293; Component of the septin ring of the mother-bud neck that is required for cytokinesis; septins recruit proteins to the neck and can act as a barrier to diffusion at the membrane, and they comprise the 10 nm filaments seen with EM
294; Mitochondrial ribosomal protein of the large subunit
295; Protein of unknown function, has sequence and structural similarity to flavodoxins; green fluorescent protein (GFP)-fusion protein localizes to the cytoplasm in a punctate pattern
296; Citrate synthase, catalyzes the condensation of acetyl coenzyme A and oxaloacetate to form citrate, peroxisomal isozyme involved in glyoxylate cycle; expression is controlled by Rtg1p and Rtg2p transcription factors
297; Ser/Thr protein kinase involved in salt tolerance; functions in regulation of Trk1p-Trk2p potassium transporter; partially redundant with Hal5p; has similarity to Npr1p
298; Amphiphysin-like lipid raft protein; subunit of a complex (Rvs161p-Rvs167p) that regulates polarization of the actin cytoskeleton, endocytosis, cell polarity, cell fusion and viability following starvation or osmotic stress
299; Acetate transporter required for normal sporulation
300; Putative ATP-dependent permease of the ABC transporter family of proteins
301; Protein required for respiratory growth and stability of the mitochondrial genome
302; Non-catalytic subunit of N-terminal acetyltransferase of the NatC type; required for replication of dsRNA virus; member of the Sm protein family
303; Hydrophobic plasma membrane localized, stress-responsive protein that negatively regulates the H(+)-ATPase Pma1p; induced by heat shock, ethanol treatment, weak organic acid, glucose limitation, and entry into stationary phase
304; Mitochondrial asparaginyl-tRNA synthetase
305; Small single-membrane span proteolipid that functions as a regulatory subunit of the plasma membrane H(+)-ATPase Pma1p, forms unique helix and positively charged cytoplasmic domain that is able to specifically segregate phosphatidylserines
306; Nucleotide pyrophosphatase/phosphodiesterase family member; mediates extracellular nucleotide phosphate hydrolysis along with Npp2p and Pho5p; activity and expression enhanced during conditions of phosphate starvation
307; Putative Rheb-related GTPase involved in regulating canavanine resistance and arginine uptake; member of the Ras superfamily of G-proteins
309; Protein with a potential role in actin cytoskeletal organization; overexpression suppresses a pfy1 (profilin) null mutation
309; Subunit of the Set3C deacetylase complex; putative DNA-binding protein
310; Fatty acid elongase, involved in sphingolipid biosynthesis; acts on fatty acids of up to 24 carbons in length; mutations have regulatory effects on 1,3-beta-glucan synthase, vacuolar ATPase, and the secretory pathway
311; Hypothetical protein
312; Hypothetical protein
313; Phosphorelay intermediate protein, phosphorylated by the plasma membrane sensor Sln1p in response to osmotic stress and then in turn phosphorylates the response regulators Ssk1p in the cytosol and Skn7p in the nucleus
314; Subunit of the oligosaccharyltransferase complex of the ER lumen, which catalyzes protein asparagine-linked glycosylation; type I membrane protein required for incorporation of Ost3p or Ost6p into the OST complex
315; Cytoplasmic ATPase that is a ribosome-associated molecular chaperone; may be involved in the folding of newly-synthesized polypeptide chains; member of the heat shock protein 70 (HSP70) family; interacts with the phosphatase subunit Reg1p
316; Site-specific endonuclease required for gene conversion at the MAT locus (homothallic switching) through the generation of a ds DNA break; expression restricted to mother cells in late G1 as controlled by Swi4p-Swi6p, Swi5p and Ash1p
317; ADP-ribosylation factor GTPase activating protein (ARF GAP), involved in ER-Golgi transport; shares functional similarity with Glo3p
318; One of five related septins (Cdc3p, Cdc10p, Cdc11p, Cdc12p, Shs1p) that form a cortical filamentous collar at the mother-bud neck which is necessary for normal morphogenesis and cytokinesis
319; Putative RNA binding protein and partially redundant Whi3p homolog that regulates the cell size requirement for passage through Start and commitment to cell division
320; Hypothetical protein
321; Component of the mitochondrial Tim54p-Tim22p complex involved in insertion of polytopic proteins into the inner membrane
322; Protein kinase with a possible role in MAP kinase signaling in the pheromone response pathway
323; Protein with similarity to hydrophilins, which are involved in the adaptive response to hyperosmotic conditions; computational analysis of large-scale protein-protein interaction data suggests a possible role in rRNA processing
324; Endoplasmic reticulum packaging chaperone, required for incorporation of amino acid permeases into COPII coated vesicles for transport to the cell surface
325; Hypothetical protein
326; Cytoplasmic nucleoporin required for polyadenylated RNA export but not for protein import; component of Nup82p nuclear pore subcomplex; contains a nuclear export signal
327; Phorphobilinogen deaminase, catalyzes the conversion of 4-porphobilinogen to hydroxymethylbilane, the third step in the heme biosynthetic pathway; localizes to both the cytoplasm and nucleus; expression is regulated by Hap2p-Hap3p
328; Protein of unknown function; has similarity to mammalian reticulon proteins; member of the RTNLA (reticulon-like A) subfamily
329; Mitochondrial ribosomal protein of the large subunit
330; Subunit of a tRNA methyltransferase complex composed of Trm8p and Trm82p that catalyzes 7-methylguanosine modification of tRNA
331; Prenyltransferase, required for cell viability
332; ADP-ribosylation factor, GTPase of the Ras superfamily involved in regulation of coated formation vesicles in intracellular trafficking within the Golgi; functionally interchangeable with Arf2p
333; Catalytic subunit of protein phosphatase 2A, functionally redundant with Pph21p; methylated at C terminus; forms alternate complexes with several regulatory subunits; involved in signal transduction and regulation of mitosis
334; Ribosomal protein L47 of the large (60S) ribosomal subunit, identical to Rpl41Bp and has similarity to rat L41 ribosomal protein; comprised of only 25 amino acids; rpl41a rpl41b double null mutant is viable
335; Protein that inhibits ATP hydrolysis by the F1F0-ATP synthase, inhibitory function is enhanced by stabilizing proteins Stf1p and Stf2p; has similarity to Stf1p and both Inh1p and Stf1p exhibit the potential to form coiled-coil structures
336; Hypothetical protein
337; Hypothetical protein
338; Hypothetical protein
339; RING finger protein that interacts with the arginine methyltransferase Hmt1p; may regulate methylation of Npl3p, which modulates Npl3p function in mRNA processing and export; has similarity to Air1p
340; D-lactate dehydrogenase, oxidizes D-lactate to pyruvate, transcription is heme-dependent, repressed by glucose, and derepressed in ethanol or lactate; located in the mitochondrial inner membrane
341; Transcriptional activator necessary for gamma-aminobutyrate (GABA)-dependent induction of GABA genes (such as UGA1, UGA2, UGA4); zinc-finger transcription factor of the Zn(2)-Cys(6) binuclear cluster domain type; localized to the nucleus
342; Essential nuclear protein, involved in the oxidative stress response
343; Component of the CCR4-NOT complex, which has multiple roles in regulating mRNA levels including regulation of transcription and destabilizing mRNAs by deadenylation; basal transcription factor
344; DNA ligase found in the nucleus and mitochondria, an essential enzyme that joins Okazaki fragments during DNA replication; also acts in nucleotide excision repair, base excision repair, and recombination
345; Epsin-like protein involved in endocytosis and actin patch assembly and functionally redundant with Ent2p; binds clathrin via a clathrin-binding domain motif at C-terminus
346; Cytoplasmic DExD/H-box helicase, stimulates mRNA decapping, coordinates distinct steps in mRNA function and decay, interacts with both the decapping and deadenylase complexes, may have a role in mRNA export and translation
347; B-type cyclin involved in cell cycle progression; activates Cdc28p to promote the G2/M transition; may be involved in DNA replication and spindle assembly; accumulates during S phase and G2, then targeted for ubiquitin-mediated degradation
348; Component of the small (ribosomal) subunit (SSU) processosome required for pre-18S rRNa processing; essential nucleolar protein that, when overproduced, disrupts silencing
349; RNA polymerase III subunit C53
350; Essential, non-ATPase regulatory subunit of the 26S proteasome lid, similar to mammalian p55 subunit and to another S. cerevisiae regulatory subunit, Rpn7p
351; Protein of unknown function; GFP-fusion protein localizes to the cell periphery, cytoplasm, bud, and bud neck; null mutant shows a reduced affinity for the alcian blue dye suggesting a decreased net negative charge of the cell surface
352; Biotin:apoprotein ligase, covalently modifies proteins with the addition of biotin, required for acetyl-CoA carboxylase (Acc1p) holoenzyme formation
353; RNA polymerase II largest subunit B220, part of central core; phosphorylation of C-terminal heptapeptide repeat domain regulates association with transcription and splicing factors; similar to bacterial beta-prime
354; ADP-ribosylation factor, GTPase of the Ras superfamily involved in regulation of coated formation vesicles in intracellular trafficking within the Golgi; functionally interchangeable with Arf1p
355; Rho GDP dissociation inhibitor involved in the localization and regulation of Cdc42p
356; Ribosomal protein L47 of the large (60S) ribosomal subunit, identical to Rpl41Ap and has similarity to rat L41 ribosomal protein; comprised of only 25 amino acids; rpl41a rpl41b double null mutant is viable
357; Hypothetical protein
358; Cullin, structural protein of SCF complexes (which also contain Skp1p, Cdc34p, and an F-box protein) involved in ubiquitination; SCF promotes the G1-S transition by targeting G1 cyclins and the Cln-CDK inhibitor Sic1p for degradation
359; Protein involved in regulation of the mitochondrial F1F0-ATP synthase; Stf1p and Stf2p act as stabilizing factors that enhance inhibitory action of the Inh1p protein
360; ATPase in ER, nuclear membrane and cytosol with homology to mammalian p97; in a complex with Npl4p and Ufd1p participates in retrotranslocation of ubiquitinated proteins from the ER into the cytosol for degradation by the proteasome
361; Protein of unknown function, localized to the vacuolar outer membrane
362; Ubiquitin-specific protease that removes ubiquitin from ubiquitinated proteins; cleaves at the C terminus of ubiquitin fusions irrespective of their size; capable of cleaving polyubiquitin chains
363; Hypothetical protein
364; Frataxin, regulates mitochondrial iron accumulation; interacts with Isu1p which promotes Fe—S cluster assembly; interacts with electron transport chain components and may influence respiration; human homolog involved in Friedrich's ataxia
365; Hypothetical protein
366; Protein required for transport of aminopeptidase I (Lap4p) through the cytoplasm-to-vacuole targeting pathway; binds phosphatidylinositol-3-phosphate, involved in localization of membranes to the preautophagosome, potential Cdc28p substrate
367; 2′-O-ribose methyltransferase, catalyzes the ribose methylation of the guanosine nucleotide at position 18 of tRNAs
368; Protein involved in rRNA processing; component of the exosome 3->5 exonuclease complex with Rrp4p, Rrp41p, Rrp43p and Dis3p
369; Homeobox transcription factor, regulatory targets include genes involved in phosphate metabolism; binds cooperatively with Pho4p to the PHO5 promoter; phosphorylation of Pho2p facilitates interaction with Pho4p
370; Nuclear protein that plays a role in the function of the Smc5p-Rhc18p complex
371; Catalytic subunit of DNA polymerase delta; required for chromosomal DNA replication during mitosis and meiosis, intragenic recombination, repair of double strand DNA breaks, and DNA replication during nucleotide excision repair (NER)
372; Cell-cycle checkpoint serine-threonine kinase required for DNA damage-induced transcription of certain target genes, phosphorylation of Rad55p and Sml1p, and transient G2/M arrest after DNA damage; also regulates postreplicative DNA repair
373; ATPase, subunit of the GET complex; required for the retrieval of HDEL proteins from the Golgi to the ER in an ERD2 dependent fashion; involved in resistance to heat and metal stress
374; Protein of unknown function; green fluorescent protein (GFP)-fusion protein localizes to the cytoplasm in a punctate pattern
375; Protein O-mannosyltransferase, transfers mannose residues from dolichyl phosphate-D-mannose to protein serine/threonine residues; acts in a complex with Pmt2p, can instead interact with Pmt3p in some conditions; target for new antifungals
376; Signal recognition particle (SRP) subunit, interacts with the RNA component of SRP to form the Alu domain, which is the region of SRP responsible for arrest of nascent chain elongation during membrane targeting; homolog of mammalian SRP14
377; UBX (ubiquitin regulatory X) domain-containing protein that interacts with Cdc48p, green fluorescent protein (GFP)-fusion protein localizes to the cytoplasm in a punctate pattern
378; Protein of unknown function; interacts with meiotic division protein Csm1p; green fluorescent protein (GFP)-fusion protein localizes to the nuclear periphery, potential Cdc28p substrate
379; Nuclear pore complex subunit, part of a subcomplex also containing Nup53p, Nup170p, and Pse1p
380; Hypothetical protein
381; Mitochondrial external NADH dehydrogenase, catalyzes the oxidation of cytosolic NADH; Nde1p and Nde2p are involved in providing the cytosolic NADH to the mitochondrial respiratory chain
382; Component of the TREX complex required for nuclear mRNA export; DEAD-box RNA helicase involved in early and late steps of spliceosome assembly; homolog of the human splicing factor hUAP56
383; Ribosomal protein P1 alpha, a component of the ribosomal stalk, which is involved in the interaction between translational elongation factors and the ribosome; accumulation of P1 in the cytoplasm is regulated by phosphorylation and interaction with the P2 stalk component
384; Cytoplasmic malate dehydrogenase, catalyzes interconversion of malate and oxaloacetate; involved in the glyoxylate cycle
385; Vacuolar protein that plays a critical role in the tethering steps of vacuolar membrane fusion by facilitating guanine nucleotide exchange on small guanosine triphosphatase Ypt7p
386; Protein of unknown function, may be involved in chromatin silencing
387; E3 ubiquitin ligase for Rad6p, required for the ubiquitination of histone H₂B, recruitment of Rad6p to promoter chromatin and subsequent methylation of histone H3 (on L4 and L79), contains RING finger domain
388; Endoplasmic reticulum transmembrane protein, homolog of human BAP31 protein
389; Protein involved in transcription initiation at TATA-containing promoters; associates with the basal transcription factor TFIID; contains two bromodomains; corresponds to the C-terminal region of mammalian TAF1; redundant with Bdf1p
390; Subunit VIIa of cytochrome c oxidase, which is the terminal member of the mitochondrial inner membrane electron transport chain
391; Mitochondrial NADP-specific isocitrate dehydrogenase, catalyzes the oxidation of isocitrate to alpha-ketoglutarate; not required for mitochondrial respiration and may function to divert alpha-ketoglutarate to biosynthetic processes
392; Protein component of the small (40S) ribosomal subunit; nearly identical to Rps29Ap and has similarity to rat S29 and E. coli S14 ribosomal proteins
393; Protein required for processing of 20S pre-rRNA in the cytoplasm, associates with pre-OS ribosomal particles
394; Hypothetical protein
395; GDP-mannose pyrophosphorylase (mannose-1-phosphate guanyltransferase), synthesizes GDP-mannose from GTP and mannose-1-phosphate in cell wall biosynthesis; required for normal cell wall structure
396; Protein with similarity to mammalian monocarboxylate permeases, which are involved in transport of monocarboxylic acids across the plasma membrane; mutant is not deficient in monocarboxylate transport
397; 1-acyl-sn-gylcerol-3-phosphate acyltransferase, catalyzes the acylation of lysophosphatidic acid to form phosphatidic acid, a key intermediate in lipid metabolism; located in lipid particles and endoplasmic reticulum
398; Protein containing a Kruppel-type zinc-finger domain; has similarity to Stp1p, Stp2p, and Stp3p
399; Type 2A-related serine-threonine phosphatase that functions in the G1/S transition of the mitotic cycle; cytoplasmic and nuclear protein that modulates functions mediated by Pkc1p including cell wall and actin cytoskeleton organization
400; Functional homolog of human NPC2/Hel, which is a cholesterol-binding protein whose deficiency causes Niemann-Pick type C2 disease involving retention of cholesterol in lysosomes
401; Mitochondrial ribosomal protein of the small subunit
402; Flavin adenine dinucleotide (FAD) synthetase, performs the second step in synthesis of FAD from riboflavin
403; Mitochondrial matrix protein that interacts with an N-terminal region of mitochondrial RNA polymerase (Rpo41p) and couples RNA processing and translation to transcription
404; Subunit of the N-terminal acetyltransferase NatA (Nat1p, Ard1p, Nat5p); N-terminally acetylates many proteins, which influences multiple processes such as the cell cycle, heat-shock resistance, mating, sporulation, and telomeric silencing
405; Dual-specificity kinase required for spindle pole body (SPB) duplication and spindle checkpoint function; substrates include SPB proteins Spc42p, Spc110p, and Spc98p, mitotic exit network protein Mob1p, and checkpoint protein Mad1p
406; Hypothetical protein
407; Protein of unknown function, potentially phosphorylated by Cdc28p
408; Homolog of Gpm1p phosphoglycerate mutase which converts 3-phosphoglycerate to 2-phosphoglycerate in glycolysis; may be non-functional derivative of a gene duplication event
409; Transcription factor that stimulates expression of proteasome genes; Rpn4p levels are in turn regulated by the 26S proteasome in a negative feedback control mechanism; RPN4 is transcriptionally regulated by various stress responses
410; Member of an oxysterol-binding protein family with seven members in S. cerevisiae; family members have overlapping, redundant functions in sterol metabolism and collectively perform a function essential for viability
411; Protein with similarity to Emp24p and Erv25p, member of the p24 family involved in ER to Golgi transport
412; DDK (Dbf4-dependent kinase) catalytic subunit required for firing origins and replication fork progression in mitosis through phosphorylation of Mcm2-7p complexes and Cdc45p; kinase activity correlates with cyclical DBF4 expression
413; Enoyl reductase that catalyzes the last step in each cycle of very long chain fatty acid elongation, localizes to the ER, highly enriched in a structure marking nuclear-vacuolar junctions, coimmunoprecipitates with elongases Fen1p and Sur4p
414; Nucleolar protein, component of the small subunit processome complex, which is required for processing of pre-18S rRNA; has similarity to mammalian fibrillarin
415; Ring finger protein involved in the DNA damage response with possible recombination role; genetically identified by synthetic lethality with SGS1 (DNA helicase) and TOP3 (DNA topoisomerase); sporulation role; interacts with Slx8p and Lin1p
416; Hypothetical protein
417; One of six ATPases of the 19S regulatory particle of the 26S proteasome involved in the degradation of ubiquitinated substrates; required for normal peptide hydrolysis by the core 20S particle
418; Type 2C protein phosphatase (PP2C); inactivates the osmosensing MAPK cascade by dephosphorylating Hog1p; mutation delays mitochondrial inheritance; deletion reveals defects in precursor tRNA splicing, sporulation and cell separation
419; Subunit of the RNA polymerase II mediator complex; associates with core polymerase subunits to form the RNA polymerase II holoenzyme; essential for transcriptional regulation
420; Delta subunit of the central stalk of mitochondrial F1F0 ATP synthase, which is a large, evolutionarily conserved enzyme complex required for ATP synthesis
421; Essential protein required for sister chromatid cohesion in mitosis and meiosis; subunit of the cohesin complex; expression is cell cycle regulated and peaks in S phase
422; Protein related to mammalian high mobility group proteins; likely component of the INO80 complex, which is an ATP-dependent chromatin-remodeling complex
423; Neutral trehalase, degrades trehalose; required for thermotolerance and may mediate resistance to other cellular stresses; may be phosphorylated by Cdc28p
424; Protein whose overexpression suppresses the growth defect of mutants lacking protein kinase A activity; involved in cAMP-mediated signaling; localized to the nucleus; similar to the mouse testis-specific protein PBS13
425; ABC transporter protein involved in multidrug resistance and resistance to singlet oxygen species
426; Subunit of the GINS complex (Sld5p, Psf1p, Psf2p, Psf3p), which is localized to DNA replication origins and implicated in assembly of the DNA replication machinery
427; Inositol hexaphosphate kinase, phosphorylates inositol hexakisphosphate (InsP6) to diphosphoinositol polyphosphates, required for proper vacuole morphology and involved in salt stress response, contains two leucine heptad repeats
428; Hypothetical protein
429; Nucleolar protein required for maturation of 18S rRNA, member of the eIF4A subfamily of DEAD-box ATP-dependent RNA helicases
430; Protein of unknown function that may be involved in microtubule organization; high-copy suppressor of CIK1 deletion
431; Hypothetical protein
432; Component of the GARP (Golgi-associated retrograde protein) complex, Vps51p-Vps52p-Vps53p-Vps54p, which is required for the recycling of proteins from endosomes to the late Golgi; potentially phosphorylated by Cdc28p
433; Protein involved in transcription-coupled repair nucleotide excision repair of UV-induced DNA lesions; homolog of human CSA protein
434; Protein of unknown function with similarity to members of a family of flavodoxin-like proteins; induced by oxidative stress in a Yap1p dependent manner; GFP-fusion protein localizes to the cytoplasm in a punctate pattern
435; Protein that localizes primarily to the plasma membrane, also found at the nuclear envelope; has similarity to Hsp30p and Yro2p, which are induced during heat shock
436; Transcriptional activator involved in regulation of genes of the lysine biosynthesis pathway; requires 2-aminoadipate semialdehyde as co-inducer
437; Protein of unknown function; green fluorescent protein (GFP)-fusion protein localizes to the cell periphery
438; 3-deoxy-D-arabino-heptulosonate-7-phosphate (DAHP) synthase, catalyzes the first step in aromatic amino acid biosynthesis and is feedback-inhibited by phenylalanine
439; Protein of unconfirmed function, plays an indirect role in endocytic membrane trafficking, member of a family of enoyl-CoA hydratase/isomerases
440; Mitochondrial ribosomal protein of the small subunit, has similarity to E. coli S10 ribosomal protein; essential for viability, unlike most other mitoribosomal proteins
441; Transcriptional repressor, that recruits the Cyc8p-Tup1p complex to promoters; mediates glucose repression and negatively regulates a variety of processes including filamentous growth and alkaline pH response
442; Coproporphyrinogen III oxidase, an oxygen requiring enzyme that catalyzes the sixth step in the heme biosynthetic pathway; localizes to the mitochondrial inner membrane; transcription is repressed by oxygen and heme (via Rox1p and Hap1p)
443; RNA polymerase III subunit C11; mediates pol III RNA cleavage activity and is important for termination of transcription
444; Amino acid permease involved in the uptake of cysteine, leucine, isoleucine and valine
445; Uroporphyrinogen decarboxylase, catalyzes the fifth step in the heme biosynthetic pathway; localizes to both the cytoplasm and nucleus; activity inhibited by Cu2+, Zn2+, Fe2+, Fe3+ and sulfhydryl-specific reagents
446; Hypothetical protein
447; Ubiquitin-conjugating enzyme or E2; together with Skp1p, Rbx1p, Cdc53p, and an F-box protein, forms a ubiquitin-protein ligase called the SCF complex which regulates cell cycle progression by targeting key substrates for degradation
448; Cell wall protein that contains a putative GPI-attachment site; secreted by regenerating protoplasts; up-regulated by activation of the cell integrity pathway, as mediated by Rim1p; upregulated by cell wall damage via disruption of FKS1449; Lectin; soluble lumenal ER protein; member of the OS-9 protein family; similar to mannose-6-phosphate receptors (MPRs); serves as a receptor that recognizes misfolded N-glycosylated proteins and participates in their targeting to ERAD
450; Protein with lipolytic activity towards triacylglycerols and diacylglycerols when expressed in E. coli; role in yeast lipid degradation is unclear
451; Component of serine palmitoyltransferase, responsible along with Lcb1p for the first committed step in sphingolipid synthesis, which is the condensation of serine with palmitoyl-CoA to form 3-ketosphinganine
452; Hypothetical protein
453; Hypothetical protein
454; Cytoplasmic protein required for replication of Brome mosaic virus in S. cerevisiae, which is a model system for studying replication of positive-strand RNA viruses in their natural hosts
455; Protein of unknown function, green fluorescent protein (GFP)-fusion protein localizes to the cytoplasm
456; Ubiquitin hydrolase, required for recycling ubiquitin from proteasome-bound ubiquitinated intermediates, acts at the late endosome/prevacuolar compartment to recover ubiquitin from ubiquitinated membrane proteins en route to the vacuole457; The authentic, non-tagged protein was localized to the mitochondria
458; Polyamine acetyltransferase; acetylates polyamines such as putrescine, spermidine and spermine; may be involved in transcription and/or DNA replication via regulation of levels of polyamines bound to chromosomal DNA
459; One of 11 subunits of the SWI/SNF chromatin remodeling complex involved in transcriptional regulation; interacts with a highly conserved 40-residue sequence of Snf2p
460; Phosphatase subunit of the trehalose-6-phosphate synthase/phosphatase complex, which synthesizes the storage carbohydrate trehalose; expression is induced by stress conditions and repressed by the Ras-cAMP pathway
461; Protein that stimulates strand exchange by stabilizing the binding of Rad51p to single-stranded DNA; involved in the recombinational repair of double-strand breaks in DNA during vegetative growth and meiosis; forms heterodimer with Rad57p
462; Protein of unassigned function involved in mutation suppression, important for error-free repair of spontaneous and induced DNA lesions to protect the genome from mutation; associates with Shu1p, Psy3p, and Csm2p
463; Chaperone that specifically facilitates the assembly of cytochrome c oxidase, located in the mitochondrial inner membrane
464; Component of the RNA polymerase II general transcription and DNA repair factor TFIIH; involved in transcription initiation; homolog of the Chlamydomonas reinhardtii REX1-S protein which is involved in DNA repair
465; Transcription factor required for the synthesis of the glycolytic enzyme pyruvate decarboxylase, required for high level expression of both the THI and the PDC genes
466; Integral membrane protein localized to late Golgi vesicles along with the v-SNARE Tlg2p; green fluorescent protein (GFP)-fusion protein localizes to the cytoplasm in a punctate pattern
467; Subunit of the Sec61p translocation complex (Sec61p-Sss1p-Sbh1p) that forms a channel for passage of secretory proteins through the endoplasmic reticulum membrane, and of the Ssh1p complex (Ssh1p-Sbh2p-Sss1p); interacts with Ost4p and Wbplp
468; RNA splicing factor, required for ATP-independent portion of 2nd catalytic step of spliceosomal RNA splicing; interacts with Prp 18p; contains zinc knuckle domain
469; Hypothetical protein
470; Hypothetical protein
471; Essential iron-sulfur protein required for ribosome biogenesis and translation initiation; facilitates binding of a multifactor complex (AFC) of translation initiation factors to the small ribosomal subunit; predicted ABC family ATPase
472; Transcriptional factor, involved in the expression of genes during nutrient limitation; also involved in the negative regulation of DPP1 and PHR1
473; Protein required for mismatch repair in mitosis and meiosis, forms a complex with Msh2p to repair both single-base & insertion-deletion mispairs; potentially phosphorylated by Cdc28p
474; 14-3-3 protein, minor isoform; binds proteins and DNA, involved in regulation of many processes including exocytosis and vesicle transport, Ras/MAPK signaling during pseudohyphal development, rapamycin-sensitive signaling, and others
475; Integral membrane protein localized to late Golgi vesicles along with the v-SNARE Tlg2p
476; Scaffold protein that, in response to pheromone, shuttles from the nucleus to the plasma membrane and assembles kinases Ste11p, Step 7p, and Fus3p into a specific signaling complex; active oligomeric form interacts with Step 4p-Ste18p complex
477; Vacuolar membrane protein of unknown function that is conserved in mammals; predicted to contain eleven transmembrane helices; interacts with Pdr5p, a protein involved in multidrug resistance
478; multispanning membrane protein
479; Putative alanine transaminase (glutamic pyruvic transaminase)
[0201] 480; Putative mitochondrial ribosomal protein of the large subunit, has similarity to E. coli L34 ribosomal protein; required for respiratory growth, as are most mitochondrial ribosomal proteins
   481; Mitochondrial ribosomal protein of the large subunit
   482; Hypothetical protein
   483; Palmitoyltransferase that acts on the SNAREs Snc1p, Syn8p, Tlg1p and likely on all SNAREs; member of a family of putative palmitoyltransferases containing an Asp-His-His-Cys-cysteine rich (DHHC-CRD) domain; may have a role in vacuole fusion
   484; Vacuolar glutathione S-conjugate transporter of the ATP-binding cassette family, has a role in detoxifying metals such as cadmium, mercury, and arsenite; also transports unconjugated bilirubin; similar to human cystic fibrosis protein CFTR
   485; Subunit of a Golgi membrane exchange factor (Ric1p-Rgp1p) that catalyzes nucleotide exchange on Ypt6p
   486; Peroxisomal signal receptor for the N-terminal nanopeptide signal (PTS2) of peroxisomal matrix proteins; WD repeat protein; defects in human homolog cause lethal rhizomelic chondrodysplasia punctata (RCDP)
   487; GPI-anchored aspartyl protease (yapsin) involved in protein processing; shares functions with Yap3p and Kex2p
   488; Subunit (61/68 kDa) of TFIID and SAGA complexes, involved in RNA polymerase II transcription initiation and in chromatin modification, similar to histone H2A
   489; Dihydrolipoyl transsuccinylase, a component of the mitochondrial alpha-ketoglutarate dehydrogenase complex, which catalyzes a step in the tricarboxylic acid (TCA) cycle, the oxidative decarboxylation of alpha-ketoglutarate to succinyl-CoA
   490; Member of the CCCH zinc finger family; has similarity to mammalian Tis11 protein, which activates transcription and also has a role in mRNA degradation; may function with Tis11p in iron homeostasis
   491; Highly-acidic cytoplasmic RWD domain-containing protein of unknown function, sensitive to proteolysis, N-terminal region has high content of acidic amino acid residues, putative IUP (intrinsically unstructured protein)
   492; Protein containing an N-terminal epsin-like domain involved in clathrin recruitment and traffic between the Golgi and endosomes; associates with the clathrin adaptor Gga2p, clathrin adaptor complex AP-1, and clathrin
   493; Cytoplasmic peptidyl-prolyl cis-trans isomerase (cyclophilin), catalyzes the cis-trans isomerization of peptide bonds N-terminal to proline residues; binds the drug cyclosporin A
   494; Aspartic beta semi-aldehyde dehydrogenase, catalyzes the second step in the common pathway for methionine and threonine biosynthesis; expression regulated by Gcn4p and the general control of amino acid synthesis
   495; Nuclear pore-associated protein, forms a complex with Thp1p that is involved in transcription and in mRNA export from the nucleus
   496; Component of the SPS plasma membrane amino acid sensor system (Ssy1p-Ptr3p-Ssy5p), which senses external amino acid concentration and transmits intracellular signals that result in regulation of expression of amino acid permease genes
   497; interacts with PP2C
   498; Protein involved in the HOG (high osmolarity glycerol) pathway, negatively regulates Hog1p by recruitment of phosphatase Ptc1p the Pbs2p-Hog1p complex, found in the nucleus and cytoplasm, contains an SH3 domain that binds Pbs2p
   499; Non-essential protein involved in pre-mRNA splicing, component of a complex containing Cef1p; has similarity to S. pombe Cwf15p
   500; Sm-like protein involved in docking and fusion of exocytic vesicles through binding to assembled SNARE complexes at the membrane; localization to sites of secretion (bud neck and bud tip) is dependent on SNARE function
   501; Subunit of a tRNA methyltransferase complex composed of Trm8p and Trm82p that catalyzes 7-methylguanosine modification of tRNA
   502; Subunit (145 kDa) of TFIID and SAGA complexes, involved in RNA polymerase II transcription initiation and in chromatin modification
   503; Essential Hsp90p co-chaperone; necessary for passage through the START phase of the cell cycle
   504; Protein that binds Sin3p in a two-hybrid assay
   505; Guanine nucleotide exchange factor (GEF) for ADP ribosylation factors involved in proliferation of the Golgi, intra-Golgi transport and ER-to-Golgi transport; found in the cytoplasm and on Golgi-associated coated vesicles
   506; Small cytosolic stress-induced chaperone that forms barrel-shaped oligomers and suppresses the aggregation of non-native proteins; oligomer dissociation is not required for function; involved in cytoskeleton reorganization after heat shock
   507; Translation termination factor eRF3; altered protein conformation creates the [PSI(+)] prion, a dominant cytoplasmically inherited protein aggregate that alters translational fidelity and creates a nonsense suppressor phenotype
   508; Protein involved in regulation of arginine-responsive and Mcm1p-dependent genes;

[0202] has a dual-specificity inositol polyphosphate kinase activity required for regulation of phosphate- and nitrogen-responsive genes

509; Chromatin associated high mobility group (HMG) family member involved in genome maintenance; rDNA-binding component of the Pol I transcription system; associates with a 5′-3′ DNA helicase and Fpr1p, a prolyl isomerase
510; Ubiquitin-conjugating enzyme that mediates selective degradation of short-lived and abnormal proteins; plays a role in vesicle biogenesis and ER-associated protein degradation (ERAD); component of the cellular stress response
511; Putative protein kinase and subunit of cohesin loading factor (Scc2p-Scc4p), a complex required for the loading of cohesin complexes onto chromosomes; involved in establishing sister chromatid cohesion during DSB repair via histone H2AX512; Putative membrane protein of unknown function involved in N2+ homeostasis; mutants display actin and general growth defects, heterogeneous cell cycle arrests, and pleiotropic defects in cell cycle progression and organelle distribution 513; Hypothetical protein
514; Hypothetical protein
515; Hydrophilic protein involved in vesicle trafficking between the ER and Golgi; SM (Sec1/Munc-18) family protein that binds the tSNARE Sed5p and stimulates its assembly into a trans-SNARE membrane-protein complex
516; Essential protein involved in transcription regulation; component of chromatin remodeling complexes; required for assembly and function of the INO80 complex; member of the RUVB-like protein family
517; Subunit of the nuclear pore complex (NPC) that localizes exclusively to the cytoplasmic side; involved in RNA export, most likely at a terminal step; interacts with Gle1p
518; DEAD-box protein required for efficient splicing of mitochondrial Group I and II introns; presumed RNA helicase due to DEAD-box motif
519; Mitochondrial translational activator of the COB rRNA; interacts with translating ribosomes, acts on the COB mRNA 5′-untranslated leader
520; Component of Dam1p complex, important for spindle and kinetochore integrity; localized to nuclear side of spindle pole body and along mitotic spindle
521; Protein of unknown function, contains a putative RNA recognition motif, deletion results in short telomeres; similar to Est1p, may be partially redundant with Est1p for telomere maintenance
522; Key transcriptional regulator of early meiotic genes, binds URS1 upstream regulatory sequence, couples metabolic responses to nutritional cues with initiation and progression of meiosis, forms complex with Ime1p, and also with Sin3p-Rpd3p
523; Phosphatidylinositol-4-phosphate 5-kinase, involved in actin cytoskeleton organization and cell morphogenesis; multicopy suppressor of stt4 mutation
524; Protein of unknown function; green fluorescent protein (GFP)-fusion protein localizes to the cell periphery
525; Catalytic epsilon subunit of the translation initiation factor eIF2B, the guanine-nucleotide exchange factor for eIF2; activity subsequently regulated by phosphorylated eIF2; first identified as a negative regulator of GCN4 expression
526; Alpha subunit of chaperonin-containing T-complex, which mediates protein folding in the cytosol; involved in maintenance of actin cytoskeleton; homolog to Drosophila melanogaster and mouse tailless complex polypeptide
527; Sterol regulatory element binding protein, induces transcription of sterol transport and biosynthetic genes; involved in the anaerobic induction of DAN/TIR mannoproteins and seripauperins; binucleate zinc cluster protein; Ecm22p homolog528; Co-chaperone that binds to Hsp82p and activates its ATPase activity; similar to Hch1p; expression is regulated by stresses such as heat shock
529; Glucosidase II beta subunit, forms a complex with alpha subunit Rot2p, involved in removal of two glucose residues from N-linked glycans during glycoprotein biogenesis in the ER
530; Protein of unknown function; green fluorescent protein (GFP)-fusion protein localizes to the cytoplasm in a punctate pattern
531; One of two nearly identical (see HTB2) histone H₂B subtypes required for chromatin assembly and chromosome function; Rad6p-Bre1p-Lge1p mediated ubiquitination regulates transcriptional activation, meiotic DSB formation and H3 methylation
532; One of two nearly identical (see also HTA2) histone H2A subtypes; core histone required for chromatin assembly and chromosome function; DNA damage-dependent phosphorylation by Mec1p facilitates DNA repair; acetylated by Nat4p
533; Adenylate kinase, required for purine metabolism; localized to the cytoplasm and the mitochondria; lacks cleavable signal sequence
534; mRNA 3′ end processing factor, essential component of cleavage and polyadenylation factor IA (CF IA), involved in pre-mRNA 3′ end processing and in transcription termination; binds C-terminal domain of largest subunit of RNA pol II (Rpo21p)
535; Phospholipid-binding protein that interacts with both Ypt7p and Vps33p, may partially counteract the action of Vps33p and vice versa, localizes to the rim of the vacuole as cells approach stationary phase
536; Mitochondrial inner membrane protein, required for proteolytic processing of Cox2p and its assembly into cytochrome c oxidase
537; Protein of unknown function; has similarity to mammalian reticulon proteins; member of the RTNLA (reticulon-like A) subfamily
538; Homoaconitase, catalyzes the conversion of homocitrate to homoisocitrate, which is a step in the lysine biosynthesis pathway
539; Riboflavin kinase, phosphorylates riboflavin to form riboflavin monophosphate (FMN), which is a necessary cofactor for many enzymes; localizes to microsomes and to the mitochondrial inner membrane
540; Mitochondrial ribosomal protein of the large subunit
541; Putative amidase
542; RNA helicase in the DEAD-box family, involved in RNA isomerization at the 5′ splice site
543; Peroxisomal membrane signal receptor for C-terminal tripeptide signal sequence (PTS1) of peroxisomal matrix proteins, required for peroxisomal matrix protein import, tetratricopeptide repeat protein, also involved in PTS1-independent import
544; One of 10 subunits of the transport protein particle (TRAPP) complex of the cis-Golgi which mediates vesicle docking and fusion; involved in endoplasmic reticulum (ER) to Golgi membrane traffic; human homolog is TRAPPC4
545; Hypothetical protein
546; Essential protein of unknown function; exhibits variable expression during colony morphogenesis; overexpression permits survival without protein phosphatase 2A, inhibits growth, and induces a filamentous phenotype
547; Zinc-finger DNA-binding protein, involved in regulating expression of the methionine biosynthetic genes, similar to Met31p
548; Cytosolic protein required for sporulation; also required for the ubiquitination of the gluconeogenetic enzyme fructose-1,6-bisphosphatase, which is degraded rapidly after the switch from gluconeogenesis to glycolysis
549; Oligomeric mitochondrial matrix chaperone that cooperates with Ssc1p in mitochondrial thermotolerance after heat shock; prevents the aggregation of misfolded matrix proteins; component of the mitochondrial proteolysis system
550; Subunit of the anaphase-promoting complex, which is an E3 ubiquitin ligase that regulates the metaphase-anaphase transition and exit from mitosis; required for activation of the daughter-specific gene expression and spore wall maturation
551; Exo-1,3-beta-glucanase, involved in cell wall beta-glucan assembly; may be anchored to the plasma membrane via a glycosylphosphatidylinositol (GPI) anchor
552; Palmitoyl transferase involved in protein palmitoylation; acts as a negative regulator of pheromone response pathway; required for endocytosis of pheromone receptors; involved in cell shape control; contains ankyrin repeats
553; RING finger peroxisomal membrane peroxin required for peroxisomal matrix protein import, interacts with Pex12p, links ubiquitin-conjugating Pex4p to protein import machinery; mutations in human homolog cause a variety of peroxisomal disorders
554; Hypothetical protein
555; Mitochondrial tryptophanyl-tRNA synthetase
556; Protein of unknown function, ORF exhibits genomic organization compatible with a translational readthrough-dependent mode of expression
557; Small plasma membrane protein related to a family of plant polypeptides that are overexpressed under high salt concentration or low temperature, not essential for viability, deletion causes hyperpolarization of the plasma membrane potential
558; Negative regulator of the glucose-sensing signal transduction pathway, required for repression of transcription by Rgt1p; interacts with Rgt1p and the Snf3p and Rgt2p glucose sensors; phosphorylated by Yck1p, triggering Mth1p degradation
559; Ribonuclease H2 subunit, required for RNase H2 activity
560; Transverse filament protein of the synaptonemal complex; required for normal levels of meiotic recombination and pairing between homologous chromosome during meiosis; potential Cdc28p substrate
561; inositol monophosphatase
562; Essential protein of unknown function; interacts with Nse4p, which is a component of the Smc5/6 DNA repair complex
563; Protein that interacts with exonuclease Rat1p and Rai1p and plays a role in transcription termination by RNA polymerase II, has an RPR domain (carboxy-terminal domain interacting domain); also involved in regulation of Ty1 transposition 564; Signal recognition particle (SRP) receptor—alpha subunit; contain GTPase domains; involved in SRP-dependent protein targeting; interacts with SRP102p
565; Subunit of a possibly tetrameric trichostatin A-sensitive class II histone deacetylase complex that contains an Hda1p homodimer and an Hda2p-Hda3p heterodimer; required for the activity of the complex; has similarity to Hda3p; Ploidy-related
566; Protein involved in homologous recombination in mitochondria and in transcription regulation in nucleus; binds to activation domains of acidic activators; required for recombination-dependent mtDNA partitioning
567; Subunit 5 of the stator stalk of mitochondrial F1F0 ATP synthase, which is a large, evolutionarily conserved enzyme complex required for ATP synthesis; homologous to bovine subunit OSCP (oligomycin sensitivity-conferring protein)
568; Essential protein possibly involved in secretion; multicopy suppressor of sensitivity to Brefeldin A
569; RNA-binding subunit of the mRNA cleavage and polyadenylation factor; involved in poly(A) site recognition and required for both pre-mRNA cleavage and polyadenylation, 51% sequence similarity with mammalian AAUAA-binding subunit of CPSF
570; ER membrane protein involved in a late step of glycosylphosphatidylinositol (GPI) anchor assembly; involved in the addition of phosphoethanolamine to the multiply mannosylated GPI intermediate; human PIG-Fp is a functional homolog
571; One of 15 subunits of the ‘Remodel the Structure of Chromatin’ (RSC) complex; essential gene required for regulation of ribosomal protein genes and the cell wall/stress response; highly similar to Rsc30p
572; Peptidyl-prolyl cis-trans isomerase (cyclophilin) of the endoplasmic reticulum, catalyzes the cis-trans isomerization of peptide bonds N-terminal to proline residues; transcriptionally induced in response to unfolded proteins in the ER
573; Hypothetical protein
574; RING-type ubiquitin ligase of the endosomal and vacuolar membranes, binds phosphatidylinositol(3)-phosphate; contains a FYVE finger domain
575; Hypothetical protein
576; Protein integral to the mitochondrial membrane; has a conserved methyltransferase motif; multicopy suppressor of respiratory defects caused by OXA1 mutations
577; Hypothetical protein
578; Auxilin-like protein involved in vesicular transport; clathrin-binding protein required for uncoating of clathrin-coated vesicles
579; Essential protein, component of the DASH complex; involved in spindle integrity and kinetochore function; interacts with Duo1p and Dam1p; localizes to intranuclear spindles and kinetochore
580; Subunit e of mitochondrial F1F0-ATPase, which is a large, evolutionarily conserved enzyme complex required for ATP synthesis; essential for the dimeric state of ATP synthase
581; Evolutionarily conserved kinetochore protein that is part of multiple protein complexes, including the SCF ubiquitin ligase complex, the CBF3 complex that binds centromeric DNA, and the RAVE complex that regulates assembly of the V-ATPase
582; ER membrane glycoprotein subunit of the glycosylphosphatidylinositol transamidase complex that adds glycosylphosphatidylinositol (GPI) anchors to newly synthesized proteins; human PIG-K protein is a functional homolog
583; Karyopherin involved in nuclear import and export; shown to be responsible for nuclear import of replication protein A and for export of several proteins including Swi6p, Far1p, and Pho4p; cargo dissociation involves binding to RanGTP
584; Hypothetical protein
585; Mitochondrial ribosomal protein of the small subunit
586; Hypothetical protein
587; Protein required for cell viability
588; Cytoplasmic arginyl-tRNA synthetase
589; Low affinity glucose transporter of the major facilitator superfamily, expression is induced in low or high glucose conditions
590; Protein with a potential role ii cell survival pathways, required for the diauxic growth shift; expression in mammalian cells increases survival under conditions inducing apoptosis
591; Mitochondrial ribosomal protein of the small subunit; MRP1 exhibits genetic interactions with PET122, encoding a COX3-specific translational activator, and with PET123, encoding a small subunit mitochondrial ribosomal protein
592; Protein of unknown function; green fluorescent protein (GFP)-fusion protein localizes to the cell periphery and bud neck; potential Cdc28p substrate
593; Putative GPI-anchored aspartic protease, located in the cytoplasm and endoplasmic reticulum
594; Hypothetical protein.
595; Cytoplasmic thioredoxin reductase, key regulatory enzyme that determines the redox state of the thioredoxin system, which acts as a disulfide reductase system and protects cells against both oxidative and reductive stress
596; Protein of unknown function; green fluorescent protein (GFP)-fusion protein localizes to the cytoplasm in a punctate pattern
597; Protein involved in mating-type locus silencing, interacts with Sir2p; probably functions to recruit or stabilize Sir proteins
598; Pre-mRNA splicing factor, important for catalytic step II of pre-mRNA splicing and plays a role in cell cycle progression; required for DNA synthesis during mitosis and meiosis; has WD repeats
599; Nucleolar protein involved in pre-rRNA processing; depletion causes severely decreased 18S rRNA levels
600; 2-methylbutyraldehyde reductase, may be involved in isoleucine catabolism
601; Protein required for DNA repair; component of the Mrel1 complex, which is involved in double strand breaks, meiotic recombination, telomere maintenance, and checkpoint signaling
602; Non-essential protein of unknown function involved in vacuolar protein sorting; belongs to a family of cytosolic Golgi-associated proteins suggesting that it may play a role in secretion; also detected in the nucleus
603; N-myristoylated calcium-binding protein that may have a role in intracellular signaling through its regulation of the phosphatidylinositol 4-kinase Pik1p; member of the recoverin/frequenin branch of the EF-hand superfamily
604; Hypothetical protein
605; Oxidoreductase of the mitochondrial inner membrane, involved in cytoplasmic and mitochondrial iron homeostasis and required for activity of Fe—S cluster-containing enzymes; one of the few mitochondrial proteins essential for viability
606; Subunit f of the F0 sector of mitochondrial F1F0 ATP synthase, which is a large, evolutionarily conserved enzyme complex required for ATP synthesis
607; GTPase-activating protein for the polarity-establishment protein Cdc42p; implicated in control of septin organization, pheromone response, and haploid invasive growth
608; Hypothetical protein identified by homology. See FEBS Letters [2000] 487:31-36.
609; Phenylpyruvate decarboxylase, catalyzes decarboxylation of phenylpyruvate to phenylacetaldehyde, which is the first specific step in the Ehrlich pathway
610; Ribosomal protein P2 beta, a component of the ribosomal stalk, which is involved in the interaction between translational elongation factors and the ribosome; regulates the accumulation of P1 (Rpp1Ap and Rpp1Bp) in the cytoplasm
611; Plasma membrane protein, regulation pattern suggests a possible role in export of ammonia from the cell; member of the TC 9.B.33 YaaH family of putative transporters
612; Elongation factor 2 (EF-2), also encoded by EFT1; catalyzes ribosomal translocation during protein synthesis; contains diphthamide, the unique posttranslationally modified histidine residue specifically ADP-ribosylated by diphtheria toxin
613; Helix-hairpin-helix protein, involved in DNA repair and replication fork stability; functions as an endonuclease in complex with Mms4p; interacts with Rad54p
614; Subunit of the SAGA and SAGA-like transcriptional regulatory complexes, interacts with Spt15p to activate transcription of some RNA polymerase II-dependent genes, also functions to inhibit transcription at some promoters
615; One of six ATPases of the 19S regulatory particle of the 26S proteasome involved in the degradation of ubiquitinated substrates; substrate of N-acetyltransferase B
616; Nuclear transport factor (karyopherin) involved in protein transport between the cytoplasm and nucleoplasm; similar to Nmd5p, Cse1p, Lph2p, and the human cellular apoptosis susceptibility protein, CAS1
617; Nucleolar protein, component of the small subunit (SSU) processome containing the U3 snoRNA that is involved in processing of pre-18S rRNA
618; Sporulation-specific enzyme required for spore wall maturation, involved in the production of a soluble LL-dityrosine-containing precursor of the spore wall; transcripts accumulate at the time of prospore enclosure
619; RNA polymerase II subunit B16; forms two subunit dissociable complex with Rpb4p
620; Phosphoribosyl-glycinamide transformylase, catalyzes a step in the ‘de novo’ purine nucleotide biosynthetic pathway
621; Protein required for cell viability
622; Predicted membrane protein required for the retention of lumenal endoplasmic reticulum proteins; mutants secrete the endogenous ER protein, BiP (Kar2p)
623; Hypothetical protein
624; Protein component of the large (60S) ribosomal subunit, nearly identical to Rpl12Ap; rpl12a rpl12b double mutant exhibits slow growth and slow translation; has similarity to E. coli L11 and rat L12 ribosomal proteins
625; Sorting nexin, involved in the retrieval of late-Golgi SNAREs from the post-Golgi endosome to the trans-Golgi network; forms a complex with Snx4p and Atg20p626; Hypothetical protein
627; Subunit of the core complex of translation initiation factor 3(eIF3), which is essential for translation
628; Carboxylmethyl transferase, methylates the C terminus of the protein phosphatase
2A catalytic subunit (Pph21p or Pph22p), which is important for complex formation with regulatory subunits
629; Subunit of GPI-GlcNAc transferase involved in synthesis of N-acetylglucosaminyl phosphatidylinositol (GlcNAc-PI), which is the first intermediate in glycosylphosphatidylinositol (GPI) anchor synthesis, shares similarity with mammalian PIG-P
630; Protein involved in rDNA silencing; positively charged coiled-coil protein with limited similarity to myosin
631; Apparent pseudogene, not transcribed or translated under normal conditions; encodes a protein with similarity to adenine phosphoribosyltransferase, but artificially expressed protein exhibits no enzymatic activity
632; Non-essential protein apparently involved in meiosis, GFP fusion protein is present in discrete clusters in the nucleus throughout mitosis; may be involved in maintaining chromatin structure
633; One of two homeobox transcriptional repressors (see also Yox1p), that bind to Mcm1p and to early cell cycle box (ECB) elements of cell cycle regulated genes, thereby restricting ECB-mediated transcription to the M/G1 interval
634; Vacuolar endopolyphosphatase with a role in phosphate metabolism; functions as a homodimer
635; Endosomal Na+/H+ exchanger, required for intracellular sequestration of Na+; required for osmotolerance to acute hypertonic shock
636; E3 ubiquitin ligase of the hect-domain class; has a role in mRNA export from the nucleus and may regulate transcriptional coactivators
637; Mitochondrial ribosomal protein of the large subunit
638; Essential t-SNARE that forms a complex with Tlg2p and Vti1p and mediates fusion of endosome-derived vesicles with the late Golgi; binds the docking complex VFT (Vps fifty-three) through interaction with Vps51p
639; Protein of unknown function; outer membrane component of the mitochondrial fusion machinery; Ugo1p bind directly to Fzo1p and Mgm1p and thereby link these two GTPases during mitochondrial fusion
640; Splicing factor, component of the U4/U6-U5 snRNP complex
641; AMP-activated serine/threonine protein kinase found in a complex containing Snf4p and members of the Sip1p/Sip2p/Gal83p family; required for transcription of glucose-repressed genes, thermotolerance, sporulation, and peroxisome biogenesis
642; Alpha-1,2-mannosyltransferase of the Golgi involved in protein mannosylation
643; Component of the GARP (Golgi-associated retrograde protein) complex, Vps51p-Vps52p-Vps53p-Vps54p, which is required for the recycling of proteins from endosomes to the late Golgi; involved in localization of actin and chitin
644; Subunit of the GINS complex (Sld5p, Psf1p, Psf2p, Psf3p), which is localized to DNA replication origins and implicated in assembly of the DNA replication machinery
645; Serine/threonine protein kinase involved in sphingolipid-mediated signaling pathway that controls endocytosis; activates Ypk1p and Ykr2p, components of signaling cascade required for maintenance of cell wall integrity; redundant with Pkh2p
646; Mitochondrial ribosomal protein of the small subunit; genetic interactions suggest a possible role in promoting translation initiation
647; Pumilio-homology domain protein that binds ASH1 mRNA at PUF consensus sequences in the 3′ UTR and represses its translation, resulting in proper asymmetric localization of ASH1 mRNA
648; Myo-inositol transporter with strong similarity to the minor myo-inositol transporter Itr2p, member of the sugar transporter superfamily; expression is repressed by inositol and choline via Opi1p and derepressed via Ino2p and Ino4p
649; Essential protein required for the DNA integrity checkpoint pathways; interacts physically with Mec1p; putative homolog of S. pombe Rad26 and human ATRIP
650; Protein required for partitioning of the 2-micron plasmid
651; Asn and gin rich protein of unknown function; high-copy suppressor of POL1 (DNA polymerase alpha) and partial suppressor of CDC2 (polymerase delta) and CDC6 (pre-RC loading factor) mutations; overexpression results in growth inhibition
652; Protein kinase involved in bud growth and assembly of the septin ring, proposed to have kinase-dependent and kinase-independent activities; undergoes autophosphorylation; similar to Kcc4p and Hsl1p
653; High-affinity glutamine permease, also transports Leu, Ser, Thr, Cys, Met and Asn; expression is fully dependent on Grr1p and modulated by the Ssy1p-Ptr3p-Ssy5p (SPS) sensor of extracellular amino acids
654; Ubiquitin-like protein of the SUMO family, conjugated to lysine residues of target proteins; regulates chromatid cohesion, chromosome segregation, APC-mediated proteolysis, DNA replication and septin ring dynamics
655; Hypothetical protein
656; RNA binding protein that associates with polysomes; proposed to be involved in regulating mRNA translation; involved in the copper-dependent mineralization of copper sulfide complexes on cell surface in cells cultured in copper salts
657; Non-essential protein of unknown function required for transcriptional induction of the early meiotic-specific transcription factor IME1, also required for sporulation
658; Protein disulfide isomerase of the endoplasmic reticulum lumen, function overlaps with that of Pdi1p; may interact with nascent polypeptides in the ER
659; Membrane-bound peptidyl-prolyl cis-trans isomerase (PPIase), binds to the drugs FK506 and rapamycin; expression pattern suggests possible involvement in ER protein trafficking
660; ADP-ribosylation factor (ARF) GTPase activating protein (GAP) effector, involved in the secretory and endocytic pathways; contains C2C₂H₂ cysteine/histidine motif

### 661; ORF, Uncharacterized

[0203] 662; Protein of unknown function, has similarity to Pmp3p, which is involved in cation transport; green fluorescent protein (GFP)-fusion protein localizes to the cytoplasm in a punctate pattern
663; Protein involved in transcription; interacts with RNA polymerase II subunits Rpb2p, Rpb3, and Rpb11p; has similarity to human RPAP1
664; Subunit 7 of the ubiquinol cytochrome-c reductase complex, which is a component of the mitochondrial inner membrane electron transport chain; oriented facing the mitochondrial matrix; N-terminus appears to play a role in complex assembly
665; Possible chaperone and cysteine protease with similarity to E. coli Hsp31 and S. cerevisiae Hsp32p, Hsp33p, and Sno4p; member of the DJ-1/ThiJ/PfpI superfamily, which includes human DJ-1 involved in Parkinson's disease; exists as a dimer
666; D-lactate dehydrogenase, part of the retrograde regulon which consists of genes whose expression is stimulated by damage to mitochondria and reduced in cells grown with glutamate as the sole nitrogen source, located in the cytoplasm
667; Ferrioxamine B transporter, member of the ARN family of transporters that specifically recognize siderophore-iron chelates; transcription is induced during iron deprivation and diauxic shift; potentially phosphorylated by Cdc28p
668; Putative transporter, member of a family of seven S. cerevisiae genes (AVT1-7) related to vesicular GABA-glycine transporters
669; Vacuolar proteinase B (yscB), a serine protease of the subtilisin family; involved in protein degradation in the vacuole and required for full protein degradation during sporulation
670; Subunit of the mitochondrial inner membrane peptidase, which is required for maturation of mitochondrial proteins of the intermembrane space; Som1p facilitates cleavage of a subset of substrates
671; Hypothetical protein
672; Subunit of the Hat1p-Hat2p histone acetyltransferase complex; required for high affinity binding of the complex to free histone H4, thereby enhancing Hat1p activity; similar to human RbAp46 and 48; has a role in telomeric silencing
673; Protein component of the large (60S) ribosomal subunit, nearly identical to Rpl12 Bp; rpl12a rpl12b double mutant exhibits slow growth and slow translation; has similarity to E. coli L11 and rat L12 ribosomal proteins
674; Subunit D of the eight-subunit V1 peripheral membrane domain of the vacuolar H+-ATPase (V-ATPase), an electrogenic proton pump found throughout the endomembrane system; plays a role in the coupling of proton transport and ATP hydrolysis 675; Mitochondrial ribosomal protein of the large subunit, has similarity to E. coli L2 ribosomal protein; fat21 mutant allele causes inability to utilize oleate and may interfere with activity of the Adr1p transcription factor
676; Hypothetical protein
677; Threonine aldolase, catalyzes the cleavage of L-allo-threonine and L-threonine to glycine; involved in glycine biosynthesis
678; Hypothetical protein
679; Cytochrome c isoform 2, expressed under hypoxic conditions; electron carrier of the mitochondrial intermembrane space that transfers electrons from ubiquinone-cytochrome c oxidoreductase to cytochrome c oxidase during cellular respiration
680; Protein with ubiquitin-like N terminus, recognizes and binds damaged DNA (with Rad4p) during nucleotide excision repair, regulates Rad4p levels, subunit of Nuclear Excision Repair Factor 2 (NEF2); homolog of human HR23A and HR23B proteins
681; Subunit of the alpha-1,6 mannosyltransferase complex; type II membrane protein; has a role in retention of glycosyltransferases in the Golgi; involved in osmotic sensitivity and resistance to aminonitrophenyl propanediol
682; Translation initiation factor eIF-5A, promotes formation of the first peptide bond; similar to and functionally redundant with Anb1p; undergoes an essential hypusination modification; expressed under aerobic conditions
683; Protein involved in DNA replication; component of the Mcm2-7 hexameric complex that binds chromatin as a part of the pre-replicative complex
684; P-type ATPase, ion transporter of the ER membrane involved in ER function and Ca2+ homeostasis; required for regulating Hmg2p degradation; confers sensitivity to a killer toxin (SMKT) produced by Pichia farinosa KK1
685; Protein involved in bud-site selection; diploid mutants display a random budding pattern instead of the wild-type bipolar pattern; has similarity to pyridoxal kinases
686; Proteolipid subunit of the vacuolar H(+)-ATPase V0 sector (subunit c; dicyclohexylcarbodiimide binding subunit); required for vacuolar acidification and important for copper and iron metal ion homeostasis
687; RNA binding protein, part of U3 snoRNP involved in rRNA processing, part of U4/U6-U5 tri-snRNP involved in mRNA splicing, similar to human 15.5K protein
688; Ubiquinol-cytochrome-c reductase, a Rieske iron-sulfur protein of the mitochondrial cytochrome bc1 complex; transfers electrons from ubiquinol to cytochrome c1 during respiration
689; Orotidine-5′-phosphate (OMP) decarboxylase, catalyzes the sixth enzymatic step in the de novo biosynthesis of pyrimidines, converting OMP into uridine monophosphate (UMP); converts 5-FOA into 5-fluorouracil, a toxic compound
690; Mitochondrial intermembrane space protein, forms a complex with Mrs11p/Tim10p that mediates import and insertion of a subset of polytopic inner membrane proteins; may prevent aggregation of incoming proteins in a chaperone-like manner
691; Hypothetical protein with low sequence identity to Pdc1p
692; SUMO ligase involved in chromosomal organization and DNA repair; forms a complex with Smc5p, Rhc18p, and Nse1p; mutants are sensitive to methyl methanesulfonate and show increased spontaneous mutation and mitotic recombination
693; Esa1p-associated factor, subunit of the NuA4 acetyltransferase complex
694; Proteolipid associated with plasma membrane H(+)-ATPase (Pma1p); regulates plasma membrane H(+)-ATPase activity; nearly identical to PMP1
695; Protein of unknown function with a possible role in glutathione metabolism, as suggested by computational analysis of large-scale protein-protein interaction data; GFP-fusion protein localizes to the nuclear periphery
696; Non-essential conserved protein of unknown function, plays a role in mRNA decapping by specifically affecting the function of the decapping enzyme Dcp1p; localizes to cytoplasmic mRNA processing bodies
697; Phosphorylated vacuolar membrane protein that interacts with Atg13p, required for the cytoplasm-to-vacuole targeting (Cvt) pathway; interacts with Nvj1p to form nucleus-vacuole junctions
698; Glycogen branching enzyme, involved in glycogen accumulation; green fluorescent protein (GFP)-fusion protein localizes to the cytoplasm in a punctate pattern
699; Protein with a potential role in vacuolar function, as suggested by its ability to bind Vac8p; green fluorescent protein (GFP)-fusion protein localizes to the cytoplasm in a punctate pattern
700; Uridine diphosphate-N-acetylglucosamine (UDP-GlcNAc) transporter required for cell wall chitin synthesis; localized to the ER
701; Beta subunit of the oligosaccharyl transferase (OST) glycoprotein complex; required for N-linked glycosylation of proteins in the endoplasmic reticulum
702; Putative protein of unknown function; green fluorescent protein (GFP)-fusion localizes to the ER; YEL001C is non-essential
703; Nuclear envelope protein, interacts with GDP-bound Gsp1p and with proteins of the nuclear pore to transport Gsp1p into the nucleus where it is an essential player in nucleocytoplasmic transport
704; Cell wall mannoprotein of the Srp1p/Tip1p family of serine-alanine-rich proteins; expression is downregulated at acidic pH and induced by cold shock and anaerobiosis; abundance is increased in cells cultured without shaking
705; 20S proteasome beta-type subunit; localizes to the nucleus throughout the cell cycle
706; Protoporphyrinogen oxidase, a mitochondrial enzyme that catalyzes the seventh step in the heme biosynthetic pathway, converting protoporphyrinogen IX to protoporphyrin IX
707; Long chain fatty acyl-CoA synthetase; accepts a wider range of acyl chain lengths than Faa1p, preferring C9:0-C13:0; involved in the activation of endogenous pools of fatty acids
708; Microtubule-binding protein that together with Kar9p makes up the cortical microtubule capture site and delays the exit from mitosis when the spindle is oriented abnormally
709; Component, with Yta12p, of the mitochondrial inner membrane m-AAA protease that mediates degradation of misfolded or unassembled proteins and is also required for correct assembly of mitochondrial enzyme complexes
710; Component of the evolutionarily conserved kinetochore-associated Ndc80 complex (Ndc80p-Nuf2p-Spc24p-Spc25p); involved in chromosome segregation, spindle checkpoint activity and kinetochore clustering
711; Ssh1p-Sss1p-Sbh2p complex component, involved in protein translocation into the endoplasmic reticulum; homologous to Sbh1p
712; Nucleotide binding alpha subunit of the heterotrimeric G protein that interacts with the receptor Gpr1p, has signaling role in response to nutrients; green fluorescent protein (GFP)-fusion protein localizes to the cell periphery
713; Essential, non-ATPase regulatory subunit of the 26S proteasome lid, similar to the p58 subunit of the human 26S proteasome; temperature-sensitive alleles cause metaphase arrest, suggesting a role for the proteasome in cell cycle control 714; Subunit of the RNA polymerase II mediator complex; associates with core polymerase subunits to form the RNA polymerase II holoenzyme; essential for transcriptional regulation
715; Delta 1-pyrroline-5-carboxylate reductase, catalyzes the last step in proline biosynthesis
716; Carnitine acetyltransferase; has similarity to Yat1p, which is a carnitine acetyltransferase associated with the mitochondrial outer membrane
717; Gamma subunit of the translation initiation factor eIF2, involved in the identification of the start codon; binds GTP when forming the ternary complex with GTP and tRNAi-Met

[0204] 718; Phosphatidylserine synthase, functions in phospholipid biosynthesis; catalyzes the reaction CDP-diaclyglycerol+L-serine=CMP+L-1-phosphatidylserine, transcriptionally repressed by myo-inositol and choline

719; One of three possible beta-subunits of the Snf1 kinase complex, allows nuclear localization of the Snf1 kinase complex in the presence of a nonfermentable carbon source; contains glycogen-binding domain
720; Core Sm protein Sm B; part of heteroheptameric complex (with Smd1p, Smd2p, Smd3p, Sme1p, Smx3p, and Smx2p) that is part of the spliceosomal U1, U2, U4, and U5 snRNPs; homolog of human Sm B and Sm B′
721; GTPase of the Ypt/Rab family, very similar to Ypt32p; involved in the exocytic pathway; mediates intra-Golgi traffic or the budding of post-Golgi vesicles from the trans-Golgi
722; Cytoplasmic protein of unknown function, transcription is induced under conditions of zinc deficiency
723; Hypothetical protein
724; ATPase of the ATP-binding cassette (ABC) family involved in 40S and 60S ribosome biogenesis, has similarity to Gcn20p; shuttles from nucleus to cytoplasm, physically interacts with Tif6p, Lsg1p
725; Protein of unknown function, expression is induced by low phosphate levels and by inactivation of Pho85p
726; Essential protein of unknown function; heterozygous mutant shows haploinsufficiency in K1 killer toxin resistance
727; Transcriptional activator of genes regulated by nitrogen catabolite repression (NCR), localization and activity regulated by quality of nitrogen source
728; Protein of unknown function, has similarity to endonuclease Rth1p; potentially phosphorylated by Cdc28p
729; Peptide methionine sulfoxide reductase, reverses the oxidation of methionine residues; involved in oxidative damage repair, providing resistance to oxidative stress and regulation of lifespan
730; S-adenosyl-L-homocysteine hydrolase, catabolizes S-adenosyl-L-homocysteine which is formed after donation of the activated methyl group of S-adenosyl-L-methionine (AdoMet) to an acceptor
731; Endoplasmic reticulum membrane protein, may facilitate protein-protein interactions between the Erg26p dehydrogenase and the Erg27p 3-ketoreductase and/or tether these enzymes to the ER, also interacts with Erg6p
732; Meiosis-specific protein of unknown function, required for spore wall formation during sporulation; dispensible for both nuclear divisions during meiosis
733; Putative ATPase of the AAA family, interacts with the Sin1p transcriptional repressor in the two-hybrid system
734; Nuclear type II J heat shock protein of the E. coli dnaJ family, contains a leucine zipper-like motif, binds to non-native substrates for presentation to Ssa3p, may function during protein translocation, assembly and disassembly
735; Protein required for mitochondrial iron-sulfur cluster biosynthesis
736; Hypothetical protein
737; Mitochondrial phosphate carrier, imports inorganic phosphate into mitochondria; functionally redundant with Mir1p but less abundant than Mir1p under normal conditions; expression is induced at high temperature
738; Hypothetical protein
739; ATP phosphoribosyltransferase, a hexameric enzyme, catalyzes the first step in histidine biosynthesis; mutations cause histidine auxotrophy and sensitivity to Cu, Co, and Ni salts; transcription is regulated by general amino acid control
740; Member of the p14.5 protein family with similarity to Mmf1p, functionally complements Mmf1p function when targeted to mitochondria; heat shock inducible; high-dosage growth inhibitor; forms a homotrimer in vitro
741; Pho85p cyclin of the Pho80p subfamily; forms the major Glc8p kinase together with Pcl7p and Pho85p; involved in the control of glycogen storage by Pho85p; stabilized by Elongin C binding
742; Putative purine-cytosine permease, very similar to Fcy2p but cannot substitute for its function
743; One of two redundant DL-glycerol-3-phosphatases (RHR2/GPP1 encodes the other) involved in glycerol biosynthesis; induced in response to hyperosmotic stress and oxidative stress, and during the diauxic transition
744; Protein of unknown function; overproduction suppresses the transcriptional defect caused by an hpr1 mutation
745; Isocitrate lyase, catalyzes the formation of succinate and glyoxylate from isocitrate, a key reaction of the glyoxylate cycle; expression of ICL1 is induced by growth on ethanol and repressed by growth on glucose
746; Hypothetical protein
747; Ribonucleotide-diphosphate reductase (RNR), large subunit; the RNR complex catalyzes the rate-limiting step in dNTP synthesis and is regulated by DNA replication and DNA damage checkpoint pathways via localization of the small subunits
748; Protein of unknown function; green fluorescent protein (GFP)-fusion protein localizes to the cytoplasm in a punctate pattern
749; Vacuolar transporter chaperon (VTC) involved in distributing V-ATPase and other membrane proteins; together with other VTC proteins, forms a heterotetrameric complex that associates with the SNARE Nyv1p and the V0 sector of the V-ATPase 750; Mitochondrial aldehyde dehydrogenase, involved in regulation or biosynthesis of electron transport chain components and acetate formation; activated by K+; utilizes NADP+ as the preferred coenzyme; constitutively expressed
751; Metallopeptidase, localized to the mitochondrial matrix
752; Hypothetical protein
753; The authentic, non-tagged protein was localized to the mitochondria
754; Threonine deaminase, catalyzes the first step in isoleucine biosynthesis; expression is under general amino acid control; ILV1 locus exhibits highly positioned nucleosomes whose organization is independent of known ILV1 regulation
755; Hypothetical protein
756; Beta subunit of the Sec61p ER translocation complex (Sec61p-Sss1p-Sbh1p);

[0205] involved in protein translocation into the endoplasmic reticulum; interacts with the exocyst complex; homologous to Sbh2p

757; Cobalamin-independent methionine synthase, involved in amino acid biosynthesis; requires a minimum of two glutamates on the methyltehahydrofolate substrate, similar to bacterial metE homologs
758; Protein that associates with the INO80 chromatin remodeling complex under low-salt conditions
759; Beta subunit of the 20S proteasome involved in ubiquitin-dependent catabolism; human homolog is subunit C10
760; Strand exchange protein, forms a helical filament with DNA that searches for homology; involved in the recombinational repair of double-strand breaks in DNA during vegetative growth and meiosis; homolog of Dmc1p and bacterial RecA protein
761; Sporulation-specific activator of Chs3p (chitin synthase III), required for the synthesis of the chitosan layer of ascospores; has similarity to Skt5p, which activates Chs3p during vegetative growth; transcriptionally induced at alkaline pH
762; Ubiquitin-specific protease that cleaves ubiquitin-protein fusions
763; Ubiquitin-conjugating enzyme involved in ER-associated protein degradation; located at the cytosolic side of the ER membrane; tail region contains a transmembrane segment at the C-terminus; substrate of the ubiquitin-proteasome pathway
764; Protein that may have a role in targeting of plasma membrane [H+]ATPase (Pma1p) to the plasma membrane, as suggested by analysis of genetic interactions
765; Protein component of the small (40S) ribosomal subunit; identical to Rps8 Bp and has similarity to rat S8 ribosomal protein
766; Heat shock protein that is highly induced upon stress; plays a role in SRP-dependent cotranslational protein-membrane targeting and translocation; member of the HSP70 family; cytoplasmic protein that concentrates in nuclei upon starvation
767; Protein with a role in regulation of Ty1 transposition
768; Abundant subunit of the nuclear pore complex (NPC), present on both sides of the NPC, has similarity to Nup170p
769; Component of the nuclear pore complex required for polyadenylated RNA export but not for protein import, homologous to S. pombe Rae1p
770; Transcription factor required for flocculation, diploid filamentous growth, and haploid invasive growth; genome reference strain S288C and most laboratory strains have a mutation in this gene
771; Karyopherin beta, mediates nuclear import of ribosomal proteins prior to assembly into ribosomes and import of histones H3 and H4; localizes to the nuclear pore, nucleus, and cytoplasm; exhibits genetic interactions with RAI1
772; DNA binding component of the SBF complex (Swi4p-Swi6p), a transcriptional activator that in concert with MBF (Mbp1-Swi6p) regulates late G1-specific transcription of targets including cyclins and genes required for DNA synthesis and repair
773; Lsm (Like Sm) protein; part of heteroheptameric complexes (Lsm2p-7p and either Lsm1p or 8p): cytoplasmic Lsm1p complex involved in mRNA decay; nuclear Lsm8p complex part of U6 snRNP and possibly involved in processing tRNA, snoRNA, and rRNA
774; Protein implicated in polar growth, functionally redundant with Boi1p; interacts with bud-emergence protein Bem1p; contains an SH3 (src homology 3) domain and a PH (pleckstrin homology) domain
775; Protein of unknown function, expressed during sporulation; not required for sporulation, but gene exhibits genetic interactions with other genes required for sporulation
776; Protein containing a RING finger domain that forms a complex with Hex3p; mutant phenotypes and genetic interactions suggest a possible role in resolving recombination intermediates during DNA replication or repair
777; Vacuolar transporter, exports aspartate and glutamate from the vacuole; member of a family of seven S. cerevisiae genes (AVT1-7) related to vesicular GABA-glycine transporters
778; Integral ER membrane protein that regulates phospholipid metabolism via an interaction with the FFAT motif of Opi1p, also involved in telomeric silencing, disruption causes inositol auxotrophy above 34 degrees C., VAP homolog
779; ADP-ribosylation factor GTPase activating protein (ARF GAP), involved in ER-Golgi transport; shares functional similarity with Gcs1p
780; Palmitoylated, vacuolar membrane-localized casein kinase I isoform; negatively regulates vacuole fusion during hypertonic stress via phosphorylation of the HOPS complex subunit, Vps41p; shares overlapping essential functions with Hrr25p
781; Daughter cell-specific protein, may participate in pathways regulating cell wall metabolism; deletion affects cell separation after division and sensitivity to drugs targeted against the cell wall
782; Ubiquitin-protein ligase involved in ubiquitin-mediated protein degradation; plays a role in heat shock element (HSE)-mediated gene expression and multivesicular body sorting; contains a hect (homologous to E6-AP carboxyl terminus) domain
783; Constituent of 66S pre-ribosomal particles, involved in 60S ribosomal subunit biogenesis
784; Hypothetical protein
785; Protein component of the small (40S) ribosomal subunit; nearly identical to Rps26Ap and has similarity to rat S26 ribosomal protein
786; Protein with an N-terminal kelch-like domain, putative negative regulator of early meiotic gene expression; required, with Mds3p, for growth under alkaline conditions
787; GDP dissociation inhibitor, regulates vesicle traffic in secretory pathways by regulating the dissociation of GDP from the Sec4/Ypt/rab family of GTP binding proteins
788; Hypothetical protein
789; Hypothetical protein
790; Hypothetical protein
791; Protein required for the hydroxylation of heme 0 to form heme A, which is an essential prosthetic group for cytochrome c oxidase
792; DNA damage-inducible v-SNARE binding protein, contains a ubiquitin-associated (UBA) domain, may act as a negative regulator of constitutive exocytosis, may play a role in S-phase checkpoint control
793; Putative ubiquitin-specific protease that does not associate with the proteasome
794; High affinity iron permease involved in the transport of iron across the plasma membrane; forms complex with Fet3p; expression is regulated by iron
795; TATA-binding protein, general transcription factor that interacts with other factors to form the preinitiation complex at promoters, essential for viability 796; TATA-binding protein, general transcription factor that interacts with other factors to form the preinitiation complex at promoters, essential for viability 797; TATA-binding protein, general transcription factor that interacts with other factors to form the preinitiation complex at promoters, essential for viability 798; Coiled-coil polarisome protein required for polarized morphogenesis, cell fusion, and low affinity Ca2+ influx; forms polarisome complex with Bni1p, Bud6p, and Spa2p; localizes to sites of polarized growth
799; GPI-anchored, serine/threonine rich cell wall protein of unknown function; basal expression requires Msn2p/Msn4p; expression is induced under conditions of stress and during the diauxic shift; similar to Sed1p
800; Specific translational activator for the COX3 mRNA that acts together with Pet54p and Pet494p; located in the mitochondrial inner membrane
801; Translocase of the mitochondrial inner membrane, mediates the insertion of both mitochondrial- and nuclear-encoded proteins from the matrix into the inner membrane, interacts with mitochondrial ribosomes; null is respiratory deficient
802; Rho GTPase activating protein (RhoGAP) involved in the control of cytoskeleton organization and cellular morphogenesis; required for bud emergence
803; Hypothetical protein
804; Protein involved in negative regulation of transcription, exhibits regulated interactions with both histones and SWI-SNF components, has similarity to mammalian HMG1 proteins
805; Hypothetical protein
806; Nucleosome remodeling factor that functions in regulation of transcription elongation; contains a chromo domain, a helicase domain and a DNA-binding domain; component of both the SAGA and SILK complexes
807; Poly(A) binding protein, part of the 3′-end RNA-processing complex, mediates interactions between the 5′ cap structure and the 3′ mRNA poly(A) tail, involved in control of poly(A) tail length, interacts with translation factor eIF-4G
808; Protein rich in serine and threonine residues involved in protein kinase C signaling pathway, which controls cell integrity; overproduction suppresses pkc1 mutations
809; ATP(CTP):tRNA-specific tRNA nucleotidyltransferase; different forms targeted to the nucleus, cytosol, and mitochondrion are generated via the use of multiple transcriptional and translational start sites
810; 5′ to 3′ DNA helicase, involved in nucleotide excision repair and transcription; subunit of RNA polymerase II transcription initiation factor TFIIH; subunit of Nucleotide Excision Repair Factor 3 (NEF3); homolog of human XPD protein
811; RNA-dependent ATPase RNA helicase involved in the facilitation and disruption of snRNA interactions, required for disruption of U4/U6 base-pairing in native snRNPs to activate the spliceosome for catalysis
812; Hydroperoxide and superoxide-radical responsive glutathione-dependent oxidoreductase; monothiol glutaredoxin subfamily member along with Grx3p and Grx5p; protects cells from oxidative damage
813; Trans-aconitate methyltransferase, cytosolic enzyme that catalyzes the methyl esterification of 3-isopropylmalate, an intermediate of the leucine biosynthetic pathway, and trans-aconitate, which inhibits the citric acid cycle
814; DNA dependent ATPase/DNA helicase belonging to the Dna2p- and Nam7p-like family of helicases that is involved in modulating translation termination; interacts with the translation termination factors, localized to polysomes
815; 14-3-3 protein, major isoform; binds proteins and DNA, involved in regulation of many processes including exocytosis and vesicle transport, Ras/MAPK signaling during pseudohyphal development, rapamycin-sensitive signaling, and others
816; Protein required for sporulation, transcript is induced 7.5 hours after induction of meiosis, expected to play significant role in the formation of reproductive cells
817; Protein interacting with Arl3p, which is a GTPase of the Ras superfamily involved in vesicle-tethering at the Golgi; putative ortholog of human SCOCO
818; Member of a stationary phase-induced gene family; transcription of SNZ2 is induced prior to diauxic shift, and also in the absence of thiamin in a Thi2p-dependent manner, forms a coregulated gene pair with SNO3
819; Protein involved in synthesis of the thiamine precursor hydroxymethylpyrimidine (HMP); member of a subtelomeric gene family including THI5, THI11, THI12, and THI13
820; Integral membrane component of endoplasmic reticulum-derived COPII-coated vesicles, which function in ER to Golgi transport
821; The authentic, non-tagged protein was localized to the mitochondria
822; Phosphomannomutase, involved in synthesis of GDP-mannose and dolichol-phosphate-mannose; required for folding and glycosylation of secretory proteins in the ER lumen
823; Putative protein of unknown function; YFL040W is not an essential gene
824; Beta-tubulin; associates with alpha-tubulin (Tub1p and Tub3p) to form tubulin dimer, which polymerizes to form microtubules
825; Mitochondrial RNA polymerase; single subunit enzyme similar to those of T3 and T7 bacteriophages; requires a specificity subunit encoded by MTF1 for promoter recognition
826; Putative integral membrane protein that interacts with Rpp0p, which is a component of the ribosomal stalk
827; Alanine:glyoxylate aminotransferase, catalyzes the synthesis of glycine from glyoxylate, which is one of three pathways for glycine biosynthesis in yeast; has similarity to mammalian and plant alanine:glyoxylate aminotransferases.
828; Cyclin-dependent kinase-activating kinase required for passage through the cell cycle, phosphorylates and activates Cdc28p; nucleotide-binding pocket differs significantly from those of most other protein kinases
829; Part of the evolutionarily-conserved CCR4-NOT transcriptional regulatory complex involved in controlling mRNA initiation, elongation, and degradation; putative ABC ATPase; interacts with Ssn2p, Ssn3p, and Ssn8p
830; GTPase-activating protein for yeast Rab family members; Ypt1p is the preferred in vitro substrate but also acts on Sec4p, Ypt31p and Ypt32p; involved in the regulation of ER to Golgi vesicle transport
831; Receptor for alpha-factor pheromone; seven transmembrane-domain GPCR that interacts with both pheromone and a heterotrimeric G protein to initiate the signaling response that leads to mating between haploid a and alpha cells
832; GPI inositol deacylase of the ER that negatively regulates COPII vesicle formation, prevents production of vesicles with defective subunits, required for proper discrimination between resident ER proteins and Golgi-bound cargo molecules 833; Component of NuA4, which is an essential histone H4/H2A acetyltransferase complex; homologous to Drosophila Enhancer of Polycomb
834; Alpha subunit of cytoplasmic phenylalanyl-tRNA synthetase, forms a tetramer with Frs1p to form active enzyme; evolutionarily distant from mitochondrial phenylalanyl-tRNA synthetase based on protein sequence, but substrate binding is similar
835; Dihydrolipoamide dehydrogenase, the lipoamide dehydrogenase component (E3) of the pyruvate dehydrogenase and 2-oxoglutarate dehydrogenase multi-enzyme complexes
836; Core Sm protein Sm G; part of heteroheptameric complex (with Smb1p, Smd1p, Smd2p, Smd3p, Sme1p, and Smx3p) that is part of the spliceosomal U1, U2, U4, and U5 snRNPs; homolog of human Sm G
837; Evolutionarily conserved glucosamine-6-phosphate acetyltransferase required for multiple cell cycle events including passage through START, DNA synthesis, and mitosis; involved in UDP-N-acetylglucosamine synthesis, forms GlcNAc6P from AcCoA
838; Protein involved in folding of mitochondrially synthesized proteins in the mitochondrial matrix; localizes to the mitochondrial inner membrane; member of the DnaJ family of molecular chaperones
839; Plasma membrane localized protein that protects membranes from desiccation; induced by heat shock, oxidative stress, osmostress, stationary phase entry, glucose depletion, oleate and alcohol; regulated by the HOG and Ras-Pka pathways
840; WW domain containing protein of unknown function; binds to Mca1p, a caspase-related protease that regulates H2O2-induced apoptosis; overexpression causes G1 phase growth arrest and clonal death that is suppressed by overexpression of MCA1
841; Subunit of the multiprotein cohesin complex, essential protein involved in chromosome segregation and in double-strand DNA break repair; SMC chromosomal ATPase family member, binds DNA with a preference for DNA with secondary structure
842; Secretory vesicle-associated Rab GTPase essential for exocytosis; associates with the exocyst component Sec15p and may regulate polarized delivery of transport vesicles to the exocyst at the plasma membrane
843; Putative ATP-dependent RNA helicase, nucleolar protein required for synthesis of 60S ribosomal subunits at a late step in the pathway; sediments with 66S pre-ribosomes in sucrose gradients
844; Non-essential tRNA:pseudouridine synthase, introduces pseudouridines at position 38 or 39 in tRNA, important for maintenance of translation efficiency and normal cell growth, localizes to both the nucleus and cytoplasm
845; Component of the nuclear pore complex, required for nuclear pore formation; forms a subcomplex with Nsp1p, Nup57p, and Nup49p
846; Inhibitor of the type I protein phosphatase Glc7p, which is involved in regulation of a variety of metabolic processes; overproduction causes decreased cellular content of glycogen
847; Metalloprotease subunit of the 19S regulatory particle of the 26S proteasome lid; couples the deubiquitination and degradation of proteasome substrates
848; Putative X-Pro aminopeptidase; green fluorescent protein (GFP)-fusion protein localizes to the cytoplasm; YFR006W is not an essential gene
849; Hypothetical protein
850; Positive regulator of the Gcn2p kinase activity, forms a complex with Gcn1p; proposed to stimulate Gcn2p activation by an uncharged tRNA
851; Dubious ORF unlikely to encode a protein, based on available experimental and comparative sequence data; completely overlaps the verified gene YFR009W; identified by expression profiling and mass spectrometry
852; Putative protein of unknown function; localizes to the mitochondrion; green fluorescent protein (GFP)-fusion protein localizes to the cytoplasm; YFR011C is not an essential gene
853; Member of a complex (Isw1a) with Isw1p that has nucleosome-stimulated ATPase activity and represses transcription initiation by specific positioning of a promoter proximal dinucleosome; has homology to Esc8p, which is involved in silencing
854; Glycogen synthase with similarity to Gsy2p, the more highly expressed yeast homolog; expression induced by glucose limitation, nitrogen starvation, environmental stress, and entry into stationary phase
855; Putative protein of unknown function; green fluorescent protein (GFP)-fusion protein localizes to the cytoplasm; YFR017C is not an essential gene
856; 1-phosphatidylinositol-3-phosphate 5-kinase; vacuolar membrane kinase that generates phosphatidylinositol (3,5)P2, which is involved in vacuolar sorting and homeostasis
857; Phosphatidylinositol 3,5-bisphosphate-binding protein of the vacuolar membrane, predicted to fold as a seven-bladed beta-propeller; required for recycling of Atg9p through the pre-autophagosomal structure
858; Protein that binds to Rsp5p, which is a hect-type ubiquitin ligase, via its 2 PY motifs; has similarity to Rod1p; mutation suppresses the temperature sensitivity of an mck1 rim11 double mutant
859; Poly(A) binding protein, suppressor of DNA polymerase epsilon mutation, similar to Mip6p
860; Histidinolphosphatase, catalyzes the eighth step in histidine biosynthesis; mutations cause histidine auxotrophy and sensitivity to Cu, Co, and Ni salts; transcription is regulated by general amino acid control
861; Acetyltransferase required for the establishment of sister chromatid cohesion during DNA replication, but not for its maintenance during G2 and M phases; also required for postreplicative double-strand break repair; interacts with Chi1p862; Protein phosphatase required for mitotic exit; located in the nucleolus until liberated by the FEAR and Mitotic Exit Network in anaphase, enabling it to act on key substrates to effect a decrease in CDK/B-cyclin activity and mitotic exit
863; Component of the SPS plasma membrane amino acid sensor system (Ssy1p-Ptr3p-Ssy5p), which senses external amino acid concentration and transmits intracellular signals that result in regulation of expression of amino acid permease genes
864; Subunit alpha of assimilatory sulfite reductase, which is responsible for the conversion of sulfite into sulfide
865; Component of the condensin complex, essential SMC chromosomal ATPase family member that forms a complex with Smc4p to form the active ATPase; Smc2p/Smc4p complex binds DNA, possibly in the cleft formed by the coiled-coil of the folded dimer
866; Protein component of the large (60S) ribosomal subunit, has similarity to rat L29 ribosomal protein; not essential for translation, but required for proper joining of the large and small ribosomal subunits and for normal translation rate
867; Subunit 6 of the ubiquinol cytochrome-c reductase complex, which is a component of the mitochondrial inner membrane electron transport chain; highly acidic protein; required for maturation of cytochrome c1
868; Subunit of the Anaphase-Promoting Complex/Cyclosome (APC/C), which is a ubiquitin-protein ligase required for degradation of anaphase inhibitors, including mitotic cyclins, during the metaphase/anaphase transition
869; One of 15 subunits of the ‘Remodel the Structure of Chromatin’ (RSC) complex; essential for viability and mitotic growth; homolog of SWI/SNF subunit Swi3p, but unlike Swi3p, does not activate transcription of reporters
870; Endoplasmic reticulum protein that may function as a cochaperone, as suggested by the presence of a DnaJ-like domain
871; Protein required for cell viability
872; Kinetochore protein of unknown function; associated with the essential kinetochore proteins Nnf11p and Spc24p; phosphorylated by both Clb5-Cdk1 and, to a lesser extent, Clb2-Cdk1.
873; Quinolinate phosphoribosyl transferase, required for biosynthesis of nicotinic acid from tryptophan via kynurenine pathway
874; Mitochondrial ribosomal protein of the small subunit, has similarity to human mitochondrial ribosomal protein MRP-S36
875; 20S proteasome beta-type subunit
876; Delta subunit of the coatomer complex (COP1), which coats Golgi-derived transport vesicles; involved in retrograde transport between Golgi and ER
877; Subunit of the 19S regulatory particle of the 26S proteasome lid; synthetically lethal with RPT1, which is an ATPase component of the 19S regulatory particle; physically interacts with Nob1p and Rpn3p
878; Hexokinase isoenzyme 1, a cytosolic protein that catalyzes phosphorylation of glucose during glucose metabolism; expression is highest during growth on non-glucose carbon sources; glucose-induced repression involves the hexokinase Hxk2p879; Protein required for respiratory growth; null mutation suppresses the Cyc1p translation defect caused by the presence of an aberrant ATG codon upstream of the correct start
880; High affinity Ca2+/Mn2+ P-type ATPase required for Ca2+ and Mn2+ transport into Golgi; involved in Ca2+ dependent protein sorting and processing; mutations in human homolog ATP2C1 cause acantholytic skin condition Hailey-Hailey disease
881; Copper-binding transcription factor; activates transcription of the metallothionein genes CUP1-1 and CUP1-2 in response to elevated copper concentrations
882; RanGTP-binding protein, inhibits RanGAP1 (Rna1p)-mediated GTP hydrolysis of RanGTP (Gsp1p); shares similarity to proteins in other fungi but not in higher eukaryotes
883; DNA-dependent ATPase, stimulates strand exchange by modifying the topology of double-stranded DNA; involved in the recombinational repair of double-strand breaks in DNA during vegetative growth and meiosis; member of the SWI/SNF family
884; Protein that interacts with Rab GTPases; computational analysis of large-scale protein-protein interaction data suggests a possible role in vesicle-mediated transport
885; Vacuolar alpha mannosidase, involved in free oligosaccharide (fOS) degradation; delivered to the vacuole in a novel pathway separate from the secretory pathway
886; Beta subunit of geranylgeranyltransferase type 1, catalyzes geranylgeranylation to the cysteine residue in proteins containing a C-terminal CaaX sequence ending in Leu or Phe; has substrates important for morphogenesis
887; Peroxisomal membrane protein that is a central component of the peroxisomal protein import machinery, interacts with PTS1 (Pex5p) and PTS2 (Pex7p) peroxisomal matrix protein signal recognition factors and membrane receptor Pex13p
888; Component of the RNA polymerase II mediator complex, which is required for transcriptional activation and also has a role in basal transcription
889; Mitochondrial polypeptide chain release factor, involved in stop codon recognition and hydrolysis of the peptidyl-tRNA bond during mitochondrial translation; lack of MRF1 causes mitochondrial genome instability
890; Hypothetical protein
891; N-terminally acetylated protein component of the large (60S) ribosomal subunit, nearly identical to Rpl1Bp and has similarity to E. coli L1 and rat L10a ribosomal proteins; rpl1a rpl1b double null mutation is lethal
892; Alpha (guanylyltransferase) subunit of the mRNA capping enzyme, a heterodimer (the other subunit is CET1, an RNA 5′-triphosphatase) involved in adding the 5′ cap to mRNA; the mammalian enzyme is a single bifunctional polypeptide
893; Protein required for fusion of cvt-vesicles and autophagosomes with the vacuole; associates, as a complex with Ccz1p, with a perivacuolar compartment; potential Cdc28p substrate
894; Proposed gamma subunit of the heterotrimeric G protein that interacts with the receptor Grp1p; involved in regulation of pseudohyphal growth; requires Gpb1p or Gpb2p to interact with Gpa2p
895; RNA helicase in the DEAH-box family, involved in release of the lariat-intron from the spliceosome
896; Hypothetical protein
897; Cell-cycle regulated activator of anaphase-promoting complex/cyclosome (APC/C), which is required for metaphase/anaphase transition; directs ubiquitination of mitotic cyclins, Pds1p, and other anaphase inhibitors; potential Cdc28p substrate
898; Protein kinase activator found in a complex containing Snf1p and members of the Sip1p/Sip2p/Gal83p family; activates the Snf1p protein kinase; involved in expression of glucose-repressed genes, sporulation, and peroxisome biogenesis
899; Putative member of the oligopeptide transporter (OPT) family of membrane transporters
900; Subunit (60 kDa) of TFIID and SAGA complexes, involved in transcription initiation of RNA polymerase II and in chromatin modification, similar to histone
901; Protein of unknown function; has a CUE domain that binds ubiquitin, which may facilitate intramolecular monoubiquitination
902; Protein of unknown function; green fluorescent protein (GFP)-fusion protein localizes to the cell periphery
903; Essential light chain for myosin Myo2p; may stabilize Myo2p by binding to the neck region; may interact with Myo1p, Iqg1p, and Myo2p to coordinate formation and contraction of the actomyosin ring with targeted membrane deposition
904; Nuclear pore protein that is part of the evolutionarily conserved Nup84p complex (Nup84p, Nup85p, Nup120p, Nup145p, and Seh1p); homologous to Sec13p
905; Putative GTPase involved in 60S ribosomal subunit biogenesis; required for the release of Nmd3p from 60S subunits in the cytoplasm
906; Nucleotide exchange factor for Gsp1p, localizes to the nucleus, required for nucleocytoplasmic trafficking of macromolecules; potentially phosphorylated by Cdc28p
907; Protein of the Sec1p/Munc-18 family, essential for vacuolar protein sorting; required for the function of Pep12p and the early endosome/late Golgi SNARE Tlg2p; essential for fusion of Golgi-derived vesicles with the prevacuolar compartment
908; Hypothetical protein
909; Plasma membrane protein with a possible role in proton symport of glycerol; member of the MBOAT family of putative membrane-bound O-acyltransferases
910; Hypothetical protein
911; Putative ATP-dependent RNA helicase of the DEAD-box family involved in ribosomal biogenesis
912; Transcription factor involved in iron utilization and homeostasis; binds the consensus site PyPuCACCCPu and activates the expression of target genes in response to changes in iron availability
913; RNA polymerase II subunit B12.6; contacts DNA; mutations affect transcription start site
914; Protein associated with the mitochondrial nucleoid; putative mitochondrial ribosomal protein with similarity to E. coli L7/L12 ribosomal protein; required for normal respiratory growth
915; NADH diphosphatase (pyrophosphatase), hydrolyzes the pyrophosphate linkage in NADH and related nucleotides; localizes to peroxisomes
916; Essential mitotic spindle protein required to maintain spindle integrity and kinetochore function, part of the multisubunit DASH complex which binds microtubules and is transferred to the kinetochore prior to mitosis
917; Hypothetical protein
918; Ubiquitin-conjugating enzyme (E2), involved in postreplication repair (with Rad18p), sporulation, telomere silencing, and ubiquitin-mediated N-end rule protein degradation (with Ubr1p)
919; One of two S. cerevisiae homologs (Sds23p and Sds24p) of the Schizosaccharomyces pombe Sds23 protein, which genetic studies have implicated in APC/cyclosome regulation
920; Fatty acid desaturase, required for monounsaturated fatty acid synthesis and for normal distribution of mitochondria
921; Protein localized to COPII-coated vesicles, involved in vesicle formation and incorporation of specific secretory cargo; required for the delivery of bud-site selection protein Axl2p to cell surface; related to Drosophila cornichon
922; Translation initiation factor eIF4G, subunit of the mRNA cap-binding protein complex (eIF4F) that also contains eIF4E (Cdc33p); associates with the poly(A)-binding protein Pab1p, also interacts with eIF4A (Tif1p); homologous to Tif4631p923; Cleavage and polyadenylation factor I (CF I) component involved in cleavage and polyadenylation of mRNA 3′ ends; interacts with the A-rich polyadenylation signal in complex with Rna14p and Hrp1p
924; General transcription elongation factor TFIIS, enables RNA polymerase II to read through blocks to elongation by stimulating cleavage of nascent transcripts stalled at transcription arrest sites
925; Delta-aminolevulinate dehydratase, a homo-octameric enzyme, catalyzes the conversion of delta-aminolevulinic acid to porphobilinogen, the second step in the heme biosynthetic pathway; localizes to both the cytoplasm and nucleus
926; Nicotinamidase that converts nicotinamide to nicotinic acid as part of the NAD(+) salvage pathway, required for life span extension by calorie restriction; PNC1 expression responds to all known stimuli that extend replicative life span

### 927; Mtf1 Two Hybrid Clone 2

[0206] 928; Transcription factor involved in glucose repression; C₂H₂ zinc finger protein similar to mammalian Egr and Wilms tumor proteins
929; Adhesion subunit of a-agglutinin of a-cells, C-terminal sequence acts as a ligand for alpha-agglutinin (Sag1p) during agglutination, modified with O-linked oligomannosyl chains, linked to anchorage subunit Aga1p via two disulfide bonds
930; Ribosomal protein L30 of the large (60S) ribosomal subunit, nearly identical to Rpl24 Bp and has similarity to rat L24 ribosomal protein; not essential for translation but may be required for normal translation rate
931; Protein involved in nucleolar integrity and processing of the pre-rRNA for the 60S ribosome subunit; transcript is induced in response to cytotoxic stress but not genotoxic stress
932; Subunit of the GET complex; required for the retrieval of HDEL proteins from the Golgi to the ER in an ERD2 dependent fashion and for normal mitochondrial morphology and inheritance
933; Beta regulatory subunit of casein kinase 2, a Ser/Thr protein kinase with roles in cell growth and proliferation; the holoenzyme also contains CKA1, CKA2 and CKB2, the many substrates include transcription factors and all RNA polymerases
934; Molecular chaperone involved, with partner Ssq1p, in assembly of Fe/S clusters and in mitochondrial iron metabolism; contains a J domain typical to J-type chaperones; localizes to the mitochondrial matrix
935; Arginyl-tRNA-protein transferase, catalyzes post-translational conjugation of arginine to the amino termini of acceptor proteins which are then subject to degradation via the N-end rule pathway
936; C-24(28) sterol reductase, catalyzes the final step in ergosterol biosynthesis; mutants are viable, but lack ergosterol
937; Alpha subunit of the 20S core complex of the 26S proteasome involved in the degradation of ubiquitinated substrates; essential for growth; detected in the mitochondria
938; Hypothetical protein
939; Isopropylmalate isomerase, catalyzes the second step in the leucine biosynthesis pathway
940; Vacuolar Ca2+ ATPase involved in depleting cytosol of Ca2+ ions; prevents growth inhibition by activation of calcineurin in the presence of elevated concentrations of calcium
941; Component of the conserved oligomeric Golgi complex (Cog1p through Cog8p), a cytosolic tethering complex that functions in protein trafficking to mediate fusion of transport vesicles to Golgi compartments
942; Cell-cycle regulated activator of the anaphase-promoting complex/cyclosome (APC/C), which directs ubiquitination of mitotic cyclins resulting in exit from mitosis; targets the APC/C to specific substrates including CDC20, ASE1 and CIN8
943; Protein with similarity to Emp24p and Erv25p, member of the p24 family involved in ER to Golgi transport
944; C-3 sterol dehydrogenase, catalyzes the second of three steps required to remove two C-4 methyl groups from an intermediate in ergosterol biosynthesis
945; Protein of unknown function, component of the Swr1p complex that incorporates Htz1p into chromatin; component of the NuA4 histone acetyltransferase complex
946; Peroxisomal integral membrane protein, involved in negative regulation of peroxisome size; partially functionally redundant with Pex30p and Pex32p; probably acts at a step downstream of steps mediated by Pex28p and Pex29p
947; TFIIF (Transcription Factor II) middle subunit; involved in both transcription initiation and elongation of RNA polymerase II; homologous to human RAP30
948; Choline phosphate cytidylyltransferase, catalyzes the second step of phosphatidylethanolamine biosynthesis; involved in the maintenance of plasma membrane; similar to mammalian CTP:phosphocholine cytidylyl-transferases
949; Protein involved in regulation of the mitochondrial F1F0-ATP synthase; Stf1p and Stf2p act as stabilizing factors that enhance inhibitory action of the Inh1p protein
950; t-SNARE protein important for fusion of secretory vesicles with the plasma membrane; similar to but not functionally redundant with Spo20p; SNAP-25 homolog
951; Nicotinic acid mononucleotide adenylyltransferase, involved in NAD(+) salvage pathway
952; Hypothetical protein
953; Putative protein of unknown function; green fluorescent protein (GFP)-fusion protein localizes to both the nucleus and the cytoplasm
954; Gamma-aminobutyrate (GABA) transaminase (4-aminobutyrate aminotransferase) involved in the 4-aminobutyrate and glutamate degradation pathways; required for normal oxidative stress tolerance and nitrogen utilization
955; Subunit F of the eight-subunit V1 peripheral membrane domain of vacuolar H+-ATPase (V-ATPase), an electrogenic proton pump found throughout the endomembrane system; required for the V1 domain to assemble onto the vacuolar membrane
956; Protein of unknown function; green fluorescent protein (GFP)-fusion protein localizes to the cell periphery
957; Protein component of the small (40S) ribosomal subunit; nearly identical to Rps25 Bp and has similarity to rat S25 ribosomal protein
958; Mitochondrial protein involved in sorting of proteins in the mitochondria; putative membrane-spanning ATPase
959; Subunit of both RNase MRP, which cleaves pre-rRNA, and nuclear RNase P, which cleaves tRNA precursors to generate mature 5′ ends
960; Constituent of the mitochondrial inner membrane presequence translocase (TIM23 complex); may regulate protein import by binding to both the translocase of the outer membrane (TOM) and presequence-associated motor (PAM) complexes
961; Protein of unknown function, potential Cdc28p substrate; transcription is activated by paralogous transcription factors Yrm1p and Yrr1p along with genes involved in multidrug resistance
962; Acyl-CoA-binding protein, transports newly synthesized acyl-CoA esters from fatty acid synthetase (Fas1p-Fas2p) to acyl-CoA-consuming processes
963; Evolutionarily conserved protein with similarity to Orm2p, required for resistance to agents that induce the unfolded protein response; human ortholog is located in the endoplasmic reticulum
964; Protein involved in bud-site selection; diploid mutants display a unipolar budding pattern instead of the wild-type bipolar pattern, and bud at the distal pole
965; Putative protein of unknown function; green fluorescent protein (GFP)-fusion protein localizes to both the cytoplasm and the nucleus
966; Putative protein of unknown function; transcription is repressed by MOT1/YPL082C and induced by alpha-factor and during diauxic shift; green fluorescent protein (GFP)-fusion protein localizes to the nucleus
967; Putative protein of unknown function; mRNA is targeted to the bud via the mRNA transport system involving She2p; deletion mutant is inviable
968; One of six subunits of the RNA polymerase m transcription initiation factor complex (TFIIIC); part of the TauA domain of TFIIIC that binds BoxA DNA promoter sites of tRNA and similar genes; has TPR motifs; human homolog is TFIIIC-102
969; Protein that interacts with Cdc48p and Npl4p, involved in recognition of polyubiquitinated proteins and their presentation to the 26S proteasome for degradation; involved in transporting proteins from the ER to the cytosol
970; Hypothetical protein
971; High affinity methionine permease, integral membrane protein with 13 putative membrane-spanning regions; also involved in cysteine uptake
972; Putative protein of unknown function; green fluorescent protein (GFP)-fusion protein localizes to both the cytoplasm and the nucleus
973; Sporulation-specific homolog of the yeast CDC3/10/11/12 family of bud neck microfilament genes; septin protein involved in sporulation; regulated by ABF1
974; C-4 methyl sterol oxidase, catalyzes the first of three steps required to remove two C-4 methyl groups from an intermediate in ergosterol biosynthesis; mutants accumulate the sterol intermediate 4,4-dimethylzymosterol
975; Mitochondrial inner membrane protein, required for export of the Cox2p C terminus from the mitochondrial matrix to the intermembrane space during its assembly into cytochrome c oxidase; similar to Oxa2p of N. crassa
976; Putative protein of unknown function
977; GDP/GTP exchange protein (GEP) for Rho1p; mutations are synthetically lethal with mutations in rom2, which also encodes a GEP
978; Component of the nonsense-mediated mRNA decay (NMD) pathway, along with Nam7p and Nmd2p; involved in decay of mRNA containing nonsense codons
979; Core Sm protein Sm D1; part of heteroheptameric complex (with Smb1p, Smd2p, Smd3p, Sme1p, Smx3p, and Smx2p) that is part of the spliceosomal U1, U2, U4, and U5 snRNPs; homolog of human Sm D1
980; Unique component of the U4/U6.U5 tri-snRNP particle, dispensable for spliceosome assembly, but required for conformational changes which lead to catalytic activation of the spliceosome
981; Mitochondrial ribosomal protein of the large subunit
982; Twinfilin, highly conserved actin monomer-sequestering protein involved in regulation of the cortical actin cytoskeleton, composed of two cofilin-like regions, localizes actin monomers to sites of rapid filament assembly
983; Component of the TOM (translocase of outer membrane) complex responsible for recognition and initial import steps for all mitochondrially directed proteins; acts as a receptor for incoming precursor proteins
984; Delta subunit of the translation initiation factor eIF2B, the guanine-nucleotide exchange factor for eIF2; activity subsequently regulated by phosphorylated eIF2; first identified as a negative regulator of GCN4 expression
985; Long chain base-responsive inhibitor of protein kinases Pkh1p and Pkh2p, acts along with Lsp1p to down-regulate heat stress resistance via regulation of the Pkc1p and Ypk1p pathways; phosphorylated by Phk1p and Phk2p
986; Minor isoform of pyruvate decarboxylase, key enzyme in alcoholic fermentation, decarboxylates pyruvate to acetaldehyde, regulation is glucose- and ethanol-dependent, involved in amino acid catabolism
987; Ser/Thr kinase involved in transcription and stress response; functions as part of a network of genes in exit from mitosis; localization is cell cycle regulated; activated by Cdc15p during the exit from mitosis
988; Putative protein of unknown function; green fluorescent protein (GFP)-fusion protein localizes to the nucleus
989; Component of the RNA polymerase II holoenzyme, phosphorylated in response to oxidative stress; has a role in destruction of Ssn8p, which relieves repression of stress-response genes
990; Cytoplasmic GTPase-activating protein for Ypt/Rab transport GTPases Ypt6p, Ypt31p and Sec4p; involved in recycling of internalized proteins and regulation of Golgi secretory function
991; Mitochondrial serine protease required for the processing of various mitochondrial proteins and maintenance of mitochondrial DNA and morphology; belongs to the rhomboid-GlpG superfamily of intramembrane peptidases
992; Hypothetical protein
993; Nucleolar protein involved in rRNA processing and 60S ribosomal subunit biogenesis; constituent of several different pre-ribosomal particles
994; Subunit of the RNA polymerase II mediator complex; associates with core polymerase subunits to form the RNA polymerase II holoenzyme; essential for transcriptional regulation
995; Integral membrane protein that is required for vacuolar H+-ATPase (V-ATPase) function, although not an actual component of the V-ATPase complex; functions in the assembly of the V-ATPase; localized to the yeast endoplasmic reticulum (ER)
996; Hypothetical protein
997; B-type cyclin involved in cell cycle progression; activates Cdc28p to promote the transition from G2 to M phase; accumulates during G2 and M, then targeted via a destruction box motif for ubiquitin-mediated degradation by the proteasome 998; Hypothetical protein
999; Mitochondrial inner membrane protein required for normal respiration, possible chaperone involved in assembly of cytochrome c oxidase; similar to SURF1 from mammals, chickens, and D. melanogaster
1000; Component of the DASH complex, localized to intranuclear spindles and spindle pole bodies; interacts with Duo1p and Mps1p; key Ipl1p target for regulating kinetochore-microtubule attachments
1001; Essential subunit of the nuclear pore complex (NPC), functions as the organizing center of an NPC subcomplex containing Nsp1p, Nup49p, Nup57p, and Nic96p
1002; Hypothetical protein
1003; Asparagine synthetase, isozyme of Asn1p; catalyzes the synthesis of L-asparagine from L-aspartate in the asparagine biosynthetic pathway
1004; Hypothetical protein
1005; Hypothetical protein
1006; Hypothetical protein
1007; Component of the spliceosome complex involved in pre-mRNA splicing; involved in regulation of cell cycle progression
1008; Protein of unknown function; green fluorescent protein (GFP)-fusion protein localizes to the cytoplasm in a punctate pattern
1009; Subunit of the prohibitin complex (Phb1p-Phb2p), a 1.2 MDa ring-shaped inner mitochondrial membrane chaperone that stabilizes newly synthesized proteins; determinant of replicative life span; involved in mitochondrial segregation
1010; 20S proteasome beta-type subunit; the only nonessential 20S subunit
1011; Protein containing an N-terminal SH3 domain; binds Las17p, which is a homolog of human Wiskott-Aldrich Syndrome protein involved in actin patch assembly and actin polymerization
1012; Protein involved in sphingolipid biosynthesis; type II membrane protein with similarity to Kre6p
1013; Essential nucleolar protein of unknown function; contains WD repeats, interacts with Mpp10p and Bfr2p, and has homology to Spb1p
1014; Hypothetical protein
1015; N alpha-acetyl-transferase, transfers acetyl group from acetyl coenzyme A to the N-terminal methionine residues of proteins
1016; Ribosomal protein L30 of the large (60S) ribosomal subunit, nearly identical to Rpl24Ap and has similarity to rat L24 ribosomal protein; not essential for translation but may be required for normal translation rate
1017; GTP-binding protein of the ras superfamily required for bud site selection, morphological changes in response to mating pheromone, and efficient cell fusion; localized to the plasma membrane; significantly similar to mammalian Rap GTPases
1018; Cystathionine beta-synthase, catalyzes the synthesis of cystathionine from serine and homocysteine, the first committed step in cysteine biosynthesis
1019; Pta1p Interacting protein
1020; Nucleolar protein that binds nuclear localization sequences, required for pre-rRNA processing and ribosome biogenesis
1021; Putative component of the protein phosphatase type 2A complex
1022; Translation initiation factor eIF4G, subunit of the mRNA cap-binding protein complex (eIF4F) that also contains eIF4E (Cdc33p); associates with the poly(A)-binding protein Pab1p, also interacts with eIF4A (Tif1p); homologous to Tif4632p
1023; Pseudouridine synthase responsible for modification of cytoplasmic and mitochondrial tRNAs at position 31; mutation of Asp168 to Ala abolishes enzyme activity; not essential for viability
1024; Identified by homology to Ashbya gossypii
1025; Phosphatidylserine decarboxylase of the Golgi and vacuolar membranes, converts phosphatidylserine to phosphatidylethanolamine
1026; Protein with similarity to mammalian developmentally regulated GTP-binding protein
1027; Squalene epoxidase, catalyzes the epoxidation of squalene to 2,3-oxidosqualene; plays an essential role in the ergosterol-biosynthesis pathway and is the specific target of the antifungal drug terbinafine
1028; Protein interacting with poly(A)-binding protein Pab1p; likely involved in control of the extent of mRNA polyadenylation; also interacts with Mkt1p to form a complex that may regulate translation of the HO mRNA
1029; Mitochondrial intermembrane space protein, forms a complex with TIm8p that medates import and insertion of a subset of polytopic inner membrane proteins; may prevent aggregation of incoming proteins in a chaperone-like manner
1030; Ubiquitin-protein ligase (E3) that interacts with Rad6p/Ubc2p to ubiquitinate substrates of the N-end rule pathway; binds to the Rpn2p, Rpt1p, and Rpt6p proteins of the 19S particle of the 26S proteasome
1031; Cytoplasmic tyrosyl-tRNA synthetase, class r aminoacyl-tRNA synthetase that aminoacylates tRNA(Tyr), required for cytoplasmic protein synthesis, interacts with positions 34 and 35 of the anticodon of tRNATyr
1032; TFIIF (Transcription Factor II) largest subunit; involved in both transcription initiation and elongation of RNA polymerase II; homologous to human RAP74
1033; Protein of unknown function with similarity to human HMG1 and HMG2; localizes to the cytoplasm
1034; High-affinity histidine permease, also involved in the transport of manganese ions
1035; Glyceraldehyde-3-phosphate dehydrogenase, isozyme 3, involved in glycolysis and gluconeogenesis; tetramer that catalyzes the reaction of glyceraldehyde-3-phosphate to 1,3 bis-phosphoglycerate; detected in the cytoplasm and cell-wall
1036; Dihydrolipoamide dehydrogenase (E3)-binding protein (E3BP) of the mitochondrial pyruvate dehydrogenase (PDH) complex, plays a structural role in the complex by binding and positioning E3 to the dihydrolipoamide acetyltransferase (E2) core
1037; 3′-to-5′ phosphorolytic exoribonuclease that is a subunit of the exosome; required for 3′ processing of the 5.8S rRNA; involved in 3′ to 5′ mRNA degradation and translation inhibition of non-poly(A) mRNAs
1038; Protein of unknown function; homolog of mammalian electron transfer flavoprotein complex subunit ETF-beta; interacts with frataxin (Yfh1p)
1039; Phosphoserine phosphatase of the phosphoglycerate pathway, involved in serine and glycine biosynthesis, expression is regulated by the available nitrogen source
1040; N-acetyltransferase, confers resistance to the sphingolipid biosynthesis inhibitor myriocin (ISP-1) by converting it into N-acetyl-myriocin, co-operates with Ypk1p in mediating resistance to myriocin
1041; Mitochondrial ribosomal protein of the small subunit
1042; Membrane protein involved in the synthesis of N-acetylglucosaminyl phosphatidylinositol (GlcNAc-PI), the first intermediate in the synthesis of glycosylphosphatidylinositol (GPI) anchors; human and mouse GPI1p are functional homologs
1043; Major karyopherin, involved in export of proteins, RNAs, and ribosomal subunits from the nucleus
1044; Dolichyl-phosphoglucose-dependent glucosyltransferase of the ER, functions in the dolichol pathway that synthesizes the dolichol-linked oligosaccharide precursor for N-linked protein glycosylation, has a role in regulation of ITR1 and INO1
1045; Protein involved in the regulation of cell wall synthesis; proposed to be involved in coordinating cell cycle progression with cell wall integrity
1046; Regulatory, non-ATPase subunit of the 26S proteasome; homolog of the human oncoprotein gankyrin, which interacts with the retinoblastoma tumor suppressor (Rb) and cyclin-dependent kinase 4/6
1047; Putative protein of unknown function; localizes to the mitochondrion
1048; Putative protein of unknown function; green fluorescent protein (GFP)-fusion protein localizes to the cytoplasm
1049; The authentic, non-tagged protein was localized to mitochondria
1050; Cyclic nucleotide phosphodiesterase, hydrolyzes ADP-ribose 1″,2″-cyclic phosphate to ADP-ribose 1″-phosphate; no detectable phenotype is conferred by null mutation or by overexpression
1051; 6-phosphogluconolactonase with similarity to Sol3p
1052; Protein similar to heat shock transcription factor; multicopy suppressor of pseudohyphal growth defects of ammonium permease mutants
1053; Histone acetyltransferase, acetylates lysine 14 on histone H3; catalytic subunit of the ADA and SAGA histone acetyltransferase complexes; founding member of the Gcn5p-related N-acetyltransferase superfamily
1054; Alpha subunit of the 20S proteasome involved in ubiquitin-dependent catabolism; human homolog is subunit zeta
1055; Enolase I, a phosphopyruvate hydratase that catalyzes the conversion of 2-phosphoglycerate to phosphoenolpyruvate during glycolysis and the reverse reaction during gluconeogenesis; expression is repressed in response to glucose
1056; Mitochondrial protein of the mitochondrial carrier family, involved in activating mitochondrial Sod2p probably by facilitating insertion of an essential manganese cofactor
1057; High affinity nicotinic acid plasma membrane permease, responsible for uptake of low levels of nicotinic acid; expression of the gene increases in the absence of extracellular nicotinic acid or para-aminobenzoate (RABA)
1058; Protein involved in bud-site selection; diploid mutants display a random budding pattern instead of the wild-type bipolar pattern
1059; Putative protein of unknown function; green fluorescent protein (GFP)-fusion protein localizes to the endoplasmic reticulum
1060; GTP-cyclohydrolase I, catalyzes the first step in the folic acid biosynthetic pathway
1061; Cytoplasmic protein containing a zinc finger domain with sequence similarity to that of Type I J-proteins; computational analysis of large-scale protein-protein interaction data suggests a possible role in actin patch assembly
1062; TFIID subunit (145 kDa), involved in RNA polymerase II transcription initiation, has histone acetyltransferase activity, involved in promoter binding and G1/S progression
1063; 3′ exoribonuclease, required for 5S and tRNA-Arg3 maturation
1064; Cell wall protein with similarity to glucanases; scw4 scw10 double mutants exhibit defects in mating
1065; Essential protein involved in rRNA and snoRNA maturation; competes with TLC1 RNA for binding to Est2p, suggesting a role in regulation of telomerase; human homolog inhibits telomerase; contains a G-patch RNA interacting domain
1066; Endo-beta-1,3-glucanase, major protein of the cell wall, involved in cell wall maintenance
1067; Protein localized to COPII-coated vesicles, involved in vesicle formation and incorporation of specific secretory cargo
1068; Biotin synthase, catalyzes the conversion of dethiobiotin to biotin, which is the last step of the biotin biosynthesis pathway; complements E. coli bioB mutant
1069; Putative protein of unknown function; green fluorescent protein (GFP)-fusion protein localizes to the cytoplasm
1070; Nucleolar single-strand nucleic acid binding protein; associates with small nuclear RNAs
1071; Ribosomal protein L4 of the large (60S) ribosomal subunit, nearly identical to Rpl8 Bp and has similarity to rat L7a ribosomal protein; mutation results in decreased amounts of free 60S subunits
1072; Glycerol kinase, converts glycerol to glycerol-3-phosphate; glucose repression of expression is mediated by Adr1p and Ino2p-Ino4p; derepression of expression on non-fermentable carbon sources is mediated by Opi1p and Rsf1p
1073; v-SNARE protein involved in Golgi transport, homolog of the mammalian protein GOS-28/GS28
1074; Major component of the proteasome; tethers the proteasome core particle to the regulatory particle, and enhances the stability of the proteasome
1075; Cytoplasmic protein required for replication of Brome mosaic virus in S. cerevisiae, which is a model system for studying replication of positive-strand RNA viruses in their natural hosts
1076; Transcriptional repressor involved in the response to pH; required for alkaline pH-stimulated differentiation pathways such as haploid invasive growth and sporulation; activated by proteolytic processing; has similarity to the A. nidulans transcription factor PacC
1077; One of 11 subunits of the SWI/SNF chromatin remodeling complex involved in transcriptional regulation; functions interdependently in transcriptional activation with Snf2p and Snf5p
1078; Putative RNA-binding protein required for the expression of early and middle sporulation genes
1079; Protein required for sporulation
1080; The authentic, non-tagged protein was localized to the mitochondria
1081; Protein of unknown function, homologous to the medium chain of mammalian clathrin-associated protein complex; involved in vesicular transport
1082; Plasma membrane urea transporter, expression is highly sensitive to nitrogen catabolite repression and induced by allophanate, the last intermediate of the allantoin degradative pathway
1083; Protein component of the small (40S) ribosomal subunit; overproduction suppresses mutations affecting RNA polymerase III-dependent transcription; has similarity to E. coli S10 and rat S20 ribosomal proteins
1084; Putative protein of unknown function; predicted to be a member of the ovarian tumor-like (OTU) superfamily of cysteine proteases; green fluorescent protein (GFP)-fusion protein localizes to the cytoplasm
1085; Putative protein of unknown function, has some homology to Ugp1p, which encodes UDP-glucose pyrophosphorylase
1086; 5-phospho-ribosyl-1(alpha)-pyrophosphate synthetase, involved in nucleotide, histidine, and tryptophan biosynthesis; one of a five related enzymes, which are active as heteromultimeric complexes
1087; Putative protein of unknown function, contains a zinc finger region and has homology to human BRAP2, which is a cytoplasmic protein that binds nuclear localization sequences
1088; Signal transducing kinase of the PAK (p21-activated kinase) family, involved in pheromone response and pseudohyphal/invasive growth pathways, activated by Cdc42p; binds Step 4p at a GBB motif present in noncatalytic domains of PAK kinases
1089; Ceramide synthase component, involved in synthesis of ceramide from C26(acyl)-coenzyme A and dihydrosphingosine or phytosphingosine, functionally equivalent to Lac1p
1090; Subunit of the endosomal Vps27p-Hse1p complex required for sorting of ubiquitinated membrane proteins into intralumenal vesicles prior to vacuolar degradation, as well as for recycling of Golgi proteins and formation of lumenal membranes
1091; Mitochondrial carrier protein involved in the accumulation of CoA in the mitochondrial matrix; homolog of human Graves disease protein; does not encode an isozyme of Leu4p, as first hypothesized
1092; Putative protein of unknown function, localizes to the mitochondria
1093; Protein of the nuclear envelope required for the spherical shape of the nucleus; required for normal sporulation
1094; GTP-binding alpha subunit of the heterotrimeric G protein that couples to pheromone receptors; negatively regulates the mating pathway by sequestering G(beta)gamma and by triggering an adaptive response; activates the pathway via Scp160p
1095; Essential protein of the mitochondrial intermembrane space, forms a complex with Tim9p (TIM10 complex) that mediates insertion of hydrophobic proteins at the inner membrane, has homology to Mrs5p, which is also involved in this process 1096; Transcription factor, activated by proteolytic processing in response to signals from the SPS sensor system for external amino acids; activates transcription of amino acid permease genes
1097; Lanosterol 14-alpha-demethylase, catalyzes the C-14 demethylation of lanosterol to form 4,4″-dimethyl cholesta-8,14,24-triene-3-beta-ol in the ergosterol biosynthesis pathway; member of the cytochrome P450 family
1098; Manganese-containing superoxide dismutase; protects cells against oxygen toxicity
1099; Putative protein of unknown function; not an essential gene
1100; Probable mitochondrial seryl-tRNA synthetase, mutant displays increased invasive and pseudohyphal growth
1101; Subunit of the N-terminal acetyltransferase NatA (Nat1p, Ard1p, Nat5p); N-terminally acetylates many proteins, which influences multiple processes such as the cell cycle, heat-shock resistance, mating, sporulation, and telomeric silencing
1102; Meiosis-specific protein, involved in maintaining sister chromatid cohesion during meiosis I as well as promoting proper attachment of kinetochores to the spindle during meiosis I and meiosis II
1103; Putative protein of unknown function, has similarity to proline-tRNA ligase; YHR020 W is an essential gene
1104; Larger subunit of the mitochondrial processing protease, essential processing enzyme that cleaves the N-terminal targeting sequences from mitochondrially imported proteins
1105; Homoserine kinase, conserved protein required for threonine biosynthesis; expression is regulated by the GCN4-mediated general amino acid control pathway
1106; Non-ATPase base subunit of the 19S regulatory particle of the 26S proteasome; may participate in the recognition of several ligands of the proteasome; contains a leucine-rich repeat (LRR) domain, a site for protein-protein interactions 1107; Dipeptidyl aminopeptidase, synthesized as a glycosylated precursor; localizes to the vacuolar membrane; similar to Ste13p
1108; Protein of unknown function that is a member of the PhzF superfamily, although unlike its bacterial homolog, is most likely not involved in phenazine production; possibly involved in a membrane regulation metabolic pathway
1109; Protein of unknown function that is a member of the PhzF superfamily, although unlike its bacterial homolog, is most likely not involved in phenazine production; possibly involved in a membrane regulation metabolic pathway
1110; Serine/threonine MAP kinase involved in regulating the maintenance of cell wall integrity and progression through the cell cycle; regulated by the PKC1-mediated signaling pathway
1111; DNA helicase involved in rDNA replication and Ty1 transposition; structurally and functionally related to Pif1p
1112; Protein of unresolved function; may function in protein folding and/or rRNA processing, interacts with a chaperone (Hsp82p), two chromatin remodeling factors Rvb1p, Rvb2p) and two rRNA processing factors (Rrp43p, Nop58p)
1113; Essential nuclear envelope integral membrane protein identified as a suppressor of a cold-sensitive mutant of CRM1, a karyopherin; homologous to and interacts with Brr6p, which is a nuclear envelope protein involved in nuclear export
1114; Mitochondrial ribosome recycling factor, essential for mitochondrial protein synthesis and for the maintenance of the respiratory function of mitochondria
1115; Protein of unknown function, green fluorescent protein (GFP)-fusion protein localizes to the endoplasmic reticulum; msc7 mutants are defective in directing meiotic recombination events to homologous chromatids
1116; NADP-cytochrome P450 reductase; involved in ergosterol biosynthesis; associated and coordinately regulated with Erg11p
1117; Putative protein of unknown function; green fluorescent protein (GFP)-fusion protein localizes to the endoplasmic reticulum
1118; Inositol monophosphatase, involved in biosynthesis of inositol and in phosphoinositide second messenger signaling; INM1 expression increases in the presence of inositol and decreases upon exposure to antibipolar drugs lithium and valproate
1119; Arginine/alanine aminopeptidase, overproduction stimulates glycogen accumulation
1120; Serine hydrolase that localizes to both the nucleus and cytoplasm; sequence is similar to Fsh2p and Fsh3p
1121; Divalent metal ion transporter involved in manganese homeostasis; has broad specificity for di-valent and tri-valent metals; post-translationally regulated by levels of metal ions; member of the Nramp family of metal transport proteins
1122; Subunit V1 of cytochrome c oxidase, which is the terminal member of the mitochondrial inner membrane electron transport chain; expression is regulated by oxygen levels
1123; Peptidyl-prolyl cis-trans isomerase (cyclophilin), catalyzes the cis-trans isomerization of peptide bonds N-terminal to proline residues; has a potential role in the secretory pathway
1124; Subunit of the RNA polymerase II mediator complex; associates with core polymerase subunits to form the RNA polymerase II holoenzyme; essential for transcriptional regulation
1125; Protein of unknown function, required for survival upon exposure to K1 killer toxin
1126; Constituent of 66S pre-ribosomal particles, required for ribosomal large subunit maturation; functionally redundant with Ssf2p; member of the Brix family
1127; Mitochondrial 3-hydroxyacyl-thioester dehydratase involved in fatty acid biosynthesis, required for respiratory growth and for normal mitochondrial morphology
1128; Deoxyhypusine synthase, catalyzes formation of deoxyhypusine, the first step in hypusine biosynthesis; triggers posttranslational hypusination of translation elongation factor eIF-5A and regulates its intracellular levels; tetrameric
1129; Protein involved in rRNA processing; component of the exosome 3->5 exonuclease complex with Rrp41p, Rrp42p, Rrp43p and Dis3p
1130; tRNA(m(1)G37)methyltransferase, methylates a tRNA base adjacent to the anticodon that has a role in prevention of frameshifting; highly conserved across Archaea, Bacteria, and Eukarya
1131; Constituent of small nucleolar ribonucleoprotein particles containing H/ACA-type snoRNAs, which are required for pseudouridylation and processing of pre-18S rRNA
1132; Member of an oxysterol-binding protein family with seven members in S. cerevisiae; family members have overlapping, redundant functions in sterol metabolism and collectively perform a function essential for viability
1133; Glutamine-dependent NAD(+) synthetase, essential for the formation of NAD(+) from nicotinic acid adenine dinucleotide
1134; Serine-threonine kinase and endoribonuclease; transmembrane protein that initiates the unfolded protein response signal by regulating synthesis of Hac1p through HAC1 mRNA splicing
1135; Nucleolar protein involved in the assembly of the large ribosomal subunit; constituent of 66S pre-ribosomal particles; contains a sigma(70)-like motif, which is thought to bind RNA
1136; Subunit of the NuA4 histone acetyltransferase complex that acetylates histone H4 and H2A; has similarity to the human tumor suppressor ING1
1137; Mitochondrial arginyl-tRNA synthetase
1138; Member of the Sec24p family; forms a complex, with Sec23p, that is involved in sorting of Pma1p into COPII vesicles; peripheral ER membrane protein; potential Cdc28p substrate
1139; Hypothetical protein
1140; Protein kinase of the PAK/Step 20 kinase family, required for cell integrity possibly through regulating 1,6-beta-glucan levels in the wall; physically interacts with Cdc31p (centrin), which is a component of the spindle pole body
1141; Protein involved in the transport of cell wall components from the Golgi to the cell surface; similar in structure and functionally redundant with Sbe2p; involved in bud growth
1142; Aldose reductase involved in methylglyoxal, d-xylose and arabinose metabolism; stress induced (osmotic, ionic, oxidative, heat shock, starvation and heavy metals); regulated by the HOG pathway
1143; Golgi-localized protein with homology to gamma-adaptin, interacts with and regulates Arf1p and Arf2p in a GTP-dependent manner in order to facilitate traffic through the late Golgi
1144; Protein with similarity to Emp24p and Erv25p, member of the p24 family involved in ER to Golgi transport
1145; Protein that activates Urm1p before its conjugation to proteins (urmylation); one target is the thioredoxin peroxidase Ahp1p, suggesting a role of urmylation in the oxidative stress response
1146; Hypothetical protein
1147; Cytoplasmic aspartyl aminopeptidase; cleaves unblocked N-terminal acidic amino acid residues from peptide substrates; forms a 12 subunit homo-oligomeric complex; inhibited by EDTA and 1,10-phenanthroline; M18 metalloprotease family member
1148; Protein involved in regulating spindle position and orientation, functionally redundant with Dma2p; homolog of S. pombe Dma1 and H. sapiens Chfr
1149; Mitochondrial outer membrane protein with similarity to Tom70p; probable minor component of the TOM (translocase of outer membrane) complex responsible for recognition and import of mitochondrially directed proteins
1150; Histone methyltransferase, subunit of the COMPASS (Set1C) complex which methylates histone H3 on lysine 4; required in transcriptional silencing near telomeres and at the silent mating type loci; contains a SET domain
1151; DNA-binding protein of the mitochondria involved in repair of mitochondrial DNA, has ATPase activity and binds to DNA mismatches; has homology to E. coli MutS; transcription is induced during meiosis
1152; Protein containing an Lsm domain and an AD domain; may bind RNA and have a role in RNA processing
1153; Protein required for cell viability
1154; Meiosis-specific transcription factor required for exit from pachytene and for full meiotic recombination; activates middle sporulation genes; competes with Sum1p for binding to promoters containing middle sporulation elements (MSE)
1155; (H)igh copy (S)uppressor of (N)34 dominant negative allele of SEC4. Suppression is very specific to this allele. It has no affect on the analogous YPT1 allele. No homology or known function.
1156; Actin-related protein of the dynactin complex; required for spindle orientation and nuclear migration; putative ortholog of mammalian centractin
1157; Hypothetical protein
1158; Palmitoylated, plasma membrane-bound casein kinase I isoform; shares redundant functions with Yck2p in morphogenesis, proper septin assembly, endocytic trafficking; provides an essential function overlapping with that of Yck2p
1159; Protein required for spore wall maturation; expressed during sporulation; may be a component of the spore wall
1160; Protein of unknown function, involved in chitin biosynthesis by regulating Chs3p export from the ER
1161; RNA polymerase subunit, found in RNA polymerase complexes I, II, and III
1162; Deaminase required for dCTP and dTTP synthesis; expression is cell cycle regulated
1163; Mitochondrial ribosomal protein of the large subunit
1164; Component of the SSU processome, which is required for pre-18S rRNA processing, essential protein that interacts with Mpp10p and mediates interactions of Imp4p and Mpp10p with U3 snoRNA
1165; Hypothetical protein
1166; Nucleolar protein of unknown function, positive regulator of exit from mitosis; involved in regulating the release of Cdc14p from the nucleolus in early anaphase; proposed to play similar role in meiosis
1167; Non-essential component of U5 snRNP; nuclear protein; physically interacts with Irr1p of cohesin complex; may link together proteins involved in chromosome segregation, mRNA splicing and DNA replication
1168; Protein involved in early stages of meiotic recombination; required for meiotic crossing over; forms a complex with Rec102p and Spo11p necessary during the initiation of recombination
1169; Part of a two-member peroxin family (Pex18p and Pex21p) specifically required for peroxisomal targeting of the Pex7p peroxisomal signal recognition factor and PTS2 peroxisomal matrix proteins
1170; Protein involved in clathrin cage assembly; binds Pan1p and clathrin; homologous to Yap1802p, member of the AP180 protein family
1171; Hypothetical protein
1172; Essential tripartite DNA replication factor with single-stranded DNA-dependent ATPase, ATP-dependent nuclease, and helicase activities; required for Okazaki fragment processing; involved in DNA repair pathways; potential Cdc28p substrate
1173; Component of the U4/U6-U5 snRNP complex, involved in the second catalytic step of splicing
1174; Subunit of the anaphase-promoting complex/cyclosome (APC/C), which is a ubiquitin-protein ligase required for degradation of anaphase inhibitors, including mitotic cyclins, during the metaphase/anaphase transition
1175; Protein involved in nuclear export of the large ribosomal subunit; acts as a Crm1p-dependent adapter protein for export of nascent ribosomal subunits through the nuclear pore complex
1176; Component of the microtubule-nucleating Tub4p (gamma-tubulin) complex; interacts with Spc110p at the spindle pole body (SPB) inner plaque and with Spc72p at the SPB outer plaque
1177; Activator of multidrug resistance genes, forms a heterodimer with Pdr1p; contains a Zn(II)₂Cys6 zinc finger domain that interacts with a PDRE (pleotropic drug resistance element) in vitro; binds Sin3p in a two-hybrid assay
1178; Integral membrane protein of the early Golgi apparatus, may function to promote retention of proteins in the early Golgi compartment; mutation affects protein N-glycosylation and cell wall integrity
1179; Protein of unknown function; green fluorescent protein (GFP)-fusion protein localizes to the cell periphery and cytoplasm
1180; 6-phosphogluconate dehydrogenase (decarboxylating), catalyzes an NADPH regenerating reaction in the pentose phosphate pathway; required for growth on D-glucono-delta-lactone and adaptation to oxidative stress
1181; Protein involved in the control of meiotic nuclear division and coordination of meiosis with spore formation; transcription is induced midway through meiosis
1182; Subunit of TORC1, a rapamycin-sensitive complex involved in growth control that contains Tor1p or Tor2p, Lst8p and Tco89p; contains four HEAT repeats and seven WD-40 repeats; may act as a scaffold protein to couple TOR and its effectors
1183; Subunit of the Elp4p-Iki1p-Elp6p-subcomplex of RNA polymerase II elongator complex, which is a histone acetyltransferase; iki1 mutations confer resistance to the K. lactis toxin zymocin
1184; Transmembrane protein subunit of the glycosylphosphatidylinositol transamidase complex that adds GPIs to newly synthesized proteins; human PIG-Tp homolog
1185; One of two (see also PTH2) mitochondrially-localized peptidyl-tRNA hydrolases; dispensable for cell growth and for mitochondrial respiration
1186; Farnesyl-diphosphate farnesyl transferase (squalene synthase), joins two farnesyl pyrophosphate moieties to form squalene in the sterol biosynthesis pathway
1187; Subunit of a complex with Ctf18p that shares some subunits with Replication Factor C and is required for sister chromatid cohesion
1188; Mitochondrial inner membrane protein with similarity to Mdm32p, required for normal mitochondrial morphology and inheritance; interacts genetically with MMM1, MDM10, MDM12, and MDM34
1189; Nuclear envelope protein that interacts with the vacuolar membrane protein Vac8p to promote formation of nucleus-vacuole junctions during piecemeal microautophagy of the nucleus (PMN)
1190; Nucleolar protein, component of the small subunit (SSU) processome containing the U3 snoRNA that is involved in processing of pre-18S rRNA
1191; The authentic, non-tagged protein was localized to the mitochondria
1192; Non-ATPase base subunit of the 19S regulatory particle (RP) of the 26S proteasome; N-terminus plays a role in maintaining the structural integrity of the RP; binds selectively to polyubiquitin chains; homolog of the mammalian S5a protein
1193; Hypothetical protein
1194; Alpha mannosidase-like protein of the endoplasmic reticulum required for degradation of glycoproteins but not for processing of N-linked oligosaccharides
1195; Protein kinase that regulates signal transduction activity and G1 progression, controls cAPK activity, required for nitrogen activation of the FGM pathway, involved in life span regulation, homologous to mammalian Akt/PKB
1196; Nuclear response regulator and transcription factor, part of a branched two-component signaling system; required for optimal induction of heat-shock genes in response to oxidative stress; involved in osmoregulation
1197; Zinc-finger protein of unknown function, contains one canonical and two unusual fingers in unusual arrangements; deletion enhances replication of positive-strand RNA virus
1198; Mitochondrial branched-chain amino acid aminotransferase, homolog of murine ECA39; highly expressed during logarithmic phase and repressed during stationary phase
1199; Putative S-adenosylmethionine-dependent methyltransferase of the seven beta-strand family
1200; Putative protein with similarity to the allantoate permease (Dal5p) subfamily of the major facilitator superfamily; mRNA expression is elevated by sulfur limitation; YIL166C is a non-essential gene
1201; 3-ketoacyl-CoA thiolase with broad chain length specificity, cleaves 3-ketoacyl-CoA into acyl-CoA and acetyl-CoA during beta-oxidation of fatty acids
1202; Formin, nucleates the formation of linear actin filaments, involved in cell processes such as budding and mitotic-spindle orientation which require the formation of polarized actin cables, functionally redundant with BNI1
1203; Putative protein of unknown function; green fluorescent protein (GFP)-fusion protein localizes to the vacuole
1204; Transcriptional activator involved in maintenance of ion homeostasis and protection against DNA damage caused by bleomycin and other oxidants, contains a C-terminal leucine-rich repeat
1205; Hypothetical protein
1206; Hypothetical protein
1207; Essential, chromatin-associated protein involved in the initiation of DNA replication; required for the association of the MCM2-7 complex with replication origins
1208; Non-essential protein of unknown function
1209; Component of the holoenzyme form of RNA polymerase transcription factor TFIIH, has DNA-dependent ATPase/helicase activity and is required, with Rad3p, for unwinding promoter DNA; involved in DNA repair; homolog of human ERCC3
1210; Subunit beta of the cytosolic chaperonin Cct ring complex, related to Tcp1p, required for the assembly of actin and tubulins in vivo
1211; Integral plasma membrane protein required for axial budding in haploid cells, localizes to the incipient bud site and bud neck; glycosylated by Pmt4p; potential Cdc28p substrate
1212; Minor isoform of tropomyosin, binds to and stabilizes actin cables and filaments, which direct polarized cell growth and the distribution of several organelles; appears to have distinct and also overlapping functions with Tpm1p
1213; Putative metalloprotease
1214; Protein of unknown function, major constituent of the mitochondrial outer membrane; located on the outer (cytosolic) face of the outer membrane
1215; Cytoplasmic protein of unknown function; identified as a high-copy suppressor of the synthetic lethality of a sis2 sit4 double mutant, suggesting a role in G1/S phase progression; similar to Mlf3p
1216; Protein required for transport of flavin adenine dinucleotide (FAD) from mitochondria, where it is synthesized from riboflavin, to the cytosol
1217; Proposed transcriptional activator, member of the Gal4p family of zinc cluster proteins
1218; DNA repair and TFIIH regulator, required for both nucleotide excision repair (NER) and RNA polymerase II (RNAP II) transcription; possible role in assembly of a multiprotein complex(es) required for NER and RNAP II transcription
1219; Putative protein of unknown function; green fluorescent protein (GFP)-fusion protein localizes to the nucleolus
1220; Component of the mitochondrial alpha-ketoglutarate dehydrogenase complex, which catalyzes a key step in the tricarboxylic acid (TCA) cycle, the oxidative decarboxylation of alpha-ketoglutarate to form succinyl-CoA
1221; NADPH-dependent 1-acyl dihydroxyacetone phosphate reductase found in lipid particles and ER; involved in phosphatidic acid biosynthesis and required for spore germination; capable of metabolizing mammalian steroid hormones
1222; Protein of the SUN family (Sim1p, Uth1p, Nca3p, Sun4p) that may participate in DNA replication, promoter contains SCB regulation box at −300 bp indicating that expression may be cell cycle-regulated
1223; Putative transcriptional activator that promotes recovery from pheromone induced arrest; inhibits both alpha-factor induced G1 arrest and repression of CLN1 and CLN2 via SCB/MCB promoter elements; potential Cdc28p substrate; SBF regulated
1224; Putative transcriptional regulator; overexpression suppresses the heat shock sensitivity of wild-type RAS2 overexpression and also suppresses the cell lysis defect of an mpk1 mutation
1225; Non-essential small GTPase of the Rho/Rac subfamily of Ras-like proteins involved in the establishment of cell polarity; GTPase activity positively regulated by the GTPase activating protein (GAP) Rgd1p
1226; Stress-inducible dual-specificity MAP kinase phosphatase, negatively regulates Slt2p MAP kinase by direct dephosphorylation, diffuse localization under normal conditions shifts to punctate localization after heat shock
1227; Subunit of the Set3 complex, which is a meiotic-specific repressor of sporulation specific genes that contains deacetylase activity; potential Cdc28p substrate
1228; Component of the Sec23p-Sec24p heterodimeric complex of the COPII vesicle coat; involved in ER to Golgi transport, cargo selection and autophagy; required for the binding of the Sec13 complex to ER membranes; homologous to Lst1p and Lss1p
1229; 6-phosphofructo-2-kinase, inhibited by phosphoenolpyruvate and sn-glycerol 3-phosphate, has negligible fructose-2,6-bisphosphatase activity, transcriptional regulation involves protein kinase A
1230; Phosphoinositide PI4,5P(2) binding protein, forms a complex with Slm2p; acts downstream of Mss4p in a pathway regulating actin cytoskeleton organization in response to stress; subunit of and phosphorylated by the TORC2 complex
1231; Essential nuclear protein, required for accumulation of box H/ACA snoRNAs and for rRNA processing; interacts with Naf1p
1232; Hypothetical protein
1233; Protein serine/threonine kinase; regulates the organization and function of the actin cytoskeleton through the phosphorylation of the Pan1p-Sla1p-End3p protein complex
1234; Homo-isocitrate dehydrogenase, an NAD-linked mitochondrial enzyme required for the fourth step in the biosynthesis of lysine, in which homo-isocitrate is oxidatively decarboxylated to alpha-ketoadipate
1235; Mitochondrial ribosomal protein of the small subunit
1236; Protein required for cell viability
1237; Integral ER membrane protein with type-III transmembrane domains; mutations cause defects in cortical ER morphology in both the mother and daughter cells
1238; Putative transporter, member of a family of seven S. cerevisiae genes (AVT1-7) related to vesicular GABA-glycine transporters
1239; Hypothetical protein
1240; Putative mannosyltransferase involved in protein glycosylation; member of the KRE2/MNT1 mannosyltransferase family
1241; Component of the Rpd3p/Sin3p deacetylase complex required for its structural integrity and catalytic activity, involved in transcriptional silencing and required for sporulation; cells defective in SDS3 display pleiotropic phenotypes
1242; Homolog to human PPCS
1243; RING finger protein that interacts with the arginine methyltransferase Hmt1p to regulate methylation of Npl3p, which modulates Npl3p function in mRNA processing and export; has similarity to Air2p
1244; Threonyl-tRNA synthetase, essential cytoplasmic protein
1245; Subunit of the 26S proteasome, substrate of the N-acetyltransferase Nat1p
1246; 3-phosphoglycerate dehydrogenase, catalyzes the first step in serine and glycine biosynthesis; isozyme of Ser3p
1247; Meiosis-specific DNA binding protein that displays Red1p dependent localization to the unsynapsed axial-lateral elements of the synaptonemal complex; required for homologous chromosome synapsis and chiasma formation
1248; Acidic protein of the mitochondrial matrix involved in oxidative phosphorylation; related to the human complement receptor gC1q-R
1249; Hypothetical protein
1250; Mitochondrial outer membrane protein involved in membrane fission, required for localization of Dnm1p and Mdv1p during mitochondrial division
1251; Protein of unknown function involved in nuclear processes of the Ran-GTPase cycle; involved in nuclear protein export; contains Ran Binding Domain and FxFG repeats; interacts with Srm1p, GTP-Gsp1p, Rna1p and Crm1p; is not essential
1252; Subunit of the ARP2/3 complex, which is required for the motility and integrity of cortical actin patches
1253; Component of U1 snRNP required for mRNA splicing via spliceosome; may interact with poly(A) polymerase to regulate polyadenylation; homolog of human U1 70K protein
[0207] 1254; Putative protein of unknown function; green fluorescent protein (GFP)-fusion protein localizes to the cytoplasm and nucleus
   1255; Constitutively expressed isoform of DL-glycerol-3-phosphatase; involved in glycerol biosynthesis, induced in response to both anaerobic and, along with the Hor2p/Gpp2β isoform, osmotic stress
   1256; Mitochondrial protein involved in maintenance of the mitochondrial genome
   1257; Pho85p cyclin of the Pho80p subfamily, forms a functional kinase complex with Pho85p which phosphorylates Mmr1p and is regulated by Pho81p; involved in glycogen metabolism, expression is cell-cycle regulated
   1258; Protein of unknown function, involved in filamentous growth
   1259; Protein involved in the retrograde transport from the Golgi complex to the ER and the endosomal membrane traffic; putative aminophospholipid translocase; member of the highly conserved Drs2 family of P-type ATPases
   1260; Plasma membrane protein of unknown function; truncation and overexpression suppresses lethality of G-alpha protein deficiency
   1261; F-box protein containing five copies of the WD40 motif, controls cell cycle function, sulfur metabolism, and methionine biosynthesis as part of the ubiquitin ligase complex; interacts with and regulates Met4p, localizes within the nucleus
   1262; Putative type-1 protein phosphatase targeting subunit that tethers Glc7p type-1 protein phosphatase to Gsy2p glycogen synthase
   1263; ADP-ribosylation factor (ARF) GTPase activating protein (GAP) effector, involved in Trans-Golgi-Network (TGN) transport; contains C2C2H2 cysteine/histidine motif
   1264; Hypothetical protein
   1265; Golgi vesicle protein of unknown function; localizes to both early and late Golgi vesicles
   1266; Protein involved in nucleocytoplasmic transport of mRNA
   1267; Hypothetical protein
   1268; Subunit of the CCR4-NOT complex, which is a global transcriptional regulator with roles in transcription initiation and elongation and in mRNA degradation
   1269; Pheromone-regulated protein, predicted to have 4 transmembrane segments and a coiled coil domain; regulated by Ste12p
   1270; Alpha catalytic subunit of casein kinase 2, a Ser/Thr protein kinase with roles in cell growth and proliferation; the holoenzyme also contains CKA2, CKB1 and CKB2, the many substrates include transcription factors and all RNA polymerases
   1271; Beta subunit of the capping protein (CP) heterodimer (Cap1p and Cap2p) which binds to the barbed ends of actin filaments preventing further polymerization; localized predominantly to cortical actin patches
   1272; Regulatory subunit of the cyclic AMP-dependent protein kinase (PKA), a component of a signaling pathway that controls a variety of cellular processes, including metabolism, cell cycle, stress response, stationary phase, and sporulation 1273; Protein of unknown function; null mutant shows K1 killer toxin resistance
   1274; Hypothetical protein
   1275; Yeast KE4, yeast ortholog of the mouse KE4
   1276; Peripheral mitochondrial membrane protein involved in mitochondrial protein import, tethers essential chaperone Ssc1p to the translocon channel at the matrix side of the inner membrane
   1277; RNA polymerase II third largest subunit B44, part of central core; similar to prokaryotic alpha subunit
   1278; Protein required for pre-rRNA processing and 40S ribosomal subunit assembly 1279; Protein involved in proteasome-dependent catabolite degradation of fructose-1,6-bisphosphatase (FBPase); localized to the nucleus and the cytoplasm
   1280; Protein of unknown function proposed to be involved in nuclear pore complex biogenesis and maintenance as well as protein folding; has similarity to the mammalian BAG-1 protein
   1281; Aspartyl protease secreted into the periplasmic space of mating type a cells, helps cells find mating partners, cleaves and inactivates alpha factor allowing cells to recover from alpha-factor-induced cell cycle arrest
   1282; Cell wall mannoprotein of the Srp1p/Tip1p family of serine-alanine-rich proteins; expressed under anaerobic conditions and required for anaerobic growth
   1283; Nuclear thiol peroxidase which functions as an allyl-hydroperoxide reductase during post-diauxic growth
   1284; Ubiquitin-like protein with only weak sequence similarity to ubiquitin; depends on the E1-like activating enzyme Uba4p; molecular function of the Urm1p pathway is unknown, but it is required for normal growth, particularly at high temperature
   1285; Protein with similarity to the p27 subunit of mammalian proteasome modulator; not essential; interacts with Rpn4p
   1286; Pdi1p (protein disulfide isomerase)-related protein involved in endoplasmic reticulum retention of resident ER proteins
   1287; Phosphatidylinositol 4,5-bisphosphate 5-phosphatase, synaptojanin-like protein with an N-terminal Sac1 domain, plays a role in phosphatidylinositol 4,5-bisphosphate homeostasis and in endocytosis; null mutation confers cold-tolerant growth
   1288; Member of the DEAH family of helicases, functions in an error-free DNA damage bypass pathway that involves homologous recombination, mutations confer a mutator phenotype
   1289; Cytosolic J-domain-containing protein, required for peroxisomal protein import and involved in peroxisome assembly, homologous to E. coli DnaJ
   1290; Part of actin cytoskeleton-regulatory complex Pan1p-Sla1p-End3p, associates with actin patches on the cell cortex; promotes protein-protein interactions essential for endocytosis; previously thought to be a subunit of poly(A) ribonuclease
   1291; Putative protein of unknown function; green fluorescent protein (GFP)-fusion protein localizes to the cytoplasm; YIR007W is a non-essential gene
   1292; Subunit of DNA primase, which is required for DNA synthesis and double-strand break repair
   1293; U2B component of U2 snRNP, involved in splicing, binds the U2 snRNA stem-loop IV in vitro; does not contain the conserved C-terminal RNA binding domain found in other family members
   1294; Essential component of the M1ND kinetochore complex (Mtw1p Including Nnf1p-Nsl1p-Dsn1p) which joins kinetochore subunits contacting DNA to those contacting microtubules; important for chromosome segregation
   1295; Protein containing GATA family zinc finger motifs
   1296; 18 kDa catalytic subunit of the Signal Peptidase Complex (SPC; Spc1p, Spc2p, Spc3p, and Sec11p) which cleaves the signal sequence of proteins targeted to the endoplasmic reticulum
   1297; Allantoin permease; expression sensitive to nitrogen catabolite repression and induced by allophanate, an intermediate in allantoin degradation
   1298; Allantoicase, converts allantoate to urea and ureidoglycolate in the second step of allantoin degradation; expression sensitive to nitrogen catabolite repression and induced by allophanate, an intermediate in allantoin degradation
   1299; Malate synthase, role in allantoin degradation unknown; expression sensitive to nitrogen catabolite repression and induced by allophanate, an intermediate in allantoin degradation
   1300; Ureidoglycolate hydrolase, converts ureidoglycolate to glyoxylate and urea in the third step of allantoin degradation; expression sensitive to nitrogen catabolite repression
   1301; ER membrane protein involved, with its homolog Spt23p, in regulation of OLE1 transcription; inactive ER form dimerizes and one subunit is then activated by ubiquitin/proteasome-dependent processing followed by nuclear targeting
   1302; Saccharopine dehydrogenase (NAD+, L-lysine-forming), catalyzes the conversion of saccharopine to L-lysine, which is the final step in the lysine biosynthesis pathway
   1303; Hypothetical protein
   1304; Thiol peroxidase that functions as a hydroperoxide receptor to sense intracellular hydroperoxide levels and transduce a redox signal to the Yap1p transcription factor
   1305; Putative GPI-anchored aspartic protease
   1306; Putative protein of unknown function; YIR042c is a non-essential gene
   1307; Putative protein of unknown function; YIR042c is a non-essential gene
   1308; Hypothetical protein
   1309; Plasma membrane transporter that transports tetra- and pentapeptides and glutathione; member of the OPT family
   1310; RING-finger peroxin, peroxisomal membrane protein with a C-terminal zinc-binding RING domain, forms putative translocation subcomplex with Pex10p and Pex12p which functions in peroxisomal matrix protein import
   1311; Mitochondrial protein that interacts with the 5′-untranslated region of the COB mRNA and has a role in its stability and translation; found in a complex at the inner membrane along with Pet309p
   1312; Hypothetical protein
   1313; F-box protein involved in recycling plasma membrane proteins internalized by endocytosis; localized to sites of polarized growth
   1314; Subunit of the SF3a splicing factor complex, required for spliceosome assembly
   1315; Hypothetical protein
   1316; Ubiquitin-specific protease present in the nucleus and cytoplasm that cleaves ubiquitin from ubiquitinated proteins
   1317; Hypothetical protein
   1318; Protein kinase that regulates the G2/M transition by inhibition of Cdc28p kinase activity; localizes to the nucleus and to the daughter side of the mother-bud neck; homolog of S. pombe Wee1p; potential Cdc28p substrate
   1319; Alpha-1,2-mannosyltransferase, responsible for addition of the second alpha-1,2-linked mannose of the branches on the mannan backbone of oligosaccharides, localizes to an early Golgi compartment
   1320; Hypothetical protein
   1321; Subunit of a Golgi mannosyltransferase complex that also contains Anp1p, Mn9p, Mnn10p, and Hoc1p, and mediates elongation of the polysaccharide mannan backbone; has homology to Mnn10p
   1322; Molecular chaperone, required for the assembly of alpha and beta subunits into the F1 sector of mitochondrial F1F0 ATP synthase
   1323; Subunit of heterohexameric prefoldin, which binds cytosolic chaperonin and transfers target proteins to it; involved in the biogenesis of actin and of alpha- and gamma-tubulin
   1324; One of 11 subunits of the SWI/SNF chromatin remodeling complex that regulates transcription by remodeling chromosomes; required for transcription of many genes, including ADH1, ADH2, GAL1, HO, INO1 and SUC2
   1325; Glycoprotein involved in cell wall beta-glucan assembly; null mutation leads to severe growth defects, aberrant multibudded morphology, and mating defects
   1326; Subunit of heterotrimeric Replication Factor A (RF-A), which is a highly conserved single-stranded DNA binding protein involved in DNA replication, repair, and recombination
   1327; Vacuolar carboxypeptidase yscS; expression is induced under low-nitrogen conditions
   1328; Farnesyl pyrophosphate synthetase, has both dimethylallyltranstransferase and geranyltranstransferase activities; catalyzes the formation of C15 farnesyl pyrophosphate units for isoprenoid and sterol biosynthesis
   1329; Subunit 8 of ubiquinol cytochrome-c reductase complex, which is a component of the mitochondrial inner membrane electron transport chain; oriented facing the intermembrane space; expression is regulated by Abf1p and Cpf1p
   1330; Putative protein kinase; overexpression increases sodium and lithium tolerance, whereas gene disruption increases cation and low pH sensitivity and impairs potassium uptake, suggesting a role in regulation of Trk1p and/or Trk2p transporters
   1331; Subunit of cytoplasmic cAMP-dependent protein kinase, which contains redundant catalytic subunits Tpk1p, Tpk2p, and Tpk3p and regulatory subunit Bcy1p; promotes vegetative growth in response to nutrients; inhibits filamentous growth
   1332; The authentic, non-tagged protein was localized to the mitochondria
   1333; Mannose-containing glycoprotein constituent of the cell wall; member of the PIR (proteins with internal repeats) family
   1334; Fructose-2,6-bisphosphatase, required for glucose metabolism
   1335; Endosomal protein that is a subunit of the membrane-associated retromer complex essential for endosome-to-Golgi retrograde transport; forms a subcomplex with Vps26p and Vps29p that selects cargo proteins for endosome-to-Golgi retrieval 1336; Hypothetical protein; has similarity to F-box proteins
   1337; RNA polymerase I subunit A34.5
   1338; Hypothetical protein
   1339; Protein involved in modulation of Ime2p activity during meiosis, appears to act indirectly to promote Ime2p-mediated late meiotic functions; found in growing cells and degraded during sporulation
   1340; Hypothetical protein
   1341; Essential constituent of the mitochondrial inner membrane presequence translocase; interacts with Pam18p to recruit the presequence translocase-associated motor (PAM complex) and also required for protein sorting during import
   1342; Serine-threonine protein kinase that is part of a glucose-sensing system involved in growth control in response to glucose availability; translocates from the cytoplasm to the nucleus and phosphorylates Pop2p in response to a glucose signal
   1343; RNA polymerase II subunit B32; forms two subunit dissociable complex with Rpb7p; dispensable under some environmental conditions; involved in export of mRNA to cytoplasm under stress conditions
   1344; Translation initiation factor eIF4A, identical to Tif1p; DEA(D/H)-box RNA helicase that couples ATPase activity to RNA binding and unwinding; forms a dumbbell structure of two compact domains connected by a linker; interacts with eIF4G1345; Long-chain base-1-phosphate phosphatase, regulates ceramide and long-chain base phosphates levels, involved in incorporation of exogenous long chain bases in sphingolipids

### 1346; ORF, Uncharacterized

[0208] 1347; Mitochondrial iron transporter of the mitochondrial carrier family (CF), very similar to and functionally redundant with Mrs4p; functions under low-iron conditions; may transport other cations in addition to iron
1348; MAP kinase kinase that plays a pivotal role in the osmosensing signal-transduction pathway, activated under severe osmotic stress
1349; Identified by homology to Ashbya gossypii
1350; Nit protein, one of two proteins in S. cerevisiae with similarity to the Nit domain of NitFhit from fly and worm and to the mouse and human Nit protein which interacts with the Fhit tumor suppressor, nitrilase superfamily member
1351; Lsm (Like Sm) protein; forms heteroheptameric complex (with Lsm2p, Lsm3p, Lsm4p, Lsm5p, Lsm6p, and Lsm7p) involved in degradation of cytoplasmic mRNAs
1352; Hypothetical protein
1353; Endoplasmic reticulum (ER) resident protein required for ER exit of the high-affinity phosphate transporter Pho84p, specifically required for packaging of Pho84p into COPII vesicles
1354; Protein that functions with Nca2p to regulate mitochondrial expression of subunits 6 (Atp6p) and 8 (Atp8p) of the Fo-F1 ATP synthase; member of the SUN family
1355; Nucleosome assembly factor, involved in chromatin assembly after DNA replication, anti-silencing protein that causes derepression of silent loci when overexpressed
1356; Peripheral protein of the cytosolic face of the mitochondrial outer membrane, required for mitochondrial fission; interacts with Fis1p and with the dynamin-related GTPase Dnm1p; contains WD repeats
1357; Serine/threonine protein kinase involved in activation of meiosis, associates with Ime1p and mediates its stability, activates Ndt80p; ME2 expression is positively regulated by Ime1p
1358; Constituent of the mitochondrial import motor associated with the presequence translocase, along with Ssc1p, Tim44p, Mge1p, and Pam18p; has similarity to J-domain containing proteins
1359; Hypothetical protein
1360; Phosphatidylinositol 4-kinase that binds Las17p, which is a homolog of human Wiskott-Aldrich Syndrome protein involved in actin patch assembly and actin polymerization
1361; Protein that forms a complex with the Sit4p protein phosphatase and is required for its function; member of a family of similar proteins including Sap4p, Sap155p, and Sap190p
1362; DNA helicase and DNA-dependent ATPase involved in DNA repair, required for proper timing of commitment to meiotic recombination and the transition from Meiosis I to Meiosis II; potential Cdc28p substrate
1363; Essential BRCT repeat protein, required on the prereplicative complex at replication origins for loading DNA polymerases to initiate DNA synthesis, also required for S/M checkpoint control
1364; C6 zinc cluster transcriptional activator that binds to the carbon source-responsive element (CSRE) of gluconeogenic genes; involved in the positive regulation of gluconeogenesis; regulated by Snf1p protein kinase; localized to the nucleus
1365; Ornithine carbamoyltransferase (carbamoylphosphate:L-ornithine carbamoyltransferase), catalyzes the sixth step in the biosynthesis of the arginine precursor ornithine
1366; tRNA ligase, required for tRNA splicing; composed of three essential domains containing the phosphodiesterase, polynucleotide kinase, and ligase activities required for ligation; localized at the inner membrane of the nuclear envelope
1367; Essential 70 kDa subunit of the exocyst complex (Sec3p, Sec5p, Sec6p, Sec8p, Sec10p, Sec15p, Exo70p, and Exo84p), which has the essential function of mediating polarized targeting of secretory vesicles to active sites of exocytosis
1368; Nuclear actin-related protein involved in chromatin remodeling, component of chromatin-remodeling enzyme complexes
1369; Essential RNA-binding G protein effector of mating response pathway, predominantly associated with nuclear envelope and ER, interacts in mRNA-dependent manner with translating ribosomes via multiple KH domains, similar to vertebrate vigilins
1370; Protein of unknown function, has similarity to Pry2p and Pry3p and to the plant PR-1 class of pathogen related proteins
1371; Subunit of the multiprotein cohesin complex required for sister chromatid cohesion in mitotic cells; also required, with Rec8p, for cohesion and recombination during meiosis; phylogenetically conserved SMC chromosomal ATPase family member
1372; Subunit of the GINS complex (Sld5p, Psf1p, Psf2p, Psf3p), which is localized to DNA replication origins and implicated in assembly of the DNA replication machinery
1373; Hypothetical protein
1374; Non-essential intracellular esterase that can function as an S-formylglutathione hydrolase; may be involved in the detoxification of formaldehyde, which can be metabolized to S-formylglutathione; similar to human esterase D
1375; Subunit of ISW2/yCHRAC chromatin accessibility complex along with Itc1p, Isw2p, and Dpb4p; involved in inheritance of telomeric silencing
1376; Mitochondrial ribosomal protein of the large subunit
1377; Integral plasma membrane protein involved in the synthesis of the glycosylphosphatidylinositol (GPI) core structure; mutations affect cell wall integrity
1378; Subunit of the nuclear pore complex (NPC), forms a subcomplex with Nup159p and Nsp1p, interacts with Nup116p and is required for proper localization of Nup116p in the NPC
1379; Arylformamidase, involved in biosynthesis of nicotinic acid from tryptophan via kynurenine pathway; potential Cdc28p substrate
1380; Vacuolar membrane protein involved in the ATP-dependent transport of arginine into the vacuole and possibly in balancing ion homeostasis; homolog of human CLN3 involved in Batten disease (juvenile onset neuronal ceroid lipofuscinosis)
1381; Subunit of TORC2 (Tor2p-Lst8p-Avo1-Avo2-Tsc11p-Bit61p-Slm1p-Slm2p), a membrane-associated complex that regulates cell cycle-dependent actin cytoskeletal dynamics during polarized growth and cell wall integrity
1382; probable serine/threonine kinase
1383; Vacuolar protein sorting protein that forms part of the multimeric membrane-associated retromer complex along with Vps35p, Vps29p, Vps17p, and Vps5p; essential for endosome-to-Golgi retrograde protein transport
1384; Glyceraldehyde-3-phosphate dehydrogenase, isozyme 1, involved in glycolysis and gluconeogenesis; tetramer that catalyzes the reaction of glyceraldehyde-3-phosphate to 1,3 bis-phosphoglycerate; detected in the cytoplasm and cell-wall
1385; Dead-box family ATP dependent helicase required for mRNA export from the nucleus; co-factor of the exosome complex, required for 3′ end formation of 5.8S rRNA
1386; Minor succinate dehydrogenase isozyme; homologous to Sdh1p, the major isozyme responsible for the oxidation of succinate and transfer of electrons to ubiquinone; induced during the diauxic shift in a Cat8p-dependent manner
1387; Putative protein of unknown function; expression induced during sporulation and repressed during vegetative growth by Sum1p and Hst1p; similar to adjacent open reading frame, YJL037W
1388; Sorting nexin, involved in the retrieval of late-Golgi SNAREs from the post-Golgi endosome to the trans-Golgi network and in cytoplasm to vacuole transport; contains a PX domain; forms complex with Snx41p and Atg20p
1389; Subunit of tRNA-specific adenosine-34 deaminase, forms a heterodimer with Tad3p that converts adenosine to inosine at the wobble position of several tRNAs
1390; ATPase involved in protein import into the ER, also acts as a chaperone to mediate protein folding in the ER and may play a role in ER export of soluble proteins; regulates the unfolded protein response via interaction with Ire1p
1391; Component of the spindle-assembly checkpoint complex, which delays the onset of anaphase in cells with defects in mitotic spindle assembly; forms a complex with Mad1p
1392; Protein possibly involved in assembly of actin patches; interacts with an actin assembly factor Las17p and with the SH3 domains of Type I myosins Myo3p and Myo5p; localized predominantly to cortical actin patches
1393; Essential integral membrane protein required for spindle pole body duplication and for nuclear fusion, localizes to the spindle pole body half bridge, interacts with DnaJ-like chaperone Jem1p and with centrin homolog Cdc31p
1394; RNA polymerase III subunit C17; physically interacts with C31, C11, and TFIIIB70; may be involved in the recruitment of pol III by the preinitiation complex
1395; Essential nucleolar protein required for 18S rRNA synthesis
1396; Subunit of the cytosolic chaperonin Cct ring complex, related to Tcp1p, required for the assembly of actin and tubulins in vivo
1397; Hypothetical protein
1398; Beta subunit of C-terminal domain kinase I (CTDK-I), which phosphorylates the C-terminal repeated domain of the RNA polymerase II large subunit (Rpo21p) to affect both transcription and pre-mRNA 3′ end processing; has similarity to cyclins
1399; Adenylate cyclase, required for cAMP production and cAMP-dependent protein kinase signaling; involved in cell cycle control and glucose and nitrogen repression of sporulation
1400; Integral membrane protein of the Golgi required for targeting of the Arf-like GTPase Arl3p to the Golgi; multicopy suppressor of ypt6 null mutation
1401; Integral membrane protein of the Golgi required for targeting of the Arf-like GTPase Arl3p to the Golgi; multicopy suppressor of ypt6 null mutation
1402; Mitochondrial inner membrane protein, required for assembly of cytochrome c oxidase
1403; Mitochondrial inner membrane protein, required for assembly of cytochrome c oxidase
1404; Alpha subunit of the oligosaccharyltransferase complex of the ER lumen, which catalyzes asparagine-linked glycosylation of newly synthesized proteins
1405; Alpha subunit of the oligosaccharyltransferase complex of the ER lumen, which catalyzes asparagine-linked glycosylation of newly synthesized proteins
1406; Vacuolar transporter, imports large neutral amino acids into the vacuole; member of a family of seven S. cerevisiae genes (AVT1-7) related to vesicular GABA-glycine transporters
1407; Vacuolar transporter, imports large neutral amino acids into the vacuole; member of a family of seven S. cerevisiae genes (AVT1-7) related to vesicular GABA-glycine transporters
1408; Hypothetical protein
1409; Alpha-agglutinin of alpha-cells, binds to Aga1p during agglutination, N-terminal half is homologous to the immunoglobulin superfamily and contains binding site for a-agglutinin, C-terminal half is highly glycosylated and contains GPI anchor
1410; Beta-adaptin, large subunit of the clathrin associated protein complex (AP-2); involved in vesicle mediated transport; similar to mammalian beta-chain of the clathrin associated protein complex
1411; Beta-adaptin, large subunit of the clathrin associated protein complex (AP-2); involved in vesicle mediated transport; similar to mammalian beta-chain of the clathrin associated protein complex
1412; Identified by homology to Ashbya gossypii
1413; Identified by homology to Ashbya gossypii
1414; DNA polymerase III (delta) subunit, essential for cell viability; involved in DNA replication and DNA repair
1415; DNA polymerase III (delta) subunit, essential for cell viability; involved in DNA replication and DNA repair
1416; Alpha subunit of the translation initiation factor eIF2, involved in the identification of the start codon; phosphorylation of Ser51 is required for regulation of translation by inhibiting the exchange of GDP for GTP
1417; Alpha subunit of the translation initiation factor eIF2, involved in the identification of the start codon; phosphorylation of Ser51 is required for regulation of translation by inhibiting the exchange of GDP for GTP
1418; Hypothetical protein
1419; Subunit of the signal peptidase complex (SPC), which cleaves the signal sequence from proteins targeted to the endoplasmic reticulum (ER), homolog of the SPC12 subunit of mammalian signal peptidase complex
1420; Hypothetical protein
1421; Hypothetical protein
1422; Dihydroxyacid dehydratase, catalyzes third step in the common pathway leading to biosynthesis of branched-chain amino acids
1423; Peroxisomal acyl-CoA thioesterase likely to be involved in fatty acid oxidation rather than fatty acid synthesis; conserved protein also found in human peroxisomes; TES1 mRNA levels increase during growth on fatty acids
1424; 3-hydroxyanthranilic acid dioxygenase, required for biosynthesis of nicotinic acid from tryptophan via kynurenine pathway
1425; Peptidyl-prolyl cis-trans isomerase (cyclophilin), catalyzes the cis-trans isomerization of peptide bonds N-terminal to proline residues; binds to Hsp82p and contributes to chaperone activity
1426; Subunit of the RAVE complex (Rav1p, Rav2p, Skp1p), which promotes assembly of the V-ATPase holoenzyme; required for transport between the early and late endosome/PVC and for localization of TGN membrane proteins; potential Cdc28p substrate
1427; Protein required for assembly of cytochrome c oxidase
1428; Protein with similarity to hect domain E3 ubiquitin-protein ligases, not essential for viability
1429; Chloride channel localized to late- or post-Golgi vesicles, involved in iron metabolism; highly homologous to voltage-gated chloride channels in vertebrates
1430; Nucleolar protein required for normal metabolism of the rRNA primary transcript, proposed to be involved in ribosome biogenesis
1431; Third subunit of DNA polymerase delta, involved in chromosomal DNA replication; required for error-prone DNA synthesis in the presence of DNA damage and processivity; interacts with Hys2p, PCNA (Pol30p), and Pol1p
1432; Late endosomal protein involved in late endosome to vacuole trafficking; functional homolog of human obesity receptor gene-related protein (OB-RGRP)
1433; Mitochondrial matrix ATPase that is a subunit of the presequence translocase-associated protein import motor (PAM); involved in protein translocation into the matrix and protein folding; member of the heat shock protein 70 (HSP70) family
1434; Translation initiation factor eIF-5A, promotes formation of the first peptide bond; similar to and functionally redundant with Hyp2p; undergoes an essential hypusination modification; expressed under anaerobic conditions
1435; Cytochrome c, isoform 1; electron carrier of the mitochondrial intermembrane space that transfers electrons from ubiquinone-cytochrome c oxidoreductase to cytochrome c oxidase during cellular respiration
1436; NAD kinase, active as a hexamer; enhances the activity of ferric reductase (Fre1p)
1437; Component of the spliceosome complex involved in pre-mRNA splicing, auxiliary splicing factor that may modulate Syf1p activity and help optimize splicing; isy1 syf2 double mutation activates the spindle checkpoint, causing cell cycle arrest
1438; Fumarate reductase, catalyzes the reduction of fumarate to succinate, required for the reoxidation of intracellular NADH under anaerobic conditions; mutations cause osmotic sensitivity
1439; Protein that recognizes and binds damaged DNA in an ATP-dependent manner (with Rad16p) during nucleotide excision repair; subunit of Nucleotide Excision Repair Factor 4 (NEF4)
1440; Component of the GTPase-activating Bfa1p-Bub2p complex involved in multiple cell cycle checkpoint pathways that control exit from mitosis
1441; Vacuolar protein of unknown function; potential Cdc28p substrate
1442; Protein of unknown function, required for growth at high temperature
1443; Small subunit of the clathrin-associated adaptor complex AP-2, which is involved in protein sorting at the plasma membrane; related to the sigma subunit of the mammalian plasma membrane clathrin-associated protein (AP-2) complex
1444; Putative serine/threonine protein kinase involved in regulation of ion transport across plasma membrane; enhances spermine uptake
1445; RNA polymerase I subunit A12.2; contains two zinc binding domains, and the N terminal domain is responsible for anchoring to the RNA pol complex
1446; Subunit of the cytosolic chaperonin Cct ring complex, related to Tcp1p, required for the assembly of actin and tubulins in vivo
1447; Essential component of the Arp2/3 complex, which is a highly conserved actin nucleation center required for the motility and integrity of actin patches; involved in endocytosis and membrane growth and polarity
1448; PIK-related protein kinase and rapamycin target; subunit of TORC1, a complex that controls growth in response to nutrients by regulating translation, transcription, ribosome biogenesis, nutrient transport and autophagy; involved in meiosis
1449; Subunit of heteropentameric Replication factor C (RF-C), which is a DNA binding protein and ATPase that acts as a clamp loader of the proliferating cell nuclear antigen (PCNA) processivity factor for DNA polymerases delta and epsilon
1450; Protein of unknown function that is involved in DNA repair; mutant is sensitive to the base analog, 6-N-hydroxylaminopurine, while gene disruption does not increase the rate of spontaneous mutagenesis
1451; Cytoplasmic protein required for cell viability, identified by association with pre-ribosomal particles
1452; Phospholipid methyltransferase (methylene-fatty-acyl-phospholipid synthase), catalyzes the last two steps in phosphatidylcholine biosynthesis
1453; Component of the septin ring of the mother-bud neck that is required for cytokinesis; septins recruit proteins to the neck and can act as a barrier to diffusion at the membrane, and they comprise the 10 nm filaments seen with EM
1454; Mitochondrial phosphate carrier, imports inorganic phosphate into mitochondria; functionally redundant with Pic2p but more abundant than Pic2 under normal conditions
1455; The authentic, non-tagged protein was localized to the mitochondria
1456; Esa1p-associated factor, subunit of the NuA4 acetyltransferase complex
1457; Protein of unknown function, computational analysis of large-scale protein-protein interaction data suggests a possible role in actin cytoskeleton organization; potential Cdc28p substrate
1458; Putative protein of unknown function; detectable in highly purified mitochondria
1459; G protein gamma subunit, forms a dimer with Step 4p to activate the mating signaling pathway, forms a heterotrimer with Gpa1p and Step 4p to dampen signaling; C-terminus is palmitoylated and farnesylated, which are required for normal signaling
1460; Essential chromosomal passenger protein involved in coordinating cell cycle events for proper chromosome segregation; C-terminal region binds Sli15p, and the middle region, upon phosphorylation, localizes Cbf2p to the spindle at anaphase
1461; Member of the Puf family of RNA-binding proteins, interacts with mRNAs encoding membrane-associated proteins; overexpression suppresses a tub2-150 mutation and causes increased sensitivity to benomyl in wild-type cells
1462; Subunit of cleavage polyadenylation factor (CPF), interacts directly with poly(A) polymerase (Pap1p) to regulate its activity
1463; Master regulator of meiosis that is active only during meiotic events, activates transcription of early meiotic genes through interaction with Ume6p, degraded by the
26S proteasome following phosphorylation by Ime2p
1464; Mitochondrial succinate-fumarate transporter, transports succinate into and fumarate out of the mitochondrion; required for ethanol and acetate utilization 1465; Putative xylose and arabinose reductase
1466; Ubiquitin C-terminal hydrolase that cleaves ubiquitin-protein fusions to generate monomeric ubiquitin; hydrolyzes the peptide bond at the C-terminus of ubiquitin; also the major processing enzyme for the ubiquitin-like protein Rub1p
1467; Mitochondrial ribosomal protein of the small subunit
1468; Cu, Zn superoxide dismutase; some mutations are analogous to those that cause ALS (amyotrophic lateral sclerosis) in humans
1469; Adenosine kinase, required for the utilization of S-adenosylmethionine (AdoMet); may be involved in recycling adenosine produced through the methyl cycle
1470; Phosphatidylinositol 3-phosphate[PI(3)P]phosphatase, regulates the localization and levels of PI(3)P; involved in cytoplasm to vacuole (CVT) transport; has similarity to the conserved myotubularin dual specificity phosphatase family
1471; Putative protein of unknown function; green fluorescent protein (GFP)-fusion protein localizes to the mitochondria
1472; Essential component of the MIND kinetochore complex (Mtw1p Including Nnf1p-Nsl1p-Dsn1p) which joins kinetochore subunits contacting DNA to those contacting microtubules; required for accurate chromosome segregation
1473; Mitochondrial ribosomal protein of the small subunit, has similarity to E. coli S7 ribosomal protein
1474; Hypothetical protein
1475; Highly conserved zinc metalloprotease that functions in two steps of a-factor maturation, C-terminal CAAX proteolysis and the first step of N-terminal proteolytic processing; contains multiple transmembrane spans
1476; Putative protein of unknown function; green fluorescent protein (GFP)-fusion protein localizes to the cytoplasm and nucleus
1477; Beta subunit of the F1 sector of mitochondrial F1F0 ATP synthase, which is a large, evolutionarily conserved enzyme complex required for ATP synthesis
1478; Protein component of the small (40S) ribosomal subunit, the least basic of the non-acidic ribosomal proteins; phosphorylated in vivo; essential for viability; has similarity to E. coli S7 and rat S5 ribosomal proteins
1479; Protein containing an N-terminal epsin-like domain involved in clathrin recruitment and traffic between the Golgi and endosomes; associates with the clathrin adaptor Gga2p
1480; Putative protein of unknown function; predicted S-adenosylmethionine-dependent methyltransferase of the seven beta-strand family; green fluorescent protein (GFP)-fusion protein localizes to the cytoplasm
1481; Cystathionine gamma-synthase, converts cysteine into cystathionine
1482; Karyopherin, a carrier protein involved in nuclear import of proteins; importin beta homolog
1483; Xanthine-guanine phosphoribosyl transferase, required for xanthine utilization and for optimal utilization of guanine
1484; Protein of unknown function; required for wild-type growth rate on galactose and mannose; localizes to COP1 coated vesicles and the Golgi apparatus
1485; Protein involved in minichromosome maintenance; component of the kinetochore; binds to centromeric DNA in a Ctf19p-dependent manner
1486; Mitochondrial intermembrane space protein mediating import and insertion of polytopic inner membrane proteins; homolog of human DDP1 (deafness dystonia peptide
1) which is mutated in the X-linked Mohr-Tranebjaerg syndrome
1487; Sulfite reductase beta subunit, involved in amino acid biosynthesis, transcription repressed by methionine
1488; Protein of unknown function, green fluorescent protein (GFP)-fusion protein localizes to the vacuolar membrane
1489; Homoserine dehydrogenase (L-homoserine:NADP oxidoreductase), dimeric enzyme that catalyzes the third step in the common pathway for methionine and threonine biosynthesis; enzyme has nucleotide-binding, dimerization and catalytic regions
1490; Transcriptional corepressor involved in the cell cycle-regulated transcription of histone genes HTA1, HTB1, HHT1, and HHT2; involved in position-dependent gene silencing and nucleosome reassembly
1491; Putative protein of unknown function
1492; Protein O-mannosyltransferase, transfers mannose residues from dolichyl phosphate-D-mannose to protein serine/threonine residues; appears to form homodimers in vivo and does not complex with other Pmt proteins; target for new antifungals
1493; Cytosolic branched-chain amino acid aminotransferase, homolog of murine ECA39; highly expressed during stationary phase and repressed during logarithmic phase
1494; Cell wall mannoprotein with similarity to Tir1p, Tir2p, Tir3p, and Tir4p; expressed under anaerobic conditions, completely repressed during aerobic growth
1495; Allantoin permease; ureidosuccinate permease; expression is constitutive but sensitive to nitrogen catabolite repression
1496; Endo-polygalacturonase, pectolytic enzyme that hydrolyzes the alpha-1,4-glycosidic bonds in the rhamnogalacturonan chains in pectins
1497; Endo-polygalacturonase, pectolytic enzyme that hydrolyzes the alpha-1,4-glycosidic bonds in the rhamnogalacturonan chains in pectins
1498; Dihydroorotate dehydrogenase, catalyzes the fourth enzymatic step in the de novo biosynthesis of pyrimidines, converting dihydroorotic acid into orotic acid
1499; Member of the REF (RNA and export factor binding proteins) family; when overexpressed, can substitute for the function of Yra1p in export of poly(A)+ mRNA from the nucleus
1500; WD repeat protein required for ubiquitin-mediated protein degradation, forms complex with Cdc48p, plays a role in controlling cellular ubiquitin concentration; also promotes efficient NHEJ in postdiauxic/stationary phase
1501; Lipid phosphoinositide phosphatase of the ER and Golgi, involved in protein trafficking and secretion
1502; Bifunctional enzyme exhibiting both indole-3-glycerol-phosphate synthase and anthranilate synthase activities, forms multifunctional hetero-oligomeric anthranilate synthase:indole-3-glycerol phosphate synthase enzyme complex with Trp2p 1503; Ubiquitin activating enzyme, involved in ubiquitin-mediated protein degradation and essential for viability
1504; Putative protein of unknown function; green fluorescent protein (GFP)-fusion protein localizes to the cytoplasm
1505; Nuclear pore protein involved in nuclear export of pre-tRNA
1506; PIK-related protein kinase and rapamycin target; subunit of TORC1, a complex that regulates growth in response to nutrients and TORC2, a complex that regulates cell-cycle dependent polarization of the actin cytoskeleton; involved in meiosis
1507; Vesicle membrane protein (v-SNARE) with acyltransferase activity; involved in trafficking to and within the Golgi, endocytic trafficking to the vacuole, and vacuolar fusion; membrane localization due to prenylation at the carboxy-terminus
1508; Mitochondrial threonyl-tRNA synthetase
1509; Conserved nuclear regulatory subunit of Glc7p type 1 protein serine-threonine phosphatase (PP1), functions positively with Glc7p to promote dephosphorylation of nuclear substrates required for chromosome transmission during mitosis
1510; Mitochondrial matrix acyl carrier protein, involved in biosynthesis of octanoate, which is a precursor to lipoic acid; activated by phosphopantetheinylation catalyzed by Ppt2p
1511; Protein required, along with Dph1p, Kti11p, Jjj3p, and Dph5p, for synthesis of diphthamide, which is a modified histidine residue of translation elongation factor 2 (Eft1p or Eft2p); may act in a complex with Dph1p and Kti11p
1512; Component of the RAM signaling network that is involved in regulation of Ace2p activity and cellular morphogenesis, interacts with Kic1p and Sog2p, localizes to sites of polarized growth during budding and during the mating response
1513; Ornithine decarboxylase, catalyzes the first step in polyamine biosynthesis; degraded in a proteasome-dependent manner in the presence of excess polyamines 1154; 5-phospho-ribosyl-1(alpha)-pyrophosphate synthetase, involved in nucleotide, histidine, and tryptophan biosynthesis; one of five related enzymes, which are active as heteromultimeric complexes
1515; Protein involved in excretion of putrescine and spermidine; putative polyamine transporter in the Golgi or post-Golgi vesicles
1516; Mitochondrial ribosomal protein of the large subunit; appears as two protein spots (YmL34 and YmL38) on two-dimensional SDS gels
1517; Subunit of cytoplasmic cAMP-dependent protein kinase, which contains redundant catalytic subunits Tpk1p, Tpk2p, and Tpk3p and regulatory subunit Bcy1p; promotes vegetative growth in response to nutrients; inhibits filamentous growth
1518; Putative protein of unknown function; green fluorescent protein (GFP)-fusion protein localizes to the mitochondrion
1519; Transcription elongation factor that contains a conserved zinc finger domain; implicated in the maintenance of proper chromatin structure in actively transcribed regions; deletion inhibits Brome mosaic virus (BMV) gene expression
1520; Merged open reading frame, does not encode a discrete protein; YKL158W was originally annotated as an independent ORF, but was later demonstrated to be an exon of an adjacent ORF, YKL157W
1521; Mitochondrial ribosomal protein of the small subunit
1522; Tetrameric phosphoglycerate mutase, mediates the conversion of 3-phosphoglycerate to 2-phosphoglycerate during glycolysis and the reverse reaction during gluconeogenesis
1523; Mitochondrial NADH-cytochrome b5 reductase, involved in ergosterol biosynthesis
1524; RNA polymerase III subunit C25
1525; Putative mitochondrial ribosomal protein, has similarity to E. coli ribosomal protein S2
1526; Cytochrome b subunit of succinate dehydrogenase (Sdh1p, Sdh2p, Sdh3p, Sdh4p), which couples the oxidation of succinate to the transfer of electrons to ubiquinone
1527; Component of the DASH complex which is found at kinetochores and regulates spindle assembly; in vitro DASH forms rings on microtubules and promotes microtubule stability
1528; Mitochondrial ribosomal protein of the large subunit
1529; Putative dihydrofolate synthetase; has similarity to Fol3p; similar to E. coli folylpolyglutamate synthetase/dihydrofolate synthetase
1530; RNA-binding protein that binds specific mRNAs and interacts with She3p; part of the mRNA localization machinery that restricts accumulation of certain proteins to the bud
1531; Protein required for transcription of rDNA by RNA polymerase I; transcription factor independent of DNA template; involved in recruitment of RNA polymerase I to rDNA
1532; Subunit of the signal recognition particle (SRP), which functions in protein targeting to the endoplasmic reticulum membrane; not found in mammalian SRP; forms a pre-SRP structure in the nucleolus that is translocated to the cytoplasm
1533; Putative protein of unknown function
1534; Mitochondrial inner membrane transporter, transports oxaloacetate, sulfate, and thiosulfate; member of the mitochondrial carrier family
1535; Integral membrane protein required for vacuolar H+-ATPase (V-ATPase) function, although not an actual component of the V-ATPase complex; functions in the assembly of the V-ATPase; localized to the endoplasmic reticulum (ER)
1536; Co-chaperone that binds to and regulates Hsp90 family chaperones; important for pp60v-src activity in yeast; homologous to the mammalian p23 proteins
1537; Protein kinase with a possible role in MAP kinase signalling in the pheromone response pathway
1538; 5′ to 3′ exonuclease, 5′ flap endonuclease, required for Okazaki fragment processing and maturation as well as for long-patch base-excision repair; member of the S. pombe RAD2/FEN1 family
1539; Protein associated with the RNA polymerase II Elongator complex; involved in sensitivity to G1 arrest induced by Kluyveromyces lactis toxin, zymocin
1540; Subunit of the heme-activated, glucose-repressed Hap2p/3p/4p/5p CCAAT-binding complex, a transcriptional activator and global regulator of respiratory gene expression; provides the principal activation function of the complex
1541; Mitochondrial aspartate aminotransferase, catalyzes the conversion of oxaloacetate to aspartate in aspartate and asparagine biosynthesis
1542; Glutamine-fructose-6-phosphate amidotransferase, catalyzes the formation of glucosamine-6-P and glutamate from fructose-6-P and glutamine in the first step of chitin biosynthesis
1543; Covalently linked cell wall mannoprotein, major constituent of the cell wall; plays a role in stabilizing the cell wall; involved in low pH resistance; precursor is GPI-anchored
1544; Cell wall mannoprotein, linked to a beta-1,3- and beta-1,6-glucan heteropolymer through a phosphodiester bond; involved in cell wall organization
1545; Protein of unknown function, localizes to lipid particles
1546; Protein involved in mitochondrial functions and stress response; overexpression suppresses growth defects of hap2, hap3, and hap4 mutants
1547; Protein of unknown function; has two CUE domains that bind ubiquitin, which may facilitate intramolecular monoubiquitination
1548; Kinetochore protein with homology to human CENP-C, required for structural integrity of the spindle during anaphase spindle elongation, interacts with histones H2A, H₂B, and H4, phosphorylated by Ipl1p
1549; Cytochrome c1 heme lyase, involved in maturation of cytochrome c1, which is a subunit of the mitochondrial ubiquinol-cytochrome-c reductase; links heme covalently to apocytochrome c1
1550; Mitochondrial malate dehydrogenase, catalyzes interconversion of malate and oxaloacetate; involved in the tricarboxylic acid (TCA) cycle
1551; Mitochondrial intermembrane space protein, first component of a pathway mediating assembly of small TIM (Translocase of the Inner Membrane) complexes which escort hydrophobic inner membrane proteins en route to the TIM22 complex
1552; Putative protein of unknown function; green fluorescent protein (GFP)-fusion protein localizes to the cytoplasm
1553; Putative protein of unknown function; green fluorescent protein (GFP)-fusion protein localizes to the cytoplasm and nucleus
1554; Nucleoside diphosphate kinase, catalyzes the transfer of gamma phosphates from nucleoside triphosphates, usually ATP, to nucleoside diphosphates by a mechanism that involves formation of an autophosphorylated enzyme intermediate
1555; Endoplasmic reticulum transmembrane protein, homolog of human BAP31 protein 1556; Putative protein of unknown function; green fluorescent protein (GFP)-fusion protein localizes to the Golgi
1557; Transcriptional activator related to Msn2p; activated in stress conditions, which results in translocation from the cytoplasm to the nucleus; binds DNA at stress response elements of responsive genes, inducing gene expression
1558; Putative protein of unknown function; green fluorescent protein (GFP)-fusion protein localizes to the endosome
1559; Fructose 1,6-bisphosphate aldolase, a cytosolic enzyme required for glycolysis and gluconeogenesis; catalyzes the conversion of fructose 1,6 bisphosphate into two 3-carbon products: glyceraldehyde-3-phosphate and dihydroxyacetone phosphate
1560; TFIIA small subunit; involved in transcriptional activation, acts as antirepressor or as coactivator; homologous to smallest subunit of human and Drosophila TFIIA
1561; Protein of unknown function; putative ribosomal protein; homolog of translationally controlled tumor protein; green fluorescent protein (GFP)-fusion protein localizes to the cytoplasm; YKL056C is not an essential gene
1562; Protein of unknown function; mutation affects mitochondrial distribution and morphology
1563; Putative mannosidase, GPI-anchored membrane protein required for cell wall biosynthesis in bud formation; homologous to Dfg5p
1564; Transcriptional activator that enhances pseudohyphal growth; regulates expression of FLO11, an adhesin required for pseudohyphal filament formation; similar to St, an A. nidulans developmental regulator; potential Cdc28p substrate
1565; Central plaque component of spindle pole body (SPB); involved in SPB duplication, may facilitate attachment of the SPB to the nuclear membrane
1566; One of four subunits of the endosomal sorting complex required for transport III (ESCRT-III); forms an ESCRT-III subcomplex with Vps2p; involved in the sorting of transmembrane proteins into the multivesicular body (MVB) pathway
1567; Glucose-responsive transcription factor that regulates expression of several glucose transporter (HXT) genes in response to glucose; binds to promoters and acts both as a transcriptional activator and repressor
1568; UDP-glucose pyrophosphorylase (UGPase), catalyses the reversible formation of UDP-Glc from glucose 1-phosphate and UTP, involved in a wide variety of metabolic pathways, expression modulated by Pho85p through Pho4p
1569; Golgi-localized RING-finger ubiquitin ligase E3), involved in ubiquitinating and sorting membrane proteins that contain polar transmembrane domains to multivesicular bodies for delivery to the vacuole for quality control purposes
1570; Protein that binds DNA containing intrastrand cross-links formed by cisplatin, contains two HMG (high mobility group box) domains, which confer the ability to bend cisplatin-modified DNA; mediates aerobic transcriptional repression of COX5b
1571; Mitochondrial malic enzyme, catalyzes the oxidative decarboxylation of malate to pyruvate, which is a key intermediate in sugar metabolism and a precursor for synthesis of several amino acids
1572; TFIIE large subunit, involved in recruitment of RNApolymerase II to the promoter, activation of TFIIH, and promoter opening
1573; Essential subunit of the Pan2p-Pan3p poly(A)-ribonuclease complex, which acts to control poly(A) tail length and regulate the stoichiometry and activity of postreplication repair complexes
1574; Uridylate kinase, catalyzes the seventh enzymatic step in the de novo biosynthesis of pyrimidines, converting uridine monophosphate (UMP) into uridine-5′-diphosphate (UDP)
1575; Putative protein of unknown function; green fluorescent protein (GFP)-fusion protein localizes to the cytoplasm
1576; ER membrane protein involved, with its homolog Mga2p, in regulation of OLE1 transcription; inactive ER form dimerizes and one subunit is then activated by ubiquitin/proteasome-dependent processing followed by nuclear targeting
1577; Alpha subunit of both the farnesyltransferase and type I geranylgeranyltransferase that catalyze prenylation of proteins containing a CAAX consensus motif; essential protein required for membrane localization of Ras proteins and a-factor
1578; Putative protein of unknown function; identified by homology; green fluorescent protein (GFP)-fusion protein localizes to the cytoplasm
1579; Subunit of the COMPASS (Set1C) complex, which methylates histone H3 on lys 4 and is involved in telomeric silencing; subunit of CPF (cleavage and polyadenylation factor), a complex involved in RNAP II transcription termination
1580; Hexameric DNA polymerase alpha-associated DNA helicase A involved in lagging strand DNA synthesis; contains single-stranded DNA stimulated ATPase and dATPase activities; replication protein A stimulates helicase and ATPase activities
1581; Subunit d of the stator stalk of mitochondrial F1F0 ATP synthase, which is a large, evolutionarily conserved enzyme complex required for ATP synthesis
1582; Transcriptional activator of proline utilization genes, constitutively binds PUT1 and PUT2 promoter sequences and undergoes a conformational change to form the active state; has a Zn(2)-Cys(6) binuclear cluster domain
1583; Nucleolar protein required for the normal accumulation of 25S and 5.8S rRNAs, associated with the 27SA2 pre-ribosomal particle; proposed to be involved in the biogenesis of the 60S ribosomal subunit
1584; Subunit of the ARP2/3 complex, which is required for the motility and integrity of cortical actin patches
1585; Mitochondrial cruciform cutting endonuclease, cleaves Holliday junctions formed during recombination of mitochondrial DNA
1586; Ubiquitin-protein ligase (E3) that interacts with Rpt4p and Rpt6p, two subunits of the 19S particle of the 26S proteasome; cytoplasmic E3 involved in the degradation of ubiquitin fusion proteins
1587; Protein involved in mRNA turnover and ribosome assembly, localizes to the nucleolus
1588; Ceramide synthase component, involved in synthesis of ceramide from C26(acyl)-coenzyme A and dihydrosphingosine or phytosphingosine, functionally equivalent to Lag1p
1589; Alpha subunit of the capping protein (CP) heterodimer (Cap1p and Cap2p) which binds to the barbed ends of actin filaments preventing further polymerization; localized predominantly to cortical actin patches
1590; Negative regulator of transcription elongation, contains a TFIIS-like domain and a PHD finger, multicopy suppressor of temperature-sensitive ess1 mutations, probably binds RNA polymerase II large subunit
1591; Phosphatidylinositol:ceramide phosphoinositol transferase (IPC synthase), required for sphingolipid synthesis; can mutate to confer aureobasidin A resistance
1592; Mitochondrial ribosomal protein of the small subunit; MRP17 exhibits genetic interactions with PET122, encoding a COX3-specific translational activator
1593; Adenylylsulfate kinase, required for sulfate assimilation and involved in methionine metabolism
1594; GTPase required for vacuolar protein sorting, functions in actin cytoskeleton organization via its interaction with Sla1p; required for late Golgi-retention of some proteins including Kex2p; involved in regulating peroxisome biogenesis 1595; Poly(A) polymerase, one of three factors required for mRNA 3′-end polyadenylation, forms multiprotein complex with polyadenylation factor I (PF I), also required for mRNA nuclear export; may also polyadenylate rRNAs
1596; Member of an oxysterol-binding protein family with overlapping, redundant functions in sterol metabolism and which collectively perform a function essential for viability; GFP-fusion protein localizes to the cell periphery
1597; Non-essential protein of unknown function
1598; Mitochondrial ribosomal protein of the large subunit, not essential for mitochondrial translation
1599; Component of the EGO complex, which is involved in the regulation of microautophagy; localizes to the vacuolar membrane, loss results in a defect in vacuolar acidification
1600; One of 15 subunits of the ‘Remodel the Structure of Chromatin’ (RSC) complex; found in close proximity to nucleosomal DNA; displaced from the surface of nucleosomal DNA after chromatin remodeling
1601; Multifunctional enzyme of the peroxisomal fatty acid beta-oxidation pathway; has 3-hydroxyacyl-CoA dehydrogenase and enoyl-CoA hydratase activities
1602; Putative protein of unknown function; green fluorescent protein (GFP)-fusion protein localizes to the nucleus
1603; Protein of unknown function, has similarity to Pry1p and Pry3p and to the plant PR-1 class of pathogen related proteins
1604; Putative protein of unknown function; contains a RING finger motif
1605; Putative protein of unknown function; green fluorescent protein (GFP)-fusion protein localizes to the cytoplasm and nucleus
1606; Protein involved in regulation of phosphatidylinositol 4,5-bisphosphate concentrations; Irs4p and Tax4p bind and activate the phosphatase Inp51p; mutation confers an increase in rDNA silencing
1607; Component of the GARP (Golgi-associated retrograde protein) complex, Vps51p-Vps52p-Vps53p-Vps54p, which is required for the recycling of proteins from endosomes to the late Golgi; links the (VFT/GARP) complex to the SNARE Tlg1p
1608; Putative protein of unknown function; green fluorescent protein (GFP)-fusion protein localizes to the cytoplasm and mitochondrion
1609; Putative ATP-dependent RNA helicase of the DEAD-box family involved in ribosomal biogenesis
1610; Alpha subunit of the translation initiation factor eIF2B, the guanine-nucleotide exchange factor for eIF2; activity subsequently regulated by phosphorylated eIF2; first identified as a positive regulator of GCN4 expression
1611; The authentic, non-tagged protein was localized to the mitochondria
1612; Defining member of the SET3 histone deacetylase complex which is a meiosis-specific repressor of sporulation genes; necessary for efficient transcription by RNAPII; one of two yeast proteins that contains both SET and PHD domains
1613; Golgi membrane protein of unknown function, interacts with Gea1p and Gea2p; required for localization of Gea2p; computational analysis suggests a possible role in either cell wall synthesis or protein-vacuolar targeting
1614; Class E protein of the vacuolar protein-sorting (Vps) pathway, associates reversibly with the late endosome, has human ortholog that may be altered in breast tumors
1615; General amino acid permease; localization to the plasma membrane is regulated by nitrogen source
1616; Putative protein of unknown function; green fluorescent protein (GFP)-fusion protein localizes to the cytoplasm and nucleus
1617; Protein of unknown function that interacts with Ulp1p, a Ub1 (ubiquitin-like protein)-specific protease for Smt3p protein conjugates
1618; Protein of unknown function that co-purifies with lipid particles; expression pattern suggests a role in respiratory growth; computational analysis of large-scale protein-protein interaction data suggests a role in ATP/ADP exchange
1619; Mitochondrial protein of unknown function; putative redox protein containing a thioredoxin fold
1620; Hypothetical protein
1621; Mitochondrial iron transporter of the mitochondrial carrier family (MCF), very similar to and functionally redundant with Mrs3p; functions under low-iron conditions; may transport other cations in addition to iron
1622; Non-essential small GTPase of the Rho/Rac subfamily of Ras-like proteins, likely to be involved in the establishment of cell polarity
1623; Translation initiation factor eIF4A, identical to Tif2p; DEA(D/H)-box RNA helicase that couples ATPase activity to RNA binding and unwinding; forms a dumbbell structure of two compact domains connected by a linker; interacts with eIF4G1624; Possible U3 snoRNP protein involved in maturation of pre-18S rRNA, based on computational analysis of large-scale protein-protein interaction data
1625; Mannosyltransferase involved in N-linked protein glycosylation; member of the KRE2/MNT1 mannosyltransferase family
1626; TFIIE small subunit, involved in RNA polymerase II transcription initiation 1627; Essential nuclear protein possibly involved in bud formation and morphogenesis; mutants require the SSD1-v allele for viability
1628; Putative protein of unknown function; green fluorescent protein (GFP)-fusion protein localizes to the cytoplasm and nucleus; detectable in highly purified mitochondria
1629; Presequence translocase-associated motor subunit, required for stable complex formation between cochaperones Pam16p and Pam18p, promotes association of Pam16p-Pam18p with the presequence translocase
1630; Mitochondrial cytochrome-c peroxidase; degrades reactive oxygen species in mitochondria, involved in the response to oxidative stress
1631; Hydrophilic protein that acts in conjunction with SNARE proteins in targeting and fusion of ER to Golgi transport vesicles; component of the TRAPP (transport protein particle) complex
1632; Putative protein of unknown function; green fluorescent protein (GFP)-fusion protein localizes to the mitochondrion
1633; Protein of unknown function; mutation displays synthetic lethal interaction with the pol3-13 allele of CDC2
1634; Putative protein of unknown function; epitope-tagged protein localizes to the cytoplasm
1635; Protein of unknown function; similar to YOR062Cp and Reg1p; expression regulated by glucose and Rgt1p
1636; Non-essential protein of unknown function; similar to Ygr154 cp
1637; Hypothetical protein
1638; tRNase Z, involved in RNA processing, has two putative nucleotide triphosphate-binding motifs (P-loop) and a conserved histidine motif, homolog of the human candidate prostate cancer susceptibility gene ELAC2
1639; NAD-dependent 5,10-methylenetetrahydrafolate dehydrogenase, plays a catalytic role in oxidation of cytoplasmic one-carbon units; expression is regulated by Bas1p and Bas2p, repressed by adenine, and may be induced by inositol and choline
1640; Essential protein involved in the processing of pre-rRNA and the assembly of the 60S ribosomal subunit; interacts with ribosomal protein L11; localizes predominantly to the nucleolus; constituent of 66S pre-ribosomal particles
1641; Subunit of the Nup84p subcomplex of the nuclear pore complex (NPC), localizes to both sides of the NPC, required to establish a normal nucleocytoplasmic concentration gradient of the GTPase Gsp1p
1642; Essential protein, component of the DASH complex; involved in spindle integrity and kinetochore function; interacts with Duo1p and Dam1p; localizes to intranuclear spindles and kinetochore
1643; GTP binding protein with sequence similarity to the elongation factor class of G proteins, EF-1alpha and Sup35p; associates with Dom34p, and shares a similar genetic relationship with genes that encode ribosomal protein components
1644; Mitochondrial ribosomal protein of the large subunit
1645; RNA helicase in the DEAH-box family involved in the second catalytic step of splicing, exhibits ATP-dependent RNA unwinding activity
1646; Integral membrane protein localized to late Golgi vesicles along with the v-SNARE Tlg2p; green fluorescent protein (GFP)-fusion protein localizes to the cytoplasm in a punctate pattern
1647; Triacylglycerol lipase involved in TAG mobilization; found in lipid particles; potential Cdc28p substrate
1648; Nucleolar, serine-rich protein with a role in preribosome assembly or transport; may function as a chaperone of small nucleolar ribonucleoprotein particles (snoRNPs); immunologically and structurally to rat Nopp140
1649; Integral membrane peptide transporter, mediates transport of di- and tri-peptides; conserved protein that contains 12 transmembrane domains; PTR2 expression is regulated by the N-end rule pathway via repression by Cup9p
1650; Hypothetical protein
1651; Ubiquitin-specific protease that cleaves ubiquitin from ubiquitinated proteins
1652; Myb-related transcription factor involved in regulating basal and induced expression of genes of the purine and histidine biosynthesis pathways
1653; S-methylmethionine-homocysteine methyltransferase, functions along with Sam4p in the conversion of S-adenosylmethionine (AdoMet) to methionine to control the methionine/AdoMet ratio
1654; High-affinity S-methylmethionine permease, required for utilization of S-methylmethionine as a sulfur source; has similarity to S-adenosylmethionine permease Sam3p
1655; Fe(II)-dependent sulfonate/alpha-ketoglutarate dioxygenase, involved in sulfonate catabolism for use as a sulfur source, contains sequence that closely resembles a J domain (typified by the E. coli DnaJ protein)
1656; Hypothetical protein
1657; Putative ferric reductase with similarity to Fre2p; expression induced by low iron levels
1658; Transporter of the ATP-binding cassette (ABC) family involved in bile acid transport; similar to mammalian bile transporters
1659; Ribosomal protein L4 of the large (60S) ribosomal subunit, nearly identical to Rpl8Ap and has similarity to rat L7a ribosomal protein; mutation results in decreased amounts of free 60S subunits
1660; Plasma membrane glycerol channel, member of the major intrinsic protein (MIP) family of channel proteins; involved in efflux of glycerol and in uptake of the trivalent metalloids arsenite and antimonite
1661; Iron-sulfur protein subunit of succinate dehydrogenase (Sdh1p, Sdh2p, Sdh3p, Sdh4p), which couples the oxidation of succinate to the transfer of electrons to ubiquinone
1662; Protein of unknown function; heterooligomeric or homooligomeric complex; peripherally associated with membranes; homologous to human COH1; involved in sporulation, vacuolar protein sorting and protein-Golgi retention
1663; Ubiquitin, becomes conjugated to proteins, marking them for selective degradation via the ubiquitin-26S proteasome system; essential for the cellular stress response
1664; Protein of unknown function, contains an N-terminal epsin-like domain
1665; Protein of unknown function, required for cell growth and possibly involved in rRNA processing; mRNA is cell cycle regulated
1666; Hypothetical protein
1667; ER membrane localized phosphoryltransferase that adds phosphoethanolamine onto the third mannose residue of the glycosylphosphatidylinositol (GPI) anchor precursor; similar to human PIG-O protein
1668; Hypothetical protein
1669; Polyamine transporter that recognizes spermine, putrescine, and spermidine; catalyzes uptake of polyamines at alkaline pH and excretion at acidic pH; phosphorylation enhances activity and sorting to the plasma membrane
1670; Heat shock protein that cooperates with Ydj1p (Hsp40) and Ssa1p (Hsp70) to refold and reactivate previously denatured, aggregated proteins; responsive to stresses including: heat, ethanol, and sodium arsenite; involved in [PSI+] propagation
1671; Hypothetical protein
1672; Cytoplasmic aspartyl-tRNA synthetase, homodimeric enzyme that catalyzes the specific aspartylation of tRNA(Asp); class II aminoacyl tRNA synthetase; binding to its own mRNA may confer autoregulation
1673; Hypothetical protein
1674; Plasma membrane associated protein phosphatase involved in the general stress response; required along with binding partner Whi2p for full activation of STRE-mediated gene expression, possibly through dephosphorylation of Msn2p
1675; Copper metallochaperone that transfers copper to Sco1p and Cox11p for eventual delivery to cytochrome c oxidase
1676; Nucleolar DEAD-box protein required for ribosome assembly and function, including synthesis of 60S ribosomal subunits; constituent of 66S pre-ribosomal particles
1677; Hypothetical protein
1678; Subunit of the origin recognition complex, which directs DNA replication by binding to replication origins and is also involved in transcriptional silencing
1679; Dynamin-related GTPase required for mitochondrial fission and the maintenance of mitochondrial morphology, assembles on the cytoplasmic face of mitochondrial tubules at sites at which division will occur; also participates in endocytosis
1680; Protein that forms a nuclear complex with Noc2p that binds to 66S ribosomal precursors to mediate their intranuclear transport; also binds to chromatin to promote the association of DNA replication factors and replication initiation
1681; Hypothetical protein
1682; Component of the core form of RNA polymerase transcription factor TFIIH, which has both protein kinase and DNA-dependent ATPase/helicase activities and is essential for transcription and nucleotide excision repair; interacts with Tfb4p1683; Essential nuclear protein required for DNA repair; forms a complex with Smc5p and Smc6p

### 1684; Ribosomal Like Protein 24

[0209] 1685; Protein that regulates telomeric length; protects telomeric ends in a complex with Cdc13p and Stn1p
1686; Subunit of the RES complex, which is required for nuclear retention of unspliced pre-mRNAs; acts in the same pathway as Pml39p and Mlp1p
1687; Methylthioadenosine phosphorylase (MTAP), catalyzes the initial step in the methionine salvage pathway; affects polyamine biosynthesis through regulation of ornithine decarboxylase (Spe1p) activity; regulates ADH2 gene expression
1688; Integral membrane protein of the nuclear pore complex, localizes adjacent to the nuclear membrane
1689; Functionally redundant Psr1p homolog, a plasma membrane phosphatase involved in the general stress response; required with Psr1p and Whi2p for full activation of STRE-mediated gene expression, possibly through dephosphorylation of Msn2p
1690; Hypothetical protein
1691; Essential protein involved in RNA metabolism, one of two yeast homologs (with Yhr087wp) of the human protein SBDS responsible for autosomal recessive Shwachman-Bodian-Diamond Syndrome, also conserved in Archaea
1692; One of four subunits of the endosomal sorting complex required for transport III (ESCRT-III); involved in the sorting of transmembrane proteins into the multivesicular body (MVB) pathway; recruited from the cytoplasm to endosomal membranes
1693; cis-Golgi t-SNARE syntaxin required for vesicular transport between the ER and the Golgi complex, binds at least 9 SNARE proteins
1694; Enzyme of ‘de novo’ purine biosynthesis containing both 5-aminoimidazole-4-carboxamide ribonucleotide transformylase and inosine monophosphate cyclohydrolase activities, isozyme of Ade17p; ade16 ade17 mutants require adenine and histidine
1695; Protein component of the large (60S) ribosomal subunit, nearly identical to Rpl15 Bp and has similarity to rat L15 ribosomal protein; binds to 5.8 S rRNA
1696; Single-stranded DNA-dependent ATPase, involved in postreplication repair; contains RING finger domain
1697; Remodels the structure of chromatin complex 58 KDa subunit; Chromatin Remodeling Complex subunit
1698; Putative divalent metal ion transporter involved in iron homeostasis; transcriptionally regulated by metal ions; member of the Nramp family of metal transport proteins
1699; Subunit VIb of cytochrome c oxidase, which is the terminal member of the mitochondrial inner membrane electron transport chain; required for assembly of fully active cytochrome c oxidase but not required for activity after assembly
1700; Hypothetical protein
1701; Hypothetical protein
1702; Cytoplasmic thioredoxin isoenzyme of the thioredoxin system which protects cells against both oxidative and reductive stress, forms LMA1 complex with Pbi2p, acts as a cofactor for Tsa1p, required for ER-Golgi transport and vacuole inheritance
1703; Major of three pyruvate decarboxylase isozymes, key enzyme in alcoholic fermentation, decarboxylates pyruvate to acetaldehyde; subject to glucose-, ethanol-, and autoregulation; involved in amino acid catabolism
1704; Hypothetical protein
1705; Protein required for cell viability
1706; Subunit of the INO80 chromatin remodeling complex
1707; Subunit of the SAGA transcriptional regulatory complex but not present in SAGA-like complex SLIK/SALSA, required for SAGA-mediated inhibition at some promoters
1708; C-5 sterol desaturase, catalyzes the introduction of a C-5(6) double bond into episterol, a precursor in ergosterol biosynthesis; mutants are viable, but cannot grow on non-fermentable carbon sources
1709; Hypothetical protein
1710; Cytosolic serine hydroxymethyltransferase, involved in one-carbon metabolism
1711; RNA exonuclease, required for U4 snRNA maturation; functions redundantly with Rnh70p in 5.8S rRNA maturation, and with Rnh70p and Rex3p in processing of U5 snRNA and RNase P RNA; member of RNase D family of exonucleases
1712; Beta subunit of cytoplasmic phenylalanyl-tRNA synthetase, forms a tetramer with Frs2p to generate the active enzyme; evolutionarily distant from mitochondrial phenylalanyl-tRNA synthetase based on protein sequence, but substrate binding is similar
1713; Hypothetical protein
1714; Hypothetical protein
1715; Subunit of signal peptidase complex (Spc1p, Spc2p, Spc3p, Sec11p), which catalyzes cleavage of N-terminal signal sequences of proteins targeted to the secretory pathway; homologous to mammalian SPC22/23
1716; Specific translational activator for the COX1 mRNA, also influences stability of intron-containing COX1 primary transcripts; located in the mitochondrial inner membrane
1717; Protein of unknown function, required for survival upon exposure to K1 killer toxin; involved in processing the 35S rRNA primary transcript to generate the 20S and 27SA2 pre-rRNA transcripts
1718; Xylitol dehydrogenase, converts xylitol to D-xylulose in the endogenous xylose utilization pathway
1719; Component of RNA polymerase II holoenzyme/mediator complex; affects chromatin structure and transcriptional regulation of diverse genes; required for glucose repression, HO repression, RME1 repression and sporulation
1720; Hypothetical protein
1721; Protein component of the large (60S) ribosomal subunit, responsible for joining the
40S and 60S subunits; regulates translation initiation; has similarity to rat L10 ribosomal protein and to members of the QM gene family
1722; The authentic, non-tagged protein was localized to the mitochondria
1723; N-glycosylated protein involved in the maintenance of bud site selection during bipolar budding; localization requires Rax1p
1724; Nuclear actin-related protein involved in chromatin remodeling, component of chromatin-remodeling enzyme complexes
1725; Putative chaperone, homolog of E. coli DnaJ, closely related to Ydj1p
1726; High affinity sulfate permease; sulfate uptake is mediated by specific sulfate transporters Sul1p and Sul2p, which control the concentration of endogenous activated sulfate intermediates
1727; Protein of unknown function
1728; DNA binding transcriptional activator, mediates serine/threonine activation of the catabolic L-serine (L-threonine) deaminase (CHA1); Zinc-finger protein with Zn[2]-Cys[6] fungal-type binuclear cluster domain
1729; Protein of unknown function, null mutation leads to an increase in sensitivity to Calcofluor white; expression of the gene is induced in the presence of isooctane
1730; Hypothetical protein identified by homology. See FEBS Letters [2000] 487:31-36.
1731; 3-keto sterol reductase, catalyzes the last of three steps required to remove two C-4 methyl groups from an intermediate in ergosterol biosynthesis; mutants are sterol auxotrophs
1732; Subunit of the Anaphase-Promoting Complex/Cyclosome (APC/C), which is a ubiquitin-protein ligase required for degradation of anaphase inhibitors, including mitotic cyclins, during the metaphase/anaphase transition
1733; DNA replication initiation factor; recruited to MCM pre-RC complexes at replication origins; promotes release of MCM from Mcm10p, recruits elongation machinery; mutants in human homolog may cause velocardiofacial and DiGeorge syndromes 1734; Subunit of the tRNA splicing endonuclease, which is composed of Sen2p, Sen15p, Sen34p, and Sen54p; Sen2p contains the active site for tRNA 5′ splice site cleavage and has similarity to Sen34p and to Archaeal tRNA splicing endonuclease
1735; Hypothetical protein
1736; Thiol-specific peroxiredoxin, reduces hydroperoxides to protect against oxidative damage; function in vivo requires covalent conjugation to Urm1p
1737; Aspartic protease, attached to the plasma membrane via a glycosylphosphatidylinositol (GPI) anchor
1738; Hypothetical protein
1739; Subunit of the Anaphase-Promoting Complex/Cyclosome (APC/C), which is a ubiquitin-protein ligase required for degradation of anaphase inhibitors, including mitotic cyclins, during the metaphase/anaphase transition; similar to cullin Cdc53p
1740; Nucleolar protein, specifically associated with the U3 snoRNA, part of the large ribonucleoprotein complex known as the small subunit (SSU) processome, required for 18 S rRNA biogenesis, part of the active pre-rRNA processing complex
1741; Low-affinity zinc transporter of the plasma membrane; transcription is induced under low-zinc conditions by the Zap1p transcription factor
1742; Choline kinase, catalyzes the first step in the CDP-choline pathway phosphatidylcholine synthesis (Kennedy pathway); mRNA expression is regulated by inositol and choline, enzyme activity is stimulated by phosphorylation by protein kinase
1743; Minor isoform of pyruvate decarboxylase, key enzyme in alcoholic fermentation, decarboxylates pyruvate to acetaldehyde, regulation is glucose- and ethanol-dependent, repressed by thiamine, involved in amino acid catabolism
1744; mRNA-binding protein expressed during iron starvation; binds to a sequence element in the 3′-untranslated regions of specific mRNAs to mediate their degradation; involved in iron homeostasis
1745; Na+/H+ antiporter involved in sodium and potassium efflux through the plasma membrane; required for alkali cation tolerance at acidic pH
1746; Mitochondrial membrane protein required for assembly of respiratory-chain enzyme complexes III and IV; coordinates expression of mitochondrially-encoded genes; may facilitate delivery of mRNA to membrane-bound translation machinery
1747; Hypothetical protein
1748; Protein required for cell viability, component of RNase MRP, which is involved in RNA processing in mitochondria
1749; Spermine synthase, required for the biosynthesis of spermine and also involved in biosynthesis of pantothenic acid
1750; Vacuolar peripheral membrane protein that promotes vesicular docking/fusion reactions in conjunction with SNARE proteins, required for vacuolar biogenesis, forms complex with Pep5p that mediates protein transport to the vacuole
1751; Hypothetical protein
1752; Protein that binds G4 quadruplex and purine motif triplex nucleic acid; acts with Cdc13p to maintain telomere structure; interacts with ribosomes and subtelomeric Y′ DNA; multicopy suppressor of tom1 and pop2 mutations
1753; Hypothetical protein
1754; Ribonuclease H2 subunit, required for RNase H2 activity
1755; Smaller subunit of the mitochondrial processing protease, essential processing enzyme that cleaves the N-terminal targeting sequences from mitochondrially imported proteins
1756; Fusion protein that is cleaved to yield a ribosomal protein of the small (40S) subunit and ubiquitin; ubiquitin may facilitate assembly of the ribosomal protein into ribosomes; interacts genetically with translation factor eIF2B
1757; possibly involved in intramitochondrial sorting
1758; Small subunit of the clathrin-associated adaptor complex AP-1, which is involved in protein sorting at the trans-Golgi network; homolog of the sigma subunit of the mammalian clathrin AP-1 complex
1759; Methyltransferase required for synthesis of diphthamide, which is a modified histidine residue of translation elongation factor 2 (Eft1p or Eft2p); not essential for viability; GFP-Dph5p fusion protein localizes to the cytoplasm
1760; Component of box H/ACA small nucleolar ribonucleoprotein particles (snoRNPs), probable rRNA pseudouridine synthase, binds to snoRNP Nop10p and also interacts with ribosomal biogenesis protein Nop53p
1761; Hypothetical protein
1762; Carboxypeptidase Y inhibitor, function requires acetylation by the NatB N-terminal acetyltransferase; phosphatidylethanolamine-binding protein involved in protein kinase A signaling pathway
1763; Protein of unknown function, transcription is activated by paralogous transcription factors Yrm1p and Yrr1p along with genes involved in multidrug resistance
1764; S-adenosylmethionine synthetase, catalyzes transfer of the adenosyl group of ATP to the sulfur atom of methionine; one of two differentially regulated isozymes (Sam1p and Sam2p)
1765; Transcription factor that binds to a number of promoter regions, particularly promoters of some genes involved in pheromone response and cell cycle; potential Cdc28p substrate; expression is induced in G1 by bound SBF
1766; Protein required for the maturation of the 18S rRNA and for 40S ribosome production; associated with spindle/microtubules; nuclear localization depends on physical interaction with Nop14p; may bind snoRNAs
1767; UDP-glucose:sterol glucosyltransferase, conserved enzyme involved in synthesis of sterol glucoside membrane lipids, involved in autophagy
1768; Phosphorylated protein of the mitochondrial outer membrane, localizes only to mitochondria of the bud; interacts with Myo2p to mediate mitochondrial distribution to buds; mRNA is targeted to the bud via the transport system involving She2p
1769; Dual function protein involved in translation initiation as a substoichiometric component of eukaryotic translation initiation factor 3 (eIF3) and required for processing of 20S pre-rRNA; binds to eIF3 subunits Rpg1p and Prt1p and 18S rRNA
1770; Hypothetical protein
1771; N-myristoyl transferase, catalyzes the cotranslational, covalent attachment of myristic acid to the N-terminal glycine residue of several proteins involved in cellular growth and signal transduction
1772; Protein with WD-40 repeats involved in rRNA processing; associates with trans-acting ribosome biogenesis factors; similar to beta-transducin superfamily
1773; Essential evolutionarily-conserved nucleolar protein component of the box C/D snoRNP complexes that direct 2′-O-methylation of pre-rRNA during its maturation; overexpression causes spindle orientation defects
1774; Hypothetical protein
1775; Subunit of the heterohexameric Gim/prefoldin protein complex involved in the folding of alpha-tubulin, beta-tubulin, and actin
1776; Nuclear encoded protein required for translation of COX1 mRNA; binds to Cox1 protein
1777; Resident protein of the ER membrane that plays a central role in ER-associated protein degradation (ERAD), forms HRD complex with Hrd1p and ERAD determinants that engages in lumen to cytosol communication and coordination of ERAD events
1778; Component of both the Nup84 nuclear pore sub-complex and of the COPII complex (Sar1p, Sec13p, Sec16p, Sec23p, Sec24p, Sec31p, Sfb2p, and Sfb3p) which is important for the formation of ER to Golgi transport vesicles
1779; Purine nucleoside phosphorylase, specifically metabolizes inosine and guanosine nucleosides
1780; Ferric reductase and cupric reductase, reduces siderophore-bound iron and oxidized copper prior to uptake by transporters; expression induced by low copper and iron levels
1781; Protein of unknown function, green fluorescent protein (GFP)-fusion protein localizes to the cell periphery; msc3 mutants are defective in directing meiotic recombination events to homologous chromatids; potential Cdc28p substrate
1782; Putative vacuolar Fe2+/Mn2+ transporter; suppresses respiratory deficit of yfh1 mutants, which lack the ortholog of mammalian frataxin, by preventing mitochondrial iron accumulation
1783; Nucleolar protein, component of the small subunit (SSU) processome containing the U3 snoRNA that is involved in processing of pre-18S rRNA
1784; Hypothetical protein
1785; Hypothetical protein
1786; Cyclin for the Sgv1p (Bur1p) protein kinase; Sgv1p and Bur2p comprise a CDK-cyclin complex involved in transcriptional regulation through its phosphorylation of the carboxy-terminal domain of the largest subunit of RNA polymerase II
1787; Small rho-like GTPase, essential for establishment and maintenance of cell polarity; mutants have defects in the organization of actin and septins
1788; Kynureninase, required for biosynthesis of nicotinic acid from tryptophan via kynurenine pathway
1789; DNA Topoisomerase III, conserved protein that functions in a complex with Sgs1p and Rmi1p to relax single-stranded negatively-supercoiled DNA preferentially, involved in telomere stability and regulation of mitotic recombination
1790; Protein involved in G1 cell cycle arrest in response to pheromone, in a pathway different from the Far1p-dependent pathway; interacts with Far3p, Far7p, Far8p, Far9p, and Far11p; potential Cdc28p substrate
1791; Protein required for normal intracellular sterol distribution and for sphingolipid metabolism; similar to Nup120p and C. elegans R05H5.5 protein
1792; Methionine aminopeptidase, catalyzes the cotranslational removal of N-terminal methionine from nascent polypeptides; function is partially redundant with that of Map2p
1793; Protein kinase involved in the response to oxidative and osmotic stress; identified as suppressor of S. pombe cell cycle checkpoint mutations
1794; Translational elongation factor, stimulates the binding of aminoacyl-tRNA (AA-tRNA) to ribosomes by releasing EF-1 alpha from the ribosomal complex; contains two ABC cassettes; binds and hydrolyses ATP
1795; Protein of unknown function; green fluorescent protein (GFP)-fusion protein localizes to the cytoplasm in a punctate pattern
1796; Protein required for ethanol metabolism; induced by heat shock and localized to the inner mitochondrial membrane; homologous to mammalian peroxisomal membrane protein Mpv17
1797; Hypothetical protein
1798; homolog of nuclear distribution factor NudE, NUDEL
1799; GTPase, Ras-like GTP binding protein involved in the secretory pathway, required for fusion of endosome-derived vesicles with the late Golgi, maturation of the vacuolar carboxypeptidase Y; has similarity to the human GTPase, Rab6
1800; Similar to C. elegans protein
1801; Protein component of the small (40S) ribosomal subunit; nearly identical to Rps28Bp and has similarity to rat S28 ribosomal protein
1802; R-SNARE protein; assembles into SNARE complex with Bet1p, Bos1p and Sed5p; cycles between the ER and Golgi complex; involved in anterograde and retrograde transport between the ER and Golgi; synaptobrevin homolog
1803; Non-essential hydrolase involved in mRNA decapping, may function in a feedback mechanism to regulate deadenylation, contains pyrophosphatase activity and a FT (histidine triad) motif; interacts with neutral trehalase Nth1p
1804; Non-SMC subunit of the condensin complex (Smc2p-Smc4p-Ycs4p-Brn1p-Ycg1p); required for establishment and maintenance of chromosome condensation, chromosome segregation, chromatin binding of condensin and silencing at the mating type locus
1805; Component of the hexameric MCM complex, which is important for priming origins of DNA replication in G1 and becomes an active ATP-dependent helicase that promotes DNA melting and elongation when activated by Cdc7p-Dbf4p in S-phase
1806; ATP-dependent RNA helicase of the DEAD-box family involved in biogenesis of the 60S ribosomal subunit
1807; Putative endonuclease, subunit of the mRNA cleavage and polyadenylation specificity complex required for 3′ processing of mRNAs
1808; Putative nicotinamide N-methyltransferase, has a role in rDNA silencing and in lifespan determination
1809; Endochitinase, required for cell separation after mitosis; transcriptional activation during late G and early M cell cycle phases is mediated by transcription factor Ace2p
1810; DNA damage and meiotic pachytene checkpoint protein; subunit of a heterotrimeric complex (Rad17p-Mec3p-Ddc1p) that forms a sliding clamp, loaded onto partial duplex DNA by a clamp loader complex; homolog of human and S. pombe Hus1
1811; Mitochondrial GTPase of unknown function, similar to E. coli elongation factor-type GTP-binding protein LepA and to LK1236.1 from Caenorhabditis elegans
1812; Non-essential subunit of Sec63 complex (Sec63p, Sec62p, Sec66p and Sec72p); with Sec61 complex, Kar2p/BiP and Lhs1p forms a channel competent for SRP-dependent and post-translational SRP-independent protein targeting and import into the ER
1813; GTP binding protein (mammalian Ranp homolog) involved in the maintenance of nuclear organization, RNA processing and transport; regulated by Prp20p, Rna1p, Yrb1p, Yrb2p, Yrp4p, Yrb30p, Cse1p and Kap95p; yeast Gsp2p homolog
1814; Subunit h of the F0 sector of mitochondrial F1F0 ATP synthase, which is a large, evolutionarily conserved enzyme complex required for ATP synthesis
1815; Component of the U1 snRNP complex required for pre-mRNA splicing; putative ortholog of human U1C protein, which is involved in formation of a complex between U1 snRNP and the pre-mRNA 5′ splice site
1816; Major exo-1,3-beta-glucanase of the cell wall, involved in cell wall beta-glucan assembly; exists as three differentially glycosylated isoenzymes
1817; O-acetyl homoserine-O-acetyl serine sulfhydrylase, required for sulfur amino acid synthesis
1818; Phosphatidylinositol-4-kinase that functions in the Pkc1p protein kinase pathway; required for normal vacuole morphology, cell wall integrity % and actin cytoskeleton organization
1819; Chitin deacetylase, together with Cda2p involved in the biosynthesis ascospore wall component, chitosan; required for proper rigidity of the ascospore wall 1820; Identified by homology to Ashbya gossypii
1821; Membrane bound guanine nucleotide exchange factor (GEF or GDP-release factor); indirectly regulates adenylate cyclase through activation of Ras1p and Ras2p by stimulating the exchange of GDP for GTP; required for progression through G1 1822; Component of the septin ring of the mother-bud neck that is required for cytokinesis; septins recruit proteins to the neck and can act as a barrier to diffusion at the membrane, and they comprise the 10 nm filaments seen with EM
1823; Subunit of the RSC chromatin remodeling complex required for kinetochore function in chromosome segregation; essential gene required for cell cycle progression; phosphorylated in the G1 phase of the cell cycle; Snf5p paralog
1824; Hypothetical protein
1825; Hypothetical protein
1826; Protein involved in early stages of meiotic recombination; required for chromosome synapsis; forms a complex with Rec104p and Spo11p necessary during the initiation of recombination
1827; Protein of unknown function, involved in chitin biosynthesis by regulating Chs3p localization, also involved in cell fusion during mating
1828; O-glycosylated plasma membrane protein that acts as a sensor for cell wall integrity signaling and activates the pathway; interacts with Rom2p, a guanine nucleotide exchange factor for Rho1p, and with cell integrity pathway protein Zeo1p
1829; Protein component of the small (40S) ribosomal subunit; nearly identical to Rps25Ap and has similarity to rat S25 ribosomal protein
1830; Conserved ribosomal protein P0 similar to rat P0, human P0, and E. coli L10e; shown to be phosphorylated on serine 302
1831; Protein of unknown function; expression regulated by PDR1
1832; Karyopherin beta, forms a dimeric complex with Srp1p (Kap60p) that mediates nuclear import of cargo proteins via a nuclear localization signal (NLS), interacts with nucleoporins to guide transport across the nuclear pore complex
1833; Nit protein, one of two proteins in S. cerevisiae with similarity to the Nit domain of NitFhit from fly and worm and to the mouse and human Nit protein which interacts with the Fhit tumor suppressor; nitrilase superfamily member
1834; Hypothetical protein
1835; Protein involved in bud-site selection; diploid mutants display a unipolar budding pattern instead of the wild-type bipolar pattern, and bud at the proximal pole
1836; Transaldolase, enzyme in the non-oxidative pentose phosphate pathway; converts sedoheptulose 7-phosphate and glyceraldehyde 3-phosphate to erythrose 4-phosphate and fructose 6-phosphate
1837; Hypothetical protein
1838; One of 15 subunits of the ‘Remodel the Structure of Chromatin’ (RSC) complex; required for expression of mid-late sporulation-specific genes; contains two essential bromodomains, a bromo-adjacent homology (BAH) domain, and an AT hook
1839; Adenylosuccinate lyase, catalyzes two steps in the ‘de novo’ purine nucleotide biosynthetic pathway
1840; Part of a Vps34p phosphatidylinositol 3-kinase complex that functions in carboxypeptidase Y (CPY) sorting; binds Vps30p and Vps34p to promote production of phosphatidylinositol 3-phosphate (PtdIns3P) which stimulates kinase activity
1841; Putative phosphoesterase that functions as a dosage-dependent positive regulator of the G1/S phase transition by controlling the timing of START
1842; Identified by expression profiling and mass spectrometry
1843; Protein interacting with Nam7p, may be involved in the nonsense-mediated mRNA decay pathway
1844; Hypothetical protein
1845; Subunit of the ARP2/3 complex, which is required for the motility and integrity of cortical actin patches
1846; GDP/GTP exchange protein (GEP) for Rho1p and Rho2p; mutations are synthetically lethal with mutations in rom1, which also encodes a GEP
1847; Glycosylated integral membrane protein localized to the plasma membrane; plays a role in fructose-1,6-bisphosphatase (FBPase) degradation; involved in FBPase transport from the cytosol to Vid (vacuole import and degradation) vesicles
1848; Essential subunit of Sec61 complex (Sec61p, Sbh1p, and Sss1p); forms a channel for SRP-dependent protein import and retrograde transport of misfolded proteins out of the ER; with Sec63 complex allows SRP-independent protein import into ER
1849; Phosphatidylinositol transfer protein with a potential role in lipid turnover; interacts specifically with thioredoxin peroxidase (Tsa2p) and may have a role in oxidative stress resistance
1850; Mitochondrial leucyl-tRNA synthetase, also has a direct role in splicing of several mitochondrial group I introns; indirectly required for mitochondrial genome maintenance
1851; Protein involved in structural maintenance of chromosomes; required for interchromosomal and sister chromatid recombination; homologous to S. pombe rad18
1852; Protein involved in regulated synthesis of PtdIns(3,5)P(2), in control of trafficking of some proteins to the vacuole lumen via the MVB, and in maintenance of vacuole size and acidity; activator of Fab1p
1853; Protein of unknown function, similar to Rei1p but not involved in bud growth; contains dispersed C₂H₂ zinc finger domains
1854; Protein component of the small (40S) ribosomal subunit; nearly identical to Rps29 Bp and has similarity to rat S29 and E. coli S14 ribosomal proteins
1855; Covalently linked cell wall glycoprotein, present in the inner layer of the cell wall
1856; Mitochondrial inner membrane protein required for assembly of the F0 sector of mitochondrial F1F0 ATP synthase, interacts genetically with ATP6
1857; Subunit VIII of cytochrome c oxidase, which is the terminal member of the mitochondrial inner membrane electron transport chain
1858; ATP-binding protein that is a subunit of the homotypic vacuole fusion and vacuole protein sorting (HOPS) complex; essential for membrane docking and fusion at both the Golgi-to-endosome and endosome-to-vacuole stages of protein transport
1859; ATPase of the CDC48/PAS1/SEC18 (AAA) family, forms a hexameric complex; may be involved in degradation of aberrant mRNAs
1860; Protein involved in transcription initiation at TATA-containing promoters; associates with the basal transcription factor TFIID; contains two bromodomains; corresponds to the C-terminal region of mammalian TAF1; redundant with Bdf2p
1861; Hypothetical protein
1862; Protein of unknown function probably involved in the function of the cortical actin cytoskeleton; putative ortholog of S. pombe asp1+
1863; High-affinity copper transporter of the plasma membrane, acts as a trimer; gene is disrupted by a Ty2 transposon insertion in many laboratory strains of S. cerevisiae
1864; Hypothetical protein
1865; Protein of unknown function; green fluorescent protein (GFP)-fusion protein localizes to the cell periphery, cytoplasm, and bud
1866; Hypothetical protein
1867; Protein that interacts with and is required for activation of Apg1p protein kinase; involved in autophagy but not in the Cvt (cytoplasm to vacuole targeting) pathway
1868; Essential protein that forms a dimer with Ntr2p; also forms a trimer, with Ntr2p and Prp43p, that is involved in spliceosome disassembly; found also in a multisubunit complex with the splicing factor Clf1p; suppressor of prp38-1 mutation
1869; Guanine nucleotide exchange factor (GEF) that functions to modulate Rhop1 activity as part of the cell integrity signaling pathway; multicopy suppressor of tor2 mutation and ypk1 ypk2 double mutation; potential Cdc28p substrate
1870; DNA-3-methyladenine glycosidase II that catalyzes of the hydrolysis of alkylated DNA
1871; Coronin, cortical actin cytoskeletal component that associates with the Arp2p/Arp3p complex to regulate its activity
1872; Nuclear protein, putative helicase required for processing of tRNAs, rRNAs, and small nuclear RNAs; potential Cdc28p substrate
1873; Inosine monophosphate dehydrogenase, catalyzes the first step of GMP biosynthesis, member of a four-gene family in S. cerevisiae, constitutively expressed
1874; Non-essential protein of unknown function
1875; Hypothetical protein
1876; Lsm (Like Sm) protein; part of heteroheptameric complexes (Lsm2p-7p and either Lsm1p or 8p): cytoplasmic Lsm1p complex involved in mRNA decay; nuclear Lsm8p complex part of U6 snRNP and possibly involved in processing tRNA, snoRNA, and rRNA
1877; Mitochondrial ribosomal protein of the large subunit
1878; Protein of unknown function proposed to be involved in protein secretion
1879; Ribosomal protein 10 (rp10) of the small (40S) subunit; nearly identical to Rps1Bp and has similarity to rat S3a ribosomal protein
1880; Subunit D of the five-subunit V0 integral membrane domain of vacuolar H+-ATPase (V-ATPase), an electrogenic proton pump found in the endomembrane system; stabilizes VO subunits; required for V1 domain assembly on the vacuolar membrane
1881; Nuclear protein, putative peptidyl-prolyl cis-trans isomerase (PPIase) with similarity to Fpr3p; overproduction suppresses the growth defect resulting from the absence of E3 ubiquitin-protein ligase Tom1p
1882; Zinc-finger transcription factor that regulates genes involved in branched chain amino acid biosynthesis and ammonia assimilation; positively regulated by alpha-isopropylmalate, an intermediate in leucine biosynthesis
1883; GTPase-activating protein for Gpa1p, regulates desensitization to alpha factor pheromone; also required to prevent receptor-independent signaling of the mating pathway; member of the RGS (regulator of G-protein signaling) family
1884; Hypothetical protein
1885; Component of the mitotic apparatus containing a coiled-coil domain, essential for the G2/M transition
1886; GPI transamidase subunit, involved in attachment of glycosylphosphatidylinositol (GPI) anchors to proteins; may have a role in recognition of the attachment signal or of the lipid portion of GPI
1887; Glycoprotein required for oxidative protein folding in the endoplasmic reticulum
1888; Protein of unknown function, green fluorescent protein (GFP)-fusion protein localizes to the endoplasmic reticulum; msc1 mutants are defective in directing meiotic recombination events to homologous chromatids
1889; One of 15 subunits of the ‘Remodel the Structure of Chromatin’ (RSC) complex; DNA-binding protein involved in the synthesis of rRNA and in transcriptional repression and activation of genes regulated by the Target of Rapamycin (TOR) pathway
1890; Essential protein required for maturation of Gas1p and Pho8p; GFP-fusion protein localizes to the endoplasmic reticulum; null mutants have a cell separation defect
1891; Cytoplasmic GTP binding protein and negative regulator of the Ran/Tc4 GTPase cycle, through its homolog and binding partner, Gtr2p; involved in phosphate transport and invasive growth; human RagA and RagB proteins are functional homologs
1892; NADH:ubiquinone oxidoreductase, transfers electrons from NADH to ubiquinone in the respiratory chain but does not pump protons, in contrast to the higher eukaryotic multisubunit respiratory complex I which is absent in S. cerevisiae
1893; Protein of unknown function, potential Cdc28p substrate
1894; Putative RNA-binding protein, based on computational analysis of large-scale protein-protein interaction data
1895; DNA binding protein that recognizes oligo(dA).oligo(dT) tracts; Arg side chain in its N-terminal pentad Gly-Arg-Lys-Pro-Gly repeat is required for DNA-binding; not essential for viability
1896; Gamma subunit of C-terminal domain kinase I (CTDK-I), which phosphorylates the C-terminal repeated domain of the RNA polymerase II large subunit (Rpo21p) to affect both transcription and pre-mRNA 3′ end processing
1897; Component of the Rsp5p E3-ubiquitin ligase complex, involved in intracellular amino acid permease sorting, functions in heat shock element mediated gene expression, essential for growth in stress conditions, functional homolog of BUL1
1898; 2-hexaprenyl-6-methoxy-1,4-benzoquinone methyltransferase, involved in ubiquinone (Coenzyme Q) biosynthesis; located in mitochondria
1899; Protein that interacts with silencing proteins at the telomere, involved in transcriptional silencing; paralog of Zds1p
1900; Large subunit of trehalose 6-phosphate synthase (Tps1p)/phosphatase (Tps2p) complex, which converts uridine-5′-diphosphoglucose and glucose 6-phosphate to trehalose, homologous to Tps3p and may share function
1901; Zinc-finger transcription factor of the Zn(2)-Cys(6) binuclear cluster domain type, involved in the regulation of arginine-responsive genes; acts with Arg80p and Arg82p
1902; A guanine nucleotide exchange factor involved in vesicle-mediated vacuolar protein transport; specifically stimulates the intrinsic guanine nucleotide exchange activity of Vps21p/Rab5: similar to mammalian ras inhibitors; binds ubiquitin
1903; Single-stranded DNA endonuclease (with Rad1p), cleaves single-stranded DNA during nucleotide excision repair and double-strand break repair; subunit of Nucleotide Excision Repair Factor 1 (NEF1); homolog of human ERCC1 protein
1904; Nucleolar protein, component of the small subunit (SSU) processome containing the U3 snoRNA that is involved in processing of pre-18S rRNA
1905; Hypothetical protein
1906; D-Arabinono-1,4-lactone oxidase, catalyzes the final step in biosynthesis of D-erythroascorbic acid, which is protective against oxidative stress
1907; Hypothetical protein
1908; Subunit of the mitochondrial F1F0 ATP synthase, which is a large enzyme complex required for ATP synthesis; termed subunit I or subunit j; does not correspond to known ATP synthase subunits in other organisms
1909; Dihydrouridine synthase, member of a widespread family of conserved proteins including Smm1p, Dus3p, and Dus4p; modifies pre-tRNA(Phe) at U17
1910; Mitochondrial peptidyl-prolyl cis-trans isomerase (cyclophilin), catalyzes the cis-trans isomerization of peptide bonds N-terminal to proline residues; involved in protein refolding after import into mitochondria
1911; Component of the TRAPP (transport protein particle) complex, which plays an essential role in the vesicular transport from endoplasmic reticulum to Golgi
1912; Component of the conserved oligomeric Golgi complex (Cog1p through Cog8p), a cytosolic tethering complex that functions in protein trafficking to mediate fusion of transport vesicles to Golgi compartments
1913; Subunit of the heterodimeric FACT complex (Spt16p-Pob3p), which facilitates RNA Polymerase II transcription elongation through nucleosomes by destabilizing and then reassembling nucleosome structure
1914; Protein that modulates the efficiency of translation termination, interacts with translation release factors eRF1 (Sup45p) and eRF3 (Sup35p) in vitro, contains a zinc finger domain characteristic of the TRIAD class of proteins
1915; Protein of unknown function involved in the assembly of the prospore membrane during sporulation
1916; Largest subunit of the origin recognition complex, which directs DNA replication by binding to replication origins and is also involved in transcriptional silencing; may be phosphorylated by Cdc28p
1917; GTP-binding protein of the ras superfamily involved in termination of M-phase; controls actomyosin and septin dynamics during cytokinesis
1918; Ribosomal protein 10 (rp10) of the small (40S) subunit; nearly identical to Rps1Ap and has similarity to rat S3a ribosomal protein
1919; Mitochondrial glycosylase/lyase that specifically excises 7,8-dihydro-8-oxoguanine residues located opposite cytosine or thymine residues in DNA, repairs oxidative damage to mitochondrial DNA
1920; Ribonucleotide reductase inhibitor involved in regulating dNTP production; regulated by Mec1p and Rad53p during DNA damage and S phase
1921; Cytochrome b2 (L-lactate cytochrome-c oxidoreductase), component of the mitochondrial intermembrane space, required for lactate utilization; expression is repressed by glucose and anaerobic conditions
1922; Hypothetical protein
1923; Integral membrane protein localized to cortical patch structures; multicopy suppressor of rvs167 mutation; mutants show defects in sporulation and altered sphingolipid content in plasma membrane
1924; Transcriptional regulator involved in the repression of GAL genes in the absence of galactose; inhibits transcriptional activation by Gal4p; inhibition relieved by Gal3p or Gal1p binding
1925; U1 snRNP protein involved in splicing, contains multiple tetratricopeptide repeats
1926; Protein required for rDNA transcription by RNA polymerase I, component of the core factor (CF) of rDNA transcription factor, which also contains Rrn6p and Rrn7p
1927; Carnitine acetyl-CoA transferase present in both mitochondria and peroxisomes, transfers activated acetyl groups to carnitine to form acetylcarnitine which can be shuttled across membranes
1928; Protein of unknown function, component of the Swr1p complex that incorporates Htz1p into chromatin; required for vacuolar protein sorting
1929; Putative nucleotide sugar transporter, has similarity to Vrg4p
1930; Protein that stimulates strand exchange by facilitating Rad51p binding to single-stranded DNA; anneals complementary single-stranded DNA; involved in the repair of double-strand breaks in DNA during vegetative growth and meiosis
1931; Hypothetical protein
1932; Homeodomain-containing transcriptional repressor, binds to Mcm1p and to early cell cycle boxes (ECBs) in the promoters of cell cycle-regulated genes expressed in M/G1 phase; expression is cell cycle-regulated; potential Cdc28p substrate
1933; Adenine phosphoribosyltransferase, catalyzes the formation of AMP from adenine and 5-phosphoribosylpyrophosphate; involved in the salvage pathway of purine nucleotide biosynthesis
1934; Hypothetical protein
1935; Subunit of the oligosaccharyltransferase complex of the ER lumen, which catalyzes asparagine-linked glycosylation of newly synthesized proteins; similar to and partially functionally redundant with Ost3p.
1936; Hypothetical protein
1937; TFIID subunit (40 kDa), involved in RNA polymerase II transcription initiation, similar to histone H3 with atypical histone fold motif of Spt3-like transcription factors
1938; UBX (ubiquitin regulatory X) domain-containing protein that interacts with Cdc48p, has a ubiquitin-associated (UBA) domain, interacts with ubiquitylated proteins in vivo, and is required for degradation of a ubiquitylated model substrate
1939; Protein that forms a heterotrimeric complex with Erp1, Erp2p, and Emp24, member of the p24 family involved in endoplasmic reticulum to Golgi transport
1940; Hypothetical protein
1941; Hypothetical protein identified by homology. See FEBS Letters [2000] 487:31-36.
1942; Basic leucine zipper (bZIP) transcription factor required for oxidative stress tolerance; mediates pleiotropic drug and metal resistance; localized to the nucleus in response to the presence of oxidants
1943; CAAX box containing protein of unknown function, proposed to be involved in the RAS/cAMP signaling pathway
1944; GTPase; GTP-binding protein of the rab family; required for homotypic fusion event in vacuole inheritance, for endosome-endosome fusion, similar to mammalian Rab7
1945; Polo-like kinase with similarity to Xenopus Plx1 and S. pombe Plo1p; found at bud neck, nucleus and SPBs; has multiple functions in mitosis and cytokinesis through phosphorylation of substrates; may be a Cdc28p substrate
1946; Hypothetical protein
1947; Hypothetical protein
1948; Protein required for sorting proteins to the vacuole; overproduction of Mvp1p suppresses several dominant VPS1 mutations; Mvp1p and Vps1p act in concert to promote membrane traffic to the vacuole
1949; TFIID subunit (48 kDa), involved in RNA polymerase II transcription initiation; potential Cdc28p substrate
1950; Acireductone dioxygenease involved in the methionine salvage pathway; ortholog of human MTCBP-1
1951; eIF3 component of unknown function; deletion causes defects in mitochondrial organization but not in growth or translation initiation, can rescue cytokinesis and mitochondrial organization defects of the Dictyostelium cluA-mutant
1952; Dolichol kinase, catalyzes the terminal step in dolichyl monophosphate (Dol-P) biosynthesis; required for viability and for normal rates of lipid intermediate synthesis and protein N-glycosylation
1953; Protein involved in bud-site selection; diploid mutants display a random budding pattern instead of the wild-type bipolar pattern
1954; C-22 sterol desaturase, a cytochrome P450 enzyme that catalyzes the formation of the C-22(23) double bond in the sterol side chain in ergosterol biosynthesis; may be a target of azole antifungal drugs
1955; Copper-sensing transcription factor involved in regulation of genes required for high affinity copper transport
1956; Ubiquitin conjugating enzyme, involved in the ER-associated protein degradation pathway; requires Cue1p for recruitment to the ER membrane; proposed to be involved in chromatin assembly
1957; RING-finger peroxisomal membrane peroxin that plays an essential role in peroxisome biogenesis and peroxisomal matrix protein import, forms translocation subcomplex with Pex2p and Pex10p
1958; Essential protein involved in the TOR signaling pathway, physically associates with the protein phosphatase 2A and the SIT4 protein phosphatase catalytic subunits
1959; Protein involved in G1 cell cycle arrest in response to pheromone, in a pathway different from the Far1p-dependent pathway; interacts with Far3p, Far7p, Far9p, Far10p, and Far11p
1960; Protein required for respiratory growth; localized to both the nucleus and mitochondrion; mutant displays decreased transcription of specific nuclear and mitochondrial genes whose products are involved in respiratory growth
1961; Protein of unknown function; green fluorescent protein (GFP)-fusion protein localizes to the cytoplasm in a punctate pattern
1962; Catalytic subunit of the mitochondrial inner membrane peptidase complex, required for maturation of mitochondrial proteins of the intermembrane space; complex contains Imp1p and Imp2p (both catalytic subunits), and Som1p
1963; Transcriptional activator related to Msn4p; activated in stress conditions, which results in translocation from the cytoplasm to the nucleus; binds DNA at stress response elements of responsive genes, inducing gene expression
1964; Copper chaperone for superoxide dismutase Sod1p, involved in oxidative stress protection; Met-X-Cys-X2-Cys motif within the N-terminal portion is involved in insertion of copper into Sod1p under conditions of copper deprivation
1965; Transcriptional coactivator, facilitates elongation by influencing enzymes that modify RNAP II, acts in a peroxide resistance pathway involving Rad2p; suppressor of TFIIB mutations
1966; Transcription factor involved in cell-type-specific transcription and pheromone response; plays a central role in the formation of both repressor and activator complexes
1967; Member of a complex (Isw1b) with Isw1p and Ioc2p that exhibits nucleosome-stimulated ATPase activity and acts within coding regions to coordinate transcription elongation with termination and processing, contains a PWWP motif
1968; Protein involved in G1 cell cycle arrest in response to pheromone, in a pathway different from the Far1p-dependent pathway; interacts with Far7p, Far8p, Far9p, Far10p, and Far11p
1969; Component of the mitochondrial outer membrane sorting and assembly machinery (SAM complex; required for the sorting of some proteins to the outer membrane after import by the TOM complex
1970; Mitochondrial ornithine acetyltransferase, catalyzes the fifth step in arginine biosynthesis; also possesses acetylglutanate synthase activity, regenerates acetylglutamate while forming ornithine
1971; Protein of unknown function, involved in the proteolytic activation of Rim101p in response to alkaline pH; has similarity to A. nidulans PalI; putative membrane protein
1972; UBX (ubiquitin regulatory X) domain-containing protein that interacts with Cdc48p
1973; Integral membrane protein localized to late Golgi vesicles along with the v-SNARE Tlg2p
1974; Putative protein of unknown function; proposed to be involved in resistance to carboplatin and cisplatin; shares similarity to a human cytochrome oxidoreductase
1975; Myristoylated subunit of ESCRTIII, the endosomal sorting complex required for transport of transmembrane proteins into the multivesicular body pathway to the lysosomal/vacuolar lumen; cytoplasmic protein recruited to endosomal membranes
1976; Subunit of a complex with Ctf8p that shares some subunits with Replication Factor C and is required for sister chromatid cohesion; may have overlapping functions with Rad24p in the DNA damage replication checkpoint
1977; Mitochondrial alcohol dehydrogenase isozyme III; involved in the shuttling of mitochondrial NADH to the cytosol under anaerobic conditions and ethanol production
1978; Hypothetical protein
1979; Hypothetical protein
1980; Actin cortical patch component, interacts with the actin depolymerizing factor cofilin; required to restrict cofilin localization to cortical patches; contains WD repeats
1981; Subunit of the CBF3 complex, which binds to the CDE III element of centromeres, bending the DNA upon binding, and may be involved in sister chromatid cohesion during mitosis
1982; Protein involved in vitamin B6 biosynthesis; member of a stationary phase-induced gene family; coregulated with SNO₁; interacts with Sno1p and with Yhr198p, perhaps as a multiprotein complex containing other Snz and Sno proteins
1983; Peripheral GTPase of the mitochondrial inner membrane, essential for respiratory competence, likely functions in assembly of the large ribosomal subunit, has homologs in plants and animals
1984; Hypothetical protein
1985; Protein of unknown function, deletion causes multi-budding phenotype; has similarity to Aspergillus nidulans samB gene
1986; Phosphoglucomutase, catalyzes the conversion from glucose-1-phosphate to glucose-6-phosphate, which is a key step in hexose metabolism; functions as the acceptor for a Glc-phosphotransferase
1987; Protein required for survival at high temperature during stationary phase; not required for growth on nonfermentable carbon sources
1988; Acetolactate synthase, catalyses the first common step in isoleucine and valine biosynthesis and is the target of several classes of inhibitors, localizes to the mitochondria; expression of the gene is under general amino acid control
1989; Hypothetical protein
1990; Component of the evolutionarily conserved kinetochore-associated Ndc80 complex (Ndc80p-Nuf2p-Spc24p-Spc25p); involved in chromosome segregation, spindle checkpoint activity and kinetochore clustering
1991; Hypothetical protein
1992; Putative integral membrane E3 ubiquitin ligase; genetic interactions suggest a role in negative regulation of amino acid uptake
1993; Enzyme of ‘de novo’ purine biosynthesis containing both 5-aminoimidazole-4-carboxamide ribonucleotide transformylase and inosine monophosphate cyclohydrolase activities, isozyme of Ade16p; ade16 ade17 mutants require adenine and histidine
1994; Protein component of the large (60S) ribosomal subunit, nearly identical to Rpl15Ap and has similarity to rat L15 ribosomal protein; binds to 5.8 S rRNA
1995; Hypothetical protein
1996; Protein of unknown function; green fluorescent protein (GFP)-fusion protein localizes to the cell periphery, cytoplasm, bud, and bud neck
1997; Protein of unknown function, deletion causes sensitivity to thermal stress
1998; Histone acetyltransferase (HAT) catalytic subunit of the SAS complex (Sas2p-Sas4p-Sas5p), which acetylates free histones and nucleosomes and regulates transcriptional silencing; member of the MYSTacetyltransferase family
1999; Hypothetical protein
2000; Essential nuclear protein involved in early steps of ribosome biogenesis; physically interacts with the ribosomal protein Rpl3p
2001; Protein required for cell viability
2002; Protein of unknown function, involved in proteasome-dependent catabolite inactivation of fructose-1,6-bisphosphatase; contains LisH and CTLH domains, like Vid30p; dosage-dependent regulator of START
2003; Protein containing GATA family zinc finger motifs; similar to Gln3p and Dal80p; expression repressed by leucine
2004; Required for a post-incision step in the repair of DNA single and double-strand breaks that result from interstrand crosslinks produced by a variety of mono- and bi-functional psoralen derivatives; induced by UV-irradiation
2005; Protein kinase required for signal transduction during entry into meiosis; promotes the formation of the Ime1p-Ume6p complex by phosphorylating Ime1p and Ume6p; shares similarity with mammalian glycogen synthase kinase 3-beta
2006; Protein of unknown function; interacts with both the Reg1p/Glc7p phosphatase and the Snf1p kinase
2007; Mitochondrial external NADH dehydrogenase, catalyzes the oxidation of cytosolic NADH; Nde1p and Nde2p are involved in providing the cytosolic NADH to the mitochondrial respiratory chain
2008; Subunit of the core complex of translation initiation factor 3(eIF3), which is essential for translation
2009; Hypothetical protein
2010; Delta subunit of the oligosaccharyl transferase glycoprotein complex, which is required for N-linked glycosylation of proteins in the endoplasmic reticulum2011; Catalytic subunit of the mitochondrial inner membrane peptidase complex, required for maturation of mitochondrial proteins of the intermembrane space; complex contains Imp1p and Imp2p (both catalytic subunits), and Som1p
2012; Protein of unknown function; proposed to be involved in responding to DNA damaging agents
2013; Subunit of the nuclear pore complex (NPC), interacts with karyopherin Kap121p or with Nup170p via overlapping regions of Nup53p, involved in activation of the spindle checkpoint mediated by the Mad1p-Mad2p complex
2014; The authentic, non-tagged protein was localized to the mitochondria
2015; Mitochondrial ribosomal protein of the small subunit
2016; Non-essential P-type ATPase that is a potential aminophospholipid translocase, localizes to the trans-Golgi, likely involved in protein transport
2017; Protein of unknown function; green fluorescent protein (GFP)-fusion protein localizes to the cytoplasm in a punctate pattern
2018; Protein required for mismatch repair in mitosis and meiosis, postmeiotic segregation, and spore viability; forms a complex with Pms1p and Msh2p to repair mismatched DNA; human homolog is associated with hereditary non-polyposis colon cancer
2019; Essential kinetochore protein, component of the CBF3 complex that binds the CDEIII region of the centromere; contains an N-terminal Zn2Cys6 type zinc finger domain, a C-terminal acidic domain, and a putative coiled coil dimerization domain
2020; Cytoplasmic aldehyde dehydrogenase, involved in beta-alanine synthesis; uses NAD+ as the preferred coenzyme; very similar to Ald2p; expression is induced by stress and repressed by glucose
2021; Cytoplasmic proteinase A inhibitor, dependent on Pbs2p and Hog1p protein kinases for osmotic induction; intrinsically unstructured, N-terminal half becomes ordered in the active site of proteinase A upon contact
2022; Protein of unknown function whose expression is induced by osmotic stress
2023; Non-essential protein of unknown function, contains ATP/GTP-binding site motif A; null mutant exhibits cellular volume up to four times greater than wild-type, also large drooping buds with elongated necks
2024; Protein of unknown function; open reading frame may be part of a bicistronic transcript with RGM1
2025; Plasma membrane t-SNARE involved in fusion of secretory vesicles at the plasma membrane; syntaxin homolog that is functionally redundant with Sso1p
2026; Cytoplasmic chaperone of the Hsp90 family, redundant in function and nearly identical with Hsp82p, and together they are essential; expressed constitutively at 10-fold higher basal levels that HSP82 and induced 2-3 fold by heat shock
2027; P subunit of the mitochondrial glycine decarboxylase complex, required for the catabolism of glycine to 5,10-methylene-THF; expression is regulated by levels of levels of 5,10-methylene-THF in the cytoplasm
2028; Mitochondrial ribosomal protein of the large subunit
2029; Protein that interacts with the cytoskeleton and is involved in chromatin organization and nuclear transport, interacts genetically with TCP1 and ICY2, required for viability in rich media of cells lacking mitochondrial DNA
2030; Hypothetical protein
2031; Protein involved in cis-Golgi membrane traffic; v-SNARE that interacts with two t-SNARES, Sed5p and Pep12p; required for multiple vacuolar sorting pathways 2032; Kinesin-associated protein required for both karyogamy and mitotic spindle organization, interacts stably and specifically with Kar3p and may function to target this kinesin to a specific cellular role; has similarity to Vik1p
2033; Protein that may be involved in cell wall function; mutations in rot1 cause cell wall defects, suppress tor2 mutations, and are synthetically lethal with rot2 mutations
2034; C-8 sterol isomerase, catalyzes the isomerization of the delta-8 double bond to the delta-7 position at an intermediate step in ergosterol biosynthesis
2035; Component of the TOM (translocase of outer membrane) complex responsible for recognition and initial import steps for all mitochondrially directed proteins; constitutes the core element of the protein conducting pore
2036; Peripheral membrane protein of peroxisomes involved in peroxisomal inheritance
2037; Beta subunit of heterooctameric phosphofructokinase involved in glycolysis, indispensable for anaerobic growth, activated by fructose-2,6-bisphosphate and AMP, mutation inhibits glucose induction of cell cycle-related genes
2038; Mevalonate kinase, acts in the biosynthesis of isoprenoids and sterols, including ergosterol, from mevalonate
2039; Essential protein involved in mtDNA inheritance, may also function in the partitioning of the mitochondrial organelle or in the segregation of chromosomes, exhibits regions similar to members of a GTPase family
2040; Non-essential protein of unknown function; exhibits synthetic lethal genetic interactions with PHO85; green fluorescent protein (GFP)-fusion protein localizes to the cell periphery
2041; Putative 1,3-beta-glucanosyltransferase, has similarity to Gas1p; localizes to the cell wall
2042; SR protein kinase (SRPK) involved in regulating proteins involved in mRNA metabolism and cation homeostasis; similar to human SRPK1
2043; GMP synthase, an enzyme that catalyzes the second step in the biosynthesis of GMP from inosine 5′-phosphate (IMP); transcription is not subject to regulation by guanine but is negatively regulated by nutrient starvation
2044; One of 10 subunits of the transport protein particle (TRAPP) complex of the cis-Golgi which mediates vesicle docking and fusion; involved in ER to Golgi membrane traffic; mutation activates transcription of OCHI
2045; Ubiquitin-specific protease that is a component of the SAGA (Spt-Ada-Gcn5-Acetyltransferase) acetylation complex; required for SAGA-mediated deubiquitination of histone H₂B
2046; Subunit of a complex with Rad50p and Xrs2p (RMX complex) that functions in repair of DNA double-strand breaks and in telomere stability, exhibits nuclease activity that appears to be required for RMX function; widely conserved
2047; NADP(+)-dependent dehydrogenase; acts on serine, L-allo-threonine, and other 3-hydroxy acids
2048; TFIID subunit (67 kDa), involved in RNApolymerase II transcription initiation
2049; Mitochondrial RNA polymerase sigma-like specificity factor required for promoter recognition, interacts with mitochondrial core polymerase Rpo41p, imported into mitochondria via a novel process requiring most of the Mtf1p sequence
2050; Protein required for the synthesis of both 18S and 5.8S rRNA; C-terminal region is crucial for the formation of 18S rRNA and N-terminal region is required for the 5.8S rRNA; component of small ribosomal subunit (SSU) processosome
2051; Ribonuclease H1, removes RNA primers during Okazaki fragment synthesis; degrades RNA attached to the 5′-end of a DNA strand
2052; GTPase activating protein (GAP) for Gsp1p, involved in nuclear transport
2053; Protein that colocalizes with clathrin-coated vesicles; involved in transport at the trans-Golgi
2054; Putative mannosidase, essential glycosylphosphatidylinositol (GPI)-anchored membrane protein required for cell wall biogenesis in bud formation, involved in filamentous growth, homologous to Dcw1p
2055; RNAase III; cleaves a stem-loop structure at the 3′ end of U2 snRNA to ensure formation of the correct U2 3′ end
2056; Protein required for assembly of U2 snRNP into the spliceosome, forms a complex with Hsh49p and Hsh155p
2057; Vacuolar membrane zinc transporter, transports zinc from the cytosol into the vacuole for storage; also has a role in resistance to zinc shock resulting from a sudden influx of zinc into the cytoplasm
2058; Glutamate decarboxylase, converts glutamate into gamma-aminobutyric acid (GABA) during glutamate catabolism; involved in response to oxidative stress
2059; Protein of unknown function; overexpression suppresses Ca2+ sensitivity of mutants lacking inositol phosphorylceramide mannosyltransferases Csg1p and Csh1p; transcription is induced under hyperosmotic stress and repressed by alpha factor
2060; Hypothetical protein
2061; Protein of unknown function; green fluorescent protein (GFP)-fusion protein localizes to the cytoplasm in a punctate pattern
2062; Coiled-coiled protein of unknown function, identified as a high-copy suppressor of a dbp5 mutation
2063; Subunit VII of cytochrome c oxidase, which is the terminal member of the mitochondrial inner membrane electron transport chain
2064; Translation initiation factor eIF1A, essential protein that forms a complex with Sui1p (eIF1) and the 40S ribosomal subunit and scans for the start codon; C-terminus associates with Fun12p (eIF5B); N terminus interacts with eIF2 and eIF3
2065; Regulatory subunit of trehalose-6-phosphate synthase/phosphatase complex, which synthesizes the storage carbohydrate trehalose; expression is induced by stress conditions and repressed by the Ras-cAMP pathway
2066; Mitochondrial inorganic pyrophosphatase, required for mitochondrial function and possibly involved in energy generation from inorganic pyrophosphate
2067; Splicing factor that reanneals U4 and U6 snRNPs during spliceosome recycling
2068; One of two orotate phosphoribosyltransferase isozymes (see also URA5) that catalyze the fifth enzymatic step in the de novo biosynthesis of pyrimidines, converting orotate into orotidine-5′-phosphate
2069; Sphingolipid alpha-hydroxylase, functions in the alpha-hydroxylation of sphingolipid-associated very long chain fatty acids, has both cytochrome b5-like and hydroxylase/desaturase domains, not essential for growth
2070; Type II CAAX prenyl protease involved in the proteolysis and maturation of Ras and the a-factor mating pheromone
2071; Nuclear-enriched ubiquitin-like polyubiquitin-binding protein, required for spindle pole body (SPB) duplication and for transit through the G2/M phase of the cell cycle, involved in proteolysis, interacts with the proteasome
2072; Hypothetical protein
2073; Mitochondrial protein, likely involved in translation of the mitochondrial OLI1 mRNA; exhibits genetic interaction with the OLI1 mRNA 5′-untranslated leader
2074; Subunit of the telomeric Ku complex (Yku70p-Yku80p), involved in telomere length maintenance, structure and telomere position effect; relocates to sites of double-strand cleavage to promote nonhomologous end joining during DSB repair
2075; ATP-dependent RNA helicase; localizes to both the nuclear periphery and nucleolus; highly enriched in nuclear pore complex fractions; constituent of 66S pre-ribosomal particles
2076; Protein of unknown function; green fluorescent protein (GFP)-fusion protein localizes to the cell periphery and bud
2077; Ceramide synthase subunit; single-span ER membrane protein associated with Lag1p and Lac1p and required for ceramide synthase activity, null mutant grows extremely slowly and is defective in ceramide synthesis
2078; Phosphoribosylpyrophosphate amidotransferase (PRPPAT; amidophosphoribosyltransferase), catalyzes first step of the ‘de novo’ purine nucleotide biosynthetic pathway
2079; Mitochondrial inner membrane transporter, exports mitochondrially synthesized precursors of iron-sulfur (Fe/S) clusters to the cytosol; member of the ATP-binding cassette (ABC) transporter family
2080; Histone deacetylase; regulates transcription and silencing
2081; Protein required for efficient mating, member of a family of eukaryotic proteins that contain a domain homologous to Sac1p
2082; Protein of unknown function, potential Cdc28p substrate
2083; Hypothetical protein
2084; Protein of unknown function with similarity to hexose transporter family members, expression is induced by low levels of glucose and repressed by high levels of glucose
2085; Integral subunit of the pre-mRNA cleavage and polyadenylation factor (CPF) complex; plays an essential role in mRNA 3′-end formation by bridging different processing factors and thereby promoting the assembly of the processing complex
2086; Molecular chaperone, required for the assembly of alpha and beta subunits into the F1 sector of mitochondrial F1F0 ATP synthase
2087; Positive regulator of allophanate inducible genes; binds a dodecanucleotide sequence upstream of all genes that are induced by allophanate; contains an UISALL DNA-binding, a transcriptional activation, and a coiled-coil domain
2088; Protein required for cell viability
2089; F-box protein
2090; Mitochondrial ribosomal protein of the small subunit; essential for viability, unlike most other mitoribosomal proteins
2091; Hypothetical protein
2092; Hypothetical protein
2093; Cdc42p activated signal transducing kinase of the PAK (p21-activated kinase) family, involved in septin ring assembly and cytokinesis; directly phosphorylates septins Cdc3p and Cdc10p; other yeast PAK family members are Step 20p and Skm1p
2094; Pseudouridine synthase, catalyzes only the formation of pseudouridine-55 (Psi55), a highly conserved tRNA modification, in mitochondrial and cytoplasmic tRNAs; PUS4 overexpression leads to translational derepression of GCN4 (Gcd-phenotype)
2095; N-glycosylated integral membrane protein of the ER membrane and plasma membrane, required for Ca2+ influx stimulated by pheromone, functions as a stretch-activated Ca2+-permeable cation channel in mammals; forms an oligomer
2096; Pho85 cyclin of the Pcl1,2-like subfamily, involved in entry into the mitotic cell cycle and regulation of morphogenesis, localizes to sites of polarized cell growth
2097; Evolutionarily conserved subunit of the CCR4-NOT complex involved in controlling mRNA initiation, elongation and degradation; binds Cdc39p
2098; Partially redundant sensor-transducer of the stress-activated PKC1-MPK1 signaling pathway involved in maintenance of cell wall integrity and recovery from heat shock; secretory pathway Wsc2p is required for the arrest of secretion response
2099; Heat shock protein regulator that binds to Hsp90p and may stimulate ATPase activity; originally identified as a high-copy number suppressor of a HSP90 loss-of-function mutation; GFP-fusion protein localizes to the cytoplasm and nucleus 2100; C-14 sterol reductase, acts in ergosterol biosynthesis; mutants accumulate the abnormal sterol ignosterol (ergosta-8,14 dienol), and are viable under anaerobic growth conditions but inviable on rich medium under aerobic conditions
2101; L-homoserine-O-acetyltransferase, catalyzes the conversion of homoserine to O-acetyl homoserine which is the first step of the methionine biosynthetic pathway
2102; Putative hydroxyisocaproate dehydrogenase
2103; Guanyl-nucleotide exchange factor for the small G-protein Sec4p, located on cytoplasmic vesicles; essential for post-Golgi vesicle transport
2104; Basic amino acid transporter, involved in uptake of cationic amino acids
2105; Lysine permease; one of three amino acid permeases (Alp1p, Can1p, Lyp1p) responsible for uptake of cationic amino acids
2106; Phosphatidylinositol 4-kinase; catalyzes first step in the biosynthesis of phosphatidylinositol-4,5-biphosphate; may control cytokineses through the actin cytoskeleton
2107; Integral membrane protein required for the fusion of ER-derived COPII transport vesicles with the Golgi; interacts with Ylp1p and Yos1p; localizes to the Golgi, the ER, and COPII vesicles
2108; Subunit of the origin recognition complex, which directs DNA replication by binding to replication origins and is also involved in transcriptional silencing
2109; Cytosolic copper metallochaperone that transports copper to the secretory vesicle copper transporter Ccc2p for eventual insertion into Fet3p, which is a multicopper oxidase required for high-affinity iron uptake
2110; Putative zinc finger protein with similarity to human CNBP, proposed to be involved in the RAS/cAMP signaling pathway
2111; Protein involved in mRNA export, component of the transcription export (TREX) complex
2112; Mitochondrial ribosomal protein of the large subunit
2113; RNA-binding protein that interacts with the C-terminal domain of the RNA polymerase II large subunit (Rpo21p), required for transcription termination and 3′ end maturation of nonpolyadenylated RNAs
2114; RNApolymerase I subunit A49
2115; Component of a complex containing Cef1p, involved in pre-mRNA splicing; has similarity to S. pombe Cwf25p
2116; Translation initiation factor eIF1; component of a complex involved in recognition of the initiator codon; modulates translation accuracy at the initiation phase
2117; Transmembrane actin-binding protein involved in membrane cytoskeleton assembly and cell polarization; adaptor protein that links actin to clathrin and endocytosis; present in the actin cortical patch of the emerging bud tip; dimer in vivo
2118; Probable type-III integral membrane protein of unknown function, has regions of similarity to mitochondrial electron transport proteins
2119; Similar to globins and has a functional heme-binding domain; involved in glucose signaling or metabolism; regulated by Rgt1p
2120; Targeting subunit for Glc7p protein phosphatase, localized to the bud neck, required for localization of chitin synthase III to the bud neck via interaction with the chitin synthase III regulatory subunit Skt5p
2121; Elongin A, F-box protein that forms a heterodimer with Elc1p and participates in transcription elongation
2122; Component of the spindle pole body outer plaque; required for spindle orientation and mitotic nuclear migration
2123; Hypothetical protein
2124; Transcription/RNA-processing factor that associates with TFIIB and cleavage/polyadenylation factor Pta1p; exhibits phosphatase activity on serine-5 of the RNA polymerase II C-terminal domain; affects start site selection in vivo
2125; Subunit of both RNase MRP, which cleaves pre-rRNA, and nuclear RNase P, which cleaves tRNA precursors to generate mature 5′ ends; binds to the RPR1RNA subunit in Rnase P
2126; Mannosyltransferase, involved in N-linked glycosylation; catalyzes the transfer of mannose from Dol-P-Man to lipid-linked oligosaccharides; mutation of the human ortholog causes type 1 congenital disorders of glycosylation
2127; Hypothetical protein
2128; DNA-binding protein involved in either activation or repression of transcription, depending on binding site context; also binds telomere sequences and plays a role in telomeric position effect (silencing) and telomere structure
2129; Protein that associates with the INO80 chromatin remodeling complex under low-salt conditions
2130; Hypothetical protein
2131; Cytoplasmic protein of unknown function; possibly involved in vacuolar protein degradation; not essential for proteasome-dependent degradation of fructose-1,6-bisphosphatase (FBPase); null mutants exhibit normal growth
2132; Essential serine kinase involved in the processing of the 20S pre-rRNA into mature
18S rRNA; has similarity to Rio1p
2133; Protein with a role in regulation of Ty1 transposition
2134; Hypothetical protein; similarity to human TGR-CL10C, thyroidal receptor for N-acetylglucosamine
2135; Hypothetical protein
2136; Hypothetical protein
2137; Ubiquitin-specific protease that deubiquitinates ubiquitin-protein moieties; may regulate silencing by acting on Sir4p; involved in posttranscriptionally regulating Gap1p and possibly other transporters; primarily located in the nucleus
2138; Mitochondrial ribosomal protein of the large subunit
2139; Protein required for cell viability
2140; Non-essential small GTPase of the Rho/Rac subfamily of Ras-like proteins, likely involved in protein kinase C (Pkc1p)-dependent signal transduction pathway that controls cell integrity
2141; Hypothetical protein
2142; Protein of unknown function, localizes to the nucleolus and nucleoplasm; contains an RNA recognition motif (RRM) and has similarity to Nop12p, which is required for processing of pre-18S rRNA
2143; Plasma membrane protein involved in G-protein mediated pheromone signaling pathway; overproduction suppresses bem1 mutations
2144; Phosphatidylserine decarboxylase of the mitochondrial inner membrane, converts phosphatidylserine to phosphatidylethanolamine
2145; The authentic, non-tagged protein was localized to mitochondria
2146; Basic leucine zipper (bZIP) transcription factor of the ATF/CREB family that forms a complex with Tup1p and Ssn6p to both activate and repress transcription; cytosolic and nuclear protein involved in the osmotic and oxidative stress responses
2147; Protein involved in organization of septins at the mother-bud neck, may interact directly with the Cdc11p septin, localizes to bud neck in a septin-dependent manner
2148; Hypothetical protein
2149; Hypothetical protein identified by homology. See FEBS Letters [2000] 487:31-36.
2150; Serine/threonine protein kinase that regulates cell morphogenesis pathways; involved in cell wall biosynthesis, apical growth, proper mating projection morphology, bipolar bud site selection in diploid cells, and cell separation
2151; Cell wall-related secretory glycoprotein; induced by nutrient deprivation-associated growth arrest and upon entry into stationary phase; may be involved in adaptation prior to stationary phase entry; has similarity to Sps100p
2152; Predicted membrane protein; genetic interactions suggest a role in negative regulation of amino acid uptake
2153; Hypothetical protein
2154; Protein of unknown function, potential homolog of mammalian Insig 1
2155; Palmitoylated, plasma membrane-bound casein kinase I isoform; shares redundant functions with Yck1p in morphogenesis, proper septin assembly, endocytic trafficking; provides an essential function overlapping with that of Yck1p
2156; Subunit of the heterohexameric cochaperone prefoldin complex which binds specifically to cytosolic chaperonin and transfers target proteins to it
2157; Essential protein required for maturation of Gas1p and Pho8p; GFP-fusion protein localizes to the endoplasmic reticulum (ER) and YFP-fusion protein to the nuclear envelope-ER network; null mutants have a cell separation defect
2158; Alpha-tubulin folding protein, similar to mammalian cofactor B; Alf1p-GFP localizes to cytoplasmic microtubules; required for the folding of alpha-tubulin and may play an additional role in microtubule maintenance
2159; Hypothetical protein
2160; Mating pheromone a-factor, made by a cells; interacts with alpha cells to induce cell cycle arrest and other responses leading to mating; biogenesis involves C-terminal modification, N-terminal proteolysis, and export; also encoded by MFA1
2161; Adenine deaminase (adenine aminohydrolase), involved in purine salvage and nitrogen catabolism
2162; CAP (cyclase-associated protein) subunit of adenylyl cyclase complex; N-terminus binds adenylyl cyclase and facilitates activation by RAS; C-terminus binds ADP-actin monomers, facilitating regulation of actin dynamics and cell morphogenesis
2163; Subunit of the NuA4 histone acetyltransferase complex, which acetylates the N-terminal tails of histones H4 and H2A
2164; Peptidyl-prolyl cis-trans isomerase (PPIase), binds to the drugs FK506 and rapamycin; also binds to the nonhistone chromatin binding protein Hmo1p and may regulate its assembly or function
2165; Essential protein of unknown function; heterozygous mutant shows haploinsufficiency in K1 killer toxin resistance
2166; Component of the TOM (translocase of outer membrane) complex responsible for initial import of mitochondrially directed proteins; acts as a receptor for precursor proteins and mediates interaction between the TOM and TIM complexes
2167; Nicotinamide riboside kinase, catalyzes the synthesis of nicotinamide nucleotide (NMN) from nicotinamide riboside; involved in a salvage pathway for NAD+biosynthesis
2168; Protein involved in G1 cell cycle arrest in response to pheromone, in a pathway different from the Far1p-dependent pathway; interacts with Far3p, Far7p, Far8p, Far9p, and Far10p
2169; Protein with similarity to monocarboxylate permeases, appears not to be involved in transport of monocarboxylates such as lactate, pyruvate or acetate across the plasma membrane
2170; shows protein sequence similarity to the mammalian Omi/HtrA2 family of serine proteases
2171; Component of the TOM (translocase of outer membrane) complex responsible for recognition and initial import steps for all mitochondrially directed proteins; acts as a receptor for incoming precursor proteins
2172; Catalytic subunit of the Dcp1p-Dcp2p decapping enzyme complex, which removes the 5′ cap structure from mRNAs prior to their degradation; member of the Nudix hydrolase family
2173; Malate synthase, enzyme of the glyoxylate cycle, involved in utilization of non-fermentable carbon sources; expression is subject to carbon catabolite repression; localizes in peroxisomes during growth in oleic acid medium
2174; Protein involved in regulating spindle position and orientation, functionally redundant with Dma1p; homolog of S. pombe Dma1 and H. sapiens Chfr
2175; Hypothetical protein
2176; RNApolymerase subunit, common to RNA polymerases I and III
2177; Cytochrome b5, involved in the sterol and lipid biosynthesis pathways; required for sterol C5-6 and fatty acid desaturation
2178; Constituent of 66S pre-ribosomal particles, involved in 60S ribosomal subunit biogenesis; localizes to both nucleolus and cytoplasm
2179; Hypothetical protein
2180; Phosphatidylinositol 4,5-bisphosphate 5-phosphatase, synaptojanin-like protein with an N-terminal Sac1 domain, plays a role in endocytosis; hyperosmotic stress causes translocation to actin patches
2181; Vacuolar transporter, exports large neutral amino acids from the vacuole; member of a family of seven S. cerevisiae genes (AVT1-7) related to vesicular GABA-glycine transporters
2182; Hypothetical protein
2183; Putative protein tyrosine phosphatase, required for cell cycle arrest in response to oxidative damage of DNA
2184; GTP-binding protein that regulates the nitrogen starvation response, sporulation, and filamentous growth; farnesylation and palmitoylation required for activity and localization to plasma membrane; homolog of mammalian Ras proto-oncogenes
2185; Probable component of the Rpd3 histone deacetylase complex, involved in transcriptional regulation of PHO5; C-terminus has similarity to human candidate tumor suppressor p33(ING1)
2186; Hypothetical protein
2187; Protein of unknown function, interacts with Rvs161p and Rvs167p; computational analysis of protein-protein interactions in large-scale studies suggests a possible role in actin filament organization
2188; GTPase, similar to Ypt51p and Ypt52p and to mammalian rab5; required for vacuolar protein sorting and endocytosis
2189; Protein of unknown function, mediates sensitivity to salt stress; interacts physically with the splicing factor Msl1p and also displays genetic interaction with MSL1
2190; Non-essential small GTPase of the Rho/Rac subfamily of Ras-like proteins, involved in the establishment of cell polarity and in microtubule assembly
2191; Essential type II topoisomerase, relieves torsional strain in DNA by cleaving and re-sealing the phosphodiester backbone of both positively and negatively supercoiled DNA; cleaves complementary strands; localizes to axial cores in meiosis
2192; Bud-specific protein with a potential role in membrane trafficking; GFP-fusion protein migrates from the cell surface to intracellular vesicles near vacuole; contains 3 calcium and lipid binding domains; mRNA is targeted to the bud via the mRNA transport system involving She2p
2193; Protein that forms a complex with Pbp1p that may mediate posttranscriptional regulation of HO endonuclease; involved in propagation of M2 dsRNA satellite of L-A virus
2194; EH domain-containing protein involved in endocytosis, actin cytoskeletal organization and cell wall morphogenesis; forms a complex with Sla1p and Pan1p
2195; Putative mitochondrial ribosomal protein of the small subunit, has similarity to E. coli S13 ribosomal protein
2196; Major isoform of tropomyosin; binds to and stabilizes actin cables and filaments, which direct polarized cell growth and the distribution of several organelles; acetylated by the NatB complex and acetylated form binds actin most efficiently
2197; Component of the SSU processome, which is required for pre-18S rRNA processing; interacts with Mpp10p; member of a superfamily of proteins that contain a sigma(70)-like motif and associate with RNAs
2198; Mitochondrial lysine-tRNA synthetase, required for import of both aminoacylated and deacylated forms of tRNA(Lys) into mitochondria
2199; Ribonuclease H2 catalytic subunit, removes RNA primers during Okazaki fragment synthesis; cooperates with Rad27p nuclease
2200; Dihydrolipoamide acetyltransferase component (E2) of pyruvate dehydrogenase complex, which catalyzes the oxidative decarboxylation of pyruvate to acetyl-CoA
2201; Component of the TOM (translocase of outer membrane) complex responsible for recognition and initial import steps for all mitochondrially directed proteins; promotes assembly and stability of the TOM complex
2202; Transcription factor of the forkhead family that regulates the cell cycle and pseudohyphal growth; also involved in chromatin silencing at HML and HMR; potential Cdc28p substrate
2203; Protein component of the large (60S) ribosomal subunit, nearly identical to Rpl9Ap and has similarity to E. coli L6 and rat L9 ribosomal proteins
2204; Protein chaperone involved in regulation of the HSP90 and HSP70 functions; involved in protein translocation across membranes; member of the DnaJ family
2205; Cytoplasmic protein required for replication of Brome mosaic virus in S. cerevisiae, which is a model system for studying replication of positive-strand RNA viruses in their natural hosts
2206; Integral vacuolar membrane protein involved in vacuole inheritance and morphology; may function to regulate Fab1p kinase activity
2207; Subunit Va of cytochrome c oxidase, which is the terminal member of the mitochondrial inner membrane electron transport chain; predominantly expressed during aerobic growth while its isoform Vb (Cox5 Bp) is expressed during anaerobic growth
2208; Probable component of COPII coated vesicles that binds to Sec23p; similar to and functionally redundant with Sec24p, but expressed at low levels; involved in ER to Golgi transport and in autophagy
2209; Component of the conserved oligomeric Golgi complex (Cog1p through Cog8p), a cytosolic tethering complex that functions in protein trafficking to mediate fusion of transport vesicles to Golgi compartments
2210; Subunit of mitochondrial NAD(+)-dependent isocitrate dehydrogenase, which catalyzes the oxidation of isocitrate to alpha-ketoglutarate in the TCA cycle
2211; Hypothetical protein
2212; Tyrosine phosphatase that plays a role in actin filament organization and endocytosis; localized to the cytoplasm
2213; One of two identical histone H3 proteins (see also HHT1); core histone required for chromatin assembly, involved in heterochromatin-mediated telomeric and HM silencing; regulated by acetylation, methylation, and mitotic phosphorylation 2214; One of two identical histone H4 proteins (see also HHF1); core histone required for chromatin assembly and chromosome function; contributes to telomeric silencing; N-terminal domain involved in maintaining genomic integrity
2215; Putative mannosyltransferase involved in protein glycosylation; member of the KRE2/MNT1 mannosyltransferase family
2216; Transcription factor that activates transcription of genes involved in stress response; nuclear localization is positively regulated by calcineurin-mediated dephosphorylation
2217; Essential component of the Sorting and Assembly Machinery (SAM or Tob complex) of the mitochondrial outer membrane, which binds precursors of beta-barrel proteins and facilitates their outer membrane insertion; homologous to bacterial Omp85
2218; Cyclin-like component of the RNA polymerase II holoenzyme, involved in phosphorylation of the RNA polymerase II C-terminal domain; involved in glucose repression
2219; Identified by gene-trapping, microarray-based expression analysis, and genome-wide homology searching
2220; Putative catalytic subunit of a class If histone deacetylase complex that also contains Hda2p and Hda3p; Hda1p interacts with the Hda2p-Hda3p subcomplex to form an active tetramer; deletion increases histone H₂B, H3 and H4 acetylation
2221; Serine/threonine protein kinase involved in regulation of the cortical actin cytoskeleton; involved in control of endocytosis
2222; Cytosolic inhibitor of vacuolar proteinase B, required for efficient vacuole inheritance; with thioredoxin forms protein complex LMA1, which assists in priming SNARE molecules and promotes vacuole fusion
2223; Hypothetical protein
2224; Hypothetical protein
2225; Peroxisomal NADP-dependent isocitrate dehydrogenase, catalyzes oxidation of isocitrate to alpha-ketoglutarate with the formation of NADP(H+), required for growth on unsaturated fatty acids
2226; Type II HSP40 co-chaperone that interacts with the HSP70 protein Ssa1p; not functionally redundant with Ydj1p due to due to substrate specificity; shares similarity with bacterial DnaJ proteins
2227; Protein required for the transport of amino acid permease Gap1p from the Golgi to the cell surface; component of the TOR signaling pathway; associates with both Tor1p and Tor2p; contains a WD-repeat
2228; Mitochondrial ribosomal protein of the large subunit
2229; Poly(A+) RNA-binding protein, involved in the export of mRNAs from the nucleus to the cytoplasm; similar to Gbp2p and Npl3p
2230; Citrate synthase, catalyzes the condensation of acetyl coenzyme A and oxaloacetate to form citrate; the rate-limiting enzyme of the TCA cycle; nuclear encoded mitochondrial protein
2231; Putative transmembrane protein, involved in the export of ammonia, a starvation signal that promotes cell death in the center of aging colonies; member of the TC 9.B.33 YaaH family; homolog of Ady2p and Y. lipolytica Gpr1p
2232; RNA polymerase III subunit C34; interacts with TFIIIB70 and is a key determinant in pol III recruitment by the preinitiation complex
2233; Hypothetical protein
2234; Endosomal protein that forms a complex with Hse1p; required for recycling Golgi proteins, forming lumenal membranes and sorting ubiquitinated proteins destined for degradation; has Ubiquitin Interaction Motifs which bind ubiquitin (Ubi4p)
2235; Protein involved in autophagy; E2-like enzyme that plays a role in formation of Atg8p-phosphatidylethanolamine conjugates, which are involved in membrane dynamics during autophagy
2236; Acyltransferase that catalyzes diacylglycerol esterification; one of several acyltransferases that contribute to triglyceride synthesis; putative homolog of human lecithin cholesterol acyltransferase
2237; Putative transcriptional repressor of MBF (MCB binding factor) target genes 2238; Component of the Med9/10 module, which is a subcomplex within the RNA polymerase II Mediator complex; required for regulation of RNA polymerase II activity 2239; Uridine/cytidine kinase, component of the pyrimidine ribonucleotide salvage pathway that converts uridine into UMP and cytidine into COMP; involved in the pyrimidine deoxyribonucleotide salvage pathway, converting deoxycytidine into dCMP
2240; Dihydrouridine synthase, member of a family of dihydrouridine synthases including Dus1p, Smm1p, Dus3p, and Dus4p; modifies uridine residues at position 20 of cytoplasmic tRNAs
2241; Essential protein of the mitochondrial inner membrane, component of the mitochondrial import system
2242; Hypothetical protein
2243; Acyl-CoA:sterol acyltransferase, isozyme of Are1p; endoplasmic reticulum enzyme that contributes the major sterol esterification activity in the presence of oxygen
2244; Mitochondrial ribosomal protein of the large subunit, not essential for mitochondrial translation
2245; 73 kDa subunit of the 11-subunit SWI/SNF chromatin remodeling complex involved in transcriptional regulation; homolog of Rsc6p subunit of the RSC chromatin remodeling complex; deletion mutants are temperature-sensitive
2246; Protein involved in bud-site selection; diploid mutants display a random budding pattern instead of the wild-type bipolar pattern
2247; Peptidyl-prolyl cis-trans isomerase (cyclophilin), catalyzes the cis-trans isomerization of peptide bonds N-terminal to proline residues; similarity to Cpr4p suggests a potential role in the secretory pathway
2248; Alpha-1,6-mannosyltransferase localized to the ER; responsible for the addition of the alpha-1,6 mannose to dolichol-linked Man7GlcNAc2, acts in the dolichol pathway for N-glycosylation
2249; Putative serine/threonine protein phosphatase, required for glycogen accumulation; interacts with Tap42p, which binds to and regulates other protein phosphatases
2250; Ubiquitin-like protein modifier, may function in modification of Sph1p and Hbt1p, functionally complemented by the human or S. pombe ortholog; mechanism of Hub1p adduct formation not yet clear
2251; Para-aminobenzoate (ABA) synthase, has similarity to Escherichia coli PABA synthase components PabA and PabB
2252; Protein with a possible role in tRNA export; shows similarity to 6-phosphogluconolactonase non-catalytic domains but does not exhibit this enzymatic activity; homologous to Sol2p, Sol3p, and Sol4p
2253; Hypothetical protein
2254; Subunit of the ARP2/3 complex, which is required for the motility and integrity of cortical actin patches; required for cortical localization of calmodulin 2255; Mitochondrial ribosomal protein of the small subunit, has similarity to E. coli S19 ribosomal protein
2256; Essential protein involved in ribosome biogenesis; putative ATP-dependent RNA helicase of the DEAD-box protein family
2257; Endoplasmic reticulum protein of unknown function, transcription is induced under conditions of zinc deficiency; mutant phenotype suggests a role in uptake of zinc
2258; Para hydroxybenzoate:polyprenyl transferase, catalyzes the second step in ubiquinone (coenzyme Q) biosynthesis
2259; Mevalonate pyrophosphate decarboxylase, essential enzyme involved in the biosynthesis of isoprenoids and sterols, including ergosterol; acts as a homodimer 2260; Specific translational activator for the COX3 mRNA that acts together with Pet54p and Pet122p; located in the mitochondrial inner membrane
2261; Subunit of an adoMet-dependent tRNA methyltransferase (MTase) complex (Trm11p-Trm12p), required for the methylation of the guanosine nucleotide at position 10 (m2G10) in tRNAs, putative zinc binding subunit of other MTase-related proteins
2262; Putative protein kinase that, when overexpressed, interferes with pheromone-induced growth arrest; localizes to the cytoplasm; potential Cdc28p substrate
2263; Protein proposed to interact with phospholipid translocases, shares similarity to Cdc50p
2264; Ubiquitin protease cofactor, forms deubiquitination complex with Ubp3p that coregulates anterograde and retrograde transport between the endoplasmic reticulum and Golgi compartments; null is sensitive to brefeldin A
2265; RNase of the DEDD superfamily, subunit of the Ccr4-Not complex that mediates 3′ to 5′ mRNA deadenylation
2266; Essential nucleolar protein involved in pre-18S rRNA processing; component of the small subunit (SSU) processome; has sequence similarity to mABT1, a mouse transcription activator
2267; Putative ion transporter similar to the major facilitator superfamily of transporters; mutations in membrane-spanning domains permit nonselective cation uptake
2268; 7,8-diamino-pelargonic acid aminotransferase (DAPA), catalyzes the second step in the biotin biosynthesis pathway; BIO3 is in a cluster of 3 genes (BIO3, BIO4, and BIO5) that mediate biotin synthesis
2269; Putative alpha-1,3-mannosyltransferase, not required for protein O-glycosylation
2270; Daughter cell-specific secreted protein with similarity to glucanases, degrades cell wall from the daughter side causing daughter to separate from mother
2271; Hypothetical protein identified by homology. See FEBS Letters [2000] 487:31-36.
2272; Endosomal ferric enterobactin transporter, expressed under conditions of iron deprivation; member of the major facilitator superfamily; expression is regulated by Rcs1p and affected by chloroquine treatment
2273; Putative GPI-anchored protein; transcription is induced under low-zinc conditions, as mediated by the Zap1p transcription factor, and at alkaline pH
2274; Lumazine synthase (6,7-dimethyl-8-ribityllumazine synthase, also known as DMRL synthase); catalyzes synthesis of immediate precursor to riboflavin
2275; Protein involved in rRNA processing; component of the exosome 3->5 exonuclease complex
2276; Acetylornithine aminotransferase, catalyzes the fourth step in the biosynthesis of the arginine precursor ornithine
2277; Cytoplasmic mRNA cap binding protein; the eIF4E-cap complex is responsible for mediating cap-dependent mRNA translation via interactions with the translation initiation factor eIF4G (Tif4631p or Tif4632p)
2278; Protein of unknown function containing 8 putative transmembrane segments; ORF exhibits genomic organization compatible with a translational readthrough-dependent mode of expression
2279; RING finger containing subunit of Skp1-Cullin-F-box ubiquitin protein ligases (SCF); required for Gic2p, Far1p, Sic1p and Cln2p degradation; may tether Cdc34p (a ubiquitin conjugating enzyme or E2) and Cdc53p (a cullin) subunits of SCF2280; Hypothetical protein
2281; Plasma membrane Mg(2+) transporter, expression and turnover are regulated by Mg(2+) concentration; overexpression confers increased tolerance to Al(3+) and Ga(3+) ions
2282; Vacuolar membrane protein of unknown function involved in vacuolar protein sorting; also detected in the mitochondria
2283; Protein kinase related to mammalian glycogen synthase kinases of the GSK-3 family; GSK-3 homologs (Mck1p, Rim11p, Mrk1p, Ygk3p) are involved in control of Msn2p-dependent transcription of stress responsive genes and in protein degradation
2284; Hypothetical protein
2285; Catalytic subunit of an adoMet-dependent tRNA methyltransferase complex (Trm11p-Trm112p), required for the methylation of the guanosine nucleotide at position 10 (m2G10) in tRNAs; contains a THUMP domain and a methyltransferase domain
2286; Subunit of cleavage factor I, a five-subunit complex required for the cleavage and polyadenylation of pre-mRNA 3′ ends; RRM-containing heteronuclear RNA binding protein and hnRNPA/B family member that binds to poly (A) signal sequences 2287; Divalent metal ion transporter with a broad specificity for di-valent and tri-valent metals; post-translationally regulated by levels of metal ions; member of the Nramp family of metal transport proteins
2288; Protein with similarity to mammalian monocarboxylate permeases, which are involved in transport of monocarboxylic acids across the plasma membrane; mutant is not deficient in monocarboxylate transport
2289; Transcriptional activator involved in regulation of invertase and glucoamylase expression, invasive growth and pseudohyphal differentiation, iron uptake, chromium accumulation, and response to osmotic stress; localizes to the nucleus
2290; Catalytic subunit of TRAMP (Trf4/Pap2p-Mtr4p-Air1p/2p), a nuclear poly (A) polymerase complex involved in RNA quality control; catalyzes polyadenylation of unmodified tRNAs, and snoRNA and rRNA precursors; disputed role as a DNA polymerase
2291; Hypothetical protein
2292; Member of the PAK family of serine/threonine protein kinases with similarity to Step 20p and Cla4p; proposed to be a downstream effector of Cdc42p during polarized growth
2293; Nuclear protein required for efficient mating, involved in shmoo formation and nuclear migration in the pre-zygote, contains a ubiquitin-like (UBL) domain
2294; Peripheral membrane protein of the plasma membrane that interacts with Mid2p; regulates the cell integrity pathway mediated by Pkc1p and Slt2p
2295; Transcription factor required for derepression of inositol-choline-regulated genes involved in phospholipid synthesis; forms a complex, with Ino2p, that binds the inositol-choline-responsive element through a basic helix-loop-helix domain
2296; Hypothetical protein
2297; Meiosis-specific telomere protein, required for bouquet formation, effective homolog pairing, ordered cross-over distribution (interference), sister chromatid cohesion at meiotic telomeres, and segregation of small chromosomes
2298; Serine/threonine protein kinase involved in sphingolipid-mediated signaling pathway that controls endocytosis; activates Ypk1p and Ykr2p, components of signaling cascade required for maintenance of cell wall integrity; redundant with Pkh1p
2299; Putative metalloprotease
2300; Mitochondrial inner membrane localized ATP-dependent DNA helicase, required for the maintenance of the mitochondrial genome; not required for mitochondrial transcription
2301; Component of the meiotic outer plaque of the spindle pole body, involved in modifying the meiotic outer plaque that is required prior to prospore membrane formation
2302; Protein that forms heterodimers, with Msh3p and Msh6p, that bind to DNA mismatches to initiate the mismatch repair process; contains a Walker ATP-binding motif required for repair activity; Msh2p-Msh6p binds to and hydrolyzes ATP
2303; Putative transcription factor containing a zinc finger; overexpression increases salt tolerance through increased expression of the ENA1 (Na+/Li+ extrusion pump) gene while gene disruption decreases both salt tolerance and ENA1 expression
2304; Member of the protein disulfide isomerase (PDI) family, exhibits chaperone activity; overexpression suppresses the lethality of a pdi1 deletion but does not complement all Pdi1p functions; undergoes oxidation by Ero1p
2305; Hypothetical protein
2306; Protein of unknown function, expression is regulated by phosphate levels; green fluorescent protein (GFP)-fusion protein localizes to the cell periphery and vacuole
2307; Putative RNA exonuclease possibly involved in pre-rRNA processing and ribosome assembly
2308; Subunit k of the mitochondrial F1F0 ATP synthase, which is a large enzyme complex required for ATP synthesis; associated only with the dimeric form of ATP synthase
2309; Nucleolar protein, constituent of 66S pre-ribosomal particles; depletion leads to defects in rRNA processing and a block in the assembly of large ribosomal subunits; possesses a sigma(70)-like RNA-binding motif
2310; Non-catalytic subunit of the NatB N-terminal acetyltransferase, which catalyzes acetylation of the amino-terminal methionine residues of all proteins beginning with Met-Asp or Met-Glu and of some proteins beginning with Met-Asn or Met-Met; involved in mitochondrial inheritance and actin assembly
2311; Hypothetical protein
2312; Hypothetical protein
2313; Component of the evolutionarily conserved kinetochore-associated Ndc80 complex (Ndc80p-Nuf2p-Spc24p-Spc25p); involved in chromosome segregation, spindle checkpoint activity and kinetochore clustering
2314; Transcription factor (bHLH) involved in interorganelle communication between mitochondria, peroxisomes, and nucleus
2315; Phosphatidylinositol 4,5-bisphosphate 5-phosphatase with a role in secretion, localizes to the endoplasmic reticulum via the C-terminal tail; lacks the SacI domain and proline-rich region found in the other 3 INP proteins
2316; Bisphosphate-3′-nucleotidase, involved in salt tolerance and methionine biogenesis; dephosphorylates 3′-phosphoadenosine-5′-phosphate and 3′-phosphoadenosine-5′-phosphosulfate, intermediates of the sulfate assimilation pathway
2317; Mu2-like subunit of the clathrin associated protein complex (AP-2); involved in vesicle transport
2318; Mu2-like subunit of the clathrin associated protein complex (AP-2); involved in vesicle transport
2319; 5-phospho-ribosyl-1(alpha)-pyrophosphate synthetase, involved in nucleotide, histidine, and tryptophan biosynthesis; one of a five related enzymes, which are active as heteromultimeric complexes
2320; Protein required for normal mitochondrial morphology, has similarity to hemolysins
2321; NAD-dependent glycerol 3-phosphate dehydrogenase, homolog of Gpd1p, expression is controlled by an oxygen-independent signaling pathway required to regulate metabolism under anoxic conditions; located in cytosol and mitochondria
2322; Arginosuccinate synthetase, catalyzes the formation of L-arginosuccinate from citrulline and L-aspartate in the arginine biosynthesis pathway; potential Cdc28p substrate
2323; Putative metalloprotease
2324; Hydroxymethylpyrimidine phosphate kinase, involved in the last steps in thiamine biosynthesis; member of a gene family with THI21 and THI22; functionally redundant with Thi21p
2325; Nuclear protein, putative RNA polymerase II elongation factor; isolated as Pob3p/Spt16p-binding protein
2326; Multistress response protein, expression is activated by a variety of xenobiotic agents and environmental or physiological stresses
2327; Phosphorylated tail-anchored type II integral peroxisomal membrane protein required for peroxisome biogenesis, cells lacking Pex15p mislocalize peroxisomal matrix proteins to cytosol, overexpression results in impaired peroxisome assembly
2328; DNA N-glycosylase and apurinic/apyrimidinic (AP) lyase involved in base excision repair, localizes to the nucleus
2329; Putative endonuclease, has a domain similar to a magnesium-dependent endonuclease motif in mRNA deadenylase Ccr4p
2330; Protein component of the small (40S) ribosomal subunit; has similarity to E. coli S19 and rat S15 ribosomal proteins
2331; Ribosomal protein P2 alpha, a component of the ribosomal stalk, which is involved in the interaction between translational elongation factors and the ribosome; regulates the accumulation of P1 (Rpp1Ap and Rpp1Bp) in the cytoplasm
2332; 20S proteasome alpha-type subunit
2333; Protein of unknown function; potential Cdc28p substrate
2334; Mitochondrial glutamyl-tRNA synthetase, encoded by a nuclear gene

### 2335; ORF, Uncharacterized

[0210] 2336; Nucleotide exchange factor for the endoplasmic reticulum (ER) lumenal Hsp70 chaperone Kar2p, required for protein translocation into the ER; homolog of Yarrowia lipolytica SLS1; GrpE-like protein
2337; Putative 1,3-beta-glucanosyltransferase, has similarity to Gas1p; localizes to the cell wall
2338; Mitochondrial inner membrane protein, required for K+/H+ exchange and for normal mitochondrial morphology and inheritance; human ortholog Letm1 is implicated in Wolf-Hirschhorn syndrome
2339; Mitochondrial outer membrane protein, required for assembly of the translocase of the outer membrane (TOM) complex and thereby for mitochondrial protein import; N terminus is exposed to the cytosol:transmembrane segment is highly conserved
2340; Mitochondrial translation initiation factor 2
2341; Protein required for cell viability
2342; High affinity tryptophan and tyrosine permease, overexpression confers FK506 resistance
2343; Syntaxin-like t-SNARE that forms a complex with Tlg1p and Vti1p and mediates fusion of endosome-derived vesicles with the late Golgi; binds Vps45p, which prevents Tlg2p degradation and also facilitates t-SNARE complex formation
2344; Hypothetical protein
2345; Ubiquitin-protein ligase required for endoplasmic reticulum-associated degradation (ERAD) of misfolded proteins; genetically linked to the unfolded protein response (UPR); regulated through association with Hrd3p; contains an H2 ring finger
2346; H1stone variant H2AZ, exchanged for histone H2A in nucleosomes by the SWR1 complex; involved in transcriptional regulation through prevention of the spread of silent heterochromatin
2347; Phospholipase B (lysophospholipase) involved in phospholipid metabolism; hydrolyzes phosphatidylinositol and phosphatidylserine and displays transacylase activity in vitro
2348; RNA terminal phosphate cyclase-like protein involved in rRNA processing at sites A0, A1, and A2; does not possess detectable RNA cyclase activity
2349; Appears to be a structural component of the chitin synthase 3 complex
2350; Palmitoyltransferase with autoacylation activity, member of a family of putative palmitoyltransferases containing an Asp-His-His-Cys-cysteine rich (DHHC-CRD) domain
2351; Cyclin, negatively regulates phosphate metabolism; Pho80p-Pho85p (cyclin-CDK complex) phosphorylates Pho4p and Swi5p; deletion of PHO80 leads to aminoglycoside supersensitivity; truncated form of PHO80 affects vacuole inheritance
2352; Glucosyltransferase, involved in transfer of oligosaccharides from dolichyl pyrophosphate to asparagine residues of proteins during N-linked protein glycosylation; mutations in human ortholog are associated with disease
2353; Putative precursor to the subtilisin-like protease III
2354; Glutamine-rich cytoplasmic protein of unknown function, contains tetratricopeptide (TPR) repeats, which often mediate protein-protein interactions; conserved in human and C. elegans
2355; Putative cell wall mannoprotein of the Srp1p/Tip1p family of serine-alanine-rich proteins; transcription is induced by cold shock and anaerobiosis
2356; B-type regulatory subunit of protein phosphatase 2A (PP2A); homolog of the mammalian B′ subunit of PP2A
2357; Identified by homology to Ashbya gossypii
2358; Hypothetical protein
2359; Subunit of the Ada histone acetyltransferase complex, required for structural integrity of the complex
2360; Kinetochore checkpoint WD40 repeat protein that localizes to kinetochores during prophase and metaphase, delays anaphase in the presence of unattached kinetochores; forms complexes with Mad1p-Bub1p and with Cdc20p, binds Mad2p and Mad3p
2361; Hsp90 cochaperone, interacts with the Ssa group of the cytosolic Hsp70 chaperones; activates the ATPase activity of Ssa1p; homolog of mammalian Hop protein 2362; Probable multiple transmembrane protein, involved in invasive growth upon nitrogen starvation; required for accumulation of processed Rim101p
2363; Protein containing a UCS (UNC-45/CRO1/SHE4) domain, binds to myosin motor domains to regulate myosin function; involved in endocytosis, polarization of the actin cytoskeleton, and asymmetric mRNA localization
2364; Target membrane receptor (t-SNARE) for vesicular intermediates traveling between the Golgi apparatus and the vacuole; controls entry of biosynthetic, endocytic, and retrograde traffic into the prevacuolar compartment; syntaxin
2365; Beta′ regulatory subunit of casein kinase 2, a Ser/Thr protein kinase with roles in cell growth and proliferation; the holoenzyme also contains CKA1, CKA2 and CKB1, the many substrates include transcription factors and all RNA polymerases
2366; Protein required, with binding partner Psr1p, for full activation of the general stress response, possibly through Msn2p dephosphorylation; regulates growth during the diauxic shift; negative regulator of G1 cyclin expression
2367; Hypothetical protein
2368; Component of the TOM (translocase of outer membrane) complex responsible for recognition and initial import steps for all mitochondrially directed proteins; promotes assembly and stability of the TOM complex
2369; Cytoplasmic ATP-dependent RNA helicase of the DEAD-box family involved in mRNA export from the nucleus
2370; Protein involved in control of glucose-regulated gene expression; interacts with protein kinase Snf1p, glucose sensors Snf3p and Rgt2p, and TATA-binding protein Spt15p; acts as a regulator of the transcription factor Rgt1p
2371; Hypothetical protein
2372; Essential nuclear protein involved in proteasome maturation and synthesis of 40S ribosomal subunits; required for cleavage of the 20S pre-rRNA to generate the mature 18S rRNA
[0211] 2373; Probable cochaperone, regulates activity of Cyr1p (adenylyl cyclase); involved in assembly of the kinetochore complex, associates with the SCF (Skp1p/Cdc53p/F box protein) ubiquitin ligase complex
   2374; Protein required for cell viability
   2375; Alpha′ catalytic subunit of casein kinase 2, a Ser/Thr protein kinase with roles in cell growth and proliferation; the holoenzyme also contains CKA1, CKB1 and CKB2, the many substrates include transcription factors and all RNA polymerases
   2376; Protein of unknown function; similar to YKR075 Cp and Reg1p; expression regulated by glucose and Rgt1p
   2377; Protein component of the large (60S) ribosomal subunit, has similarity to E. coli L3 and rat L3 ribosomal proteins; involved in the replication and maintenance of killer double stranded RNA virus
   2378; Subunit of the NuA3 histone acetyltransferase complex that acetylates histone H3; has similarity to the human tumor suppressor ING1
   2379; Cytochrome c1, component of the mitochondrial respiratory chain; expression is regulated by the heme-activated, glucose-repressed Hap2p/3p/4p/5p CCAAT-binding complex
   2380; Component of the spindle checkpoint, involved in sensing lack of tension on mitotic chromosomes; protects centromeric Rec8p at meiosis I; required for accurate chromosomal segregation at meiosis II and for mitotic chromosome stability
   2381; Thymidylate synthase, required for de novo biosynthesis of pyrimidine deoxyribonucleotides; expression is induced at G1/S
   2382; Basic zinc-finger protein, similar to human and mouse Kin17 proteins which are chromatin-associated proteins involved in UV response and DNA replication
   2383; Golgi membrane protein involved in manganese homeostasis; overproduction suppresses the sod1 (copper, zinc superoxide dismutase) null mutation
   2384; GTPase required for transport during endocytosis and for correct sorting of vacuolar hydrolases; localized in endocytic intermediates; detected in mitochondria; geranylgeranylation required for membrane association; mammalian Rab5 homolog
   2385; Mitochondrially localized type 2C protein phosphatase; contains Mg2+/Mn2+-dependent casein phosphatase activity in vitro but in vivo substrates are unknown 2386; Glucose-repressible ADP-ribosylation factor, GTPase of the Ras superfamily involved in development of polarity
   2387; Ribose-5-phosphate ketol-isomerase, catalyzes the interconversion of ribose 5-phosphate and ribulose 5-phosphate in the pentose phosphate pathway; participates in pyridoxine biosynthesis
   2388; Ribose-5-phosphate ketol-isomerase, catalyzes the interconversion of ribose 5-phosphate and ribulose 5-phosphate in the pentose phosphate pathway; participates in pyridoxine biosynthesis
   2389; Hypothetical protein
   2390; Nuclear pore complex (NPC) subunit, involved in protein import/export and in export of RNAs, possible karyopherin release factor that accelerates release of karyopherin-cargo complexes after transport across NPC; potential Cdc28p substrate
   2391; Alpha-1,2-mannosyltransferase involved in O- and N-linked protein glycosylation; member of the KRE2/MNT1 mannosyltransferase family
   2392; Mitochondrial inner membrane carnitine transporter, required for carnitine-dependent transport of acetyl-CoA from peroxisomes to mitochondria during fatty acid beta-oxidation
   2393; GTPase involved in G-protein signaling in the adenylate cyclase activating pathway, plays a role in cell proliferation; localized to the plasma membrane; homolog of mammalian RAS proto-oncogenes
   2394; Protein that induces appearance of [PIN+] prion when overproduced
   2395; Phosphatidylinositol 4,5-bisphosphate 5-phosphatase, synaptojanin-like protein with an N-terminal Sac1 domain, plays a role in a TGN (trans Golgi network)-to-early endosome pathway; hyperosmotic stress causes translocation to actin patches
   2396; One of six subunits of the RNA polymerase III transcription initiation factor complex (TFIIIC); part of the TauA globular domain of TFIIIC that binds DNA at the BoxA promoter sites of tRNA and similar genes
   2397; Hypothetical protein
   2398; Hypothetical protein
   2399; One of 10 subunits of the transport protein particle (TRAPP) complex of the cis-Golgi which mediates vesicle docking and fusion; involved in endoplasmic reticulum (ER) to Golgi membrane traffic
   2400; RNA polymerase III subunit C160, part of core enzyme; similar to bacterial beta-prime subunit
   2401; One of six ATPases of the 19S regulatory particle of the 26S proteasome involved in the degradation of ubiquitinated substrates; recruited to the GAL1-10 promoter region upon induction of transcription
   2402; Hypothetical protein
   2403; Essential serine kinase involved in cell cycle progression and processing of the 20S pre-rRNA into mature 18S rRNA
   2404; Putative NADP(+) coupled glycerol dehydrogenase, proposed to be involved in an alternative pathway for glycerol catabolism
   2405; Isoamyl acetate-hydrolyzing esterase, required in balance with alcohol acetyltransferase to maintain optimal amounts of isoamyl acetate, which is particularly important in sake brewing
   2406; Phosphoribosylaminoimidazole carboxylase, catalyzes a step in the ‘de novo’ purine nucleotide biosynthetic pathway; red pigment accumulates in mutant cells deprived of adenine
   2407; Ornithine transporter of the mitochondrial inner membrane, exports ornithine from mitochondria as part of arginine biosynthesis; human ortholog is associated with hyperammonaemia-hyperomithinaemia-homocitrullinuria (HHH) syndrome
   2408; Subunit of the membrane-associated retromer complex essential for endosome-to-Golgi retrograde protein transport; peripheral membrane protein that assembles onto the membrane with Vps5p to promote vesicle formation
   2409; Subunit of mitochondrial NAD(+)-dependent isocitrate dehydrogenase, which catalyzes the oxidation of isocitrate to alpha-ketoglutarate in the TCA cycle
   2410; Alpha subunit of succinyl-CoA ligase, which is a mitochondrial enzyme of the TCA cycle that catalyzes the nucleotide-dependent conversion of succinyl-CoA to succinate
   2411; Protein required for S phase progression and telomere homeostasis, forms an alternative replication factor C complex important for DNA replication and genome integrity; mutants are sensitive to DNA damage
   2412; Essential nucleolar protein required for pre-18S rRNA processing, interacts with Dim1p, an 18S rRNA dimethyltransferase, and also with Nob1p, which is involved in proteasome biogenesis; contains a KH domain
   2413; RNA polymerase II second largest subunit B150, part of central core; similar to bacterial beta subunit
   2414; Hypothetical protein
   2415; Short-lived membrane ABC (ATP-binding cassette) transporter, actively exports various drugs, expression regulated by Pdr1p; also involved in steroid transport, cation resistance, and cellular detoxification during exponential growth
   2416; Hypothetical protein
   2417; Inosine 5′-monophosphate (IMP)-specific 5′-nucleotidase, catalyzes the breakdown of IMP to inosine, does not show similarity to known 5′-nucleotidases from other organisms
   2418; SUMO ligase, catalyzes the covalent attachment of SUMO (Smt3p) to proteins
   2419; Endopeptidase with trypsin-like activity that cleaves after basic residues; beta-type subunit of 20S proteasome synthesized as a proprotein before being proteolytically processed for assembly into 20S particle; human homolog is subunit Z
   2420; Core Sm protein Sm E; part of heteroheptameric complex (with Smb1p, Smd1p, Smd2p, Smd3p, Smx3p, and Smx2p) that is part of the spliceosomal U1, U2, U4, and U5 snRNPs; homolog of human Sm E
   2421; Protein of unknown function; has similarity to Torpedo californica tCTL1p, which is postulated to be a choline transporter, neither null mutation nor overexpression affects choline transport
   2422; Hypothetical protein
   2423; Hypothetical protein
   2424; Protein component of the small (40S) ribosomal subunit; nearly identical to Rps28Ap and has similarity to rat S28 ribosomal protein
   2425; Glutamine tRNA synthetase, monomeric class I tRNA synthetase that catalyzes the specific glutaminylation of tRNA(Glu); N-terminal domain proposed to be involved in enzyme-tRNA interactions
   2426; Sphingoid long-chain base kinase, responsible for synthesis of long-chain base phosphates, which function as signaling molecules, regulates synthesis of ceramide from exogenous long-chain bases, localizes to the Golgi and late endosomes
   2427; Subunit of the RNA polymerase II mediator complex; associates with core polymerase subunits to form the RNA polymerase II holoenzyme; essential for transcriptional regulation
   2428; Member of the MBOAT family of putative membrane-bound O-acyltransferases
   2429; Ferrochelatase, a mitochondrial inner membrane protein, catalyzes the insertion of ferrous iron into protoporphyrin IX, the eighth and final step in the heme biosynthetic pathway; Yfh1p mediates the use of iron by Hem15p
   2430; Peroxisomal delta(3,5)-delta(2,4)-dienoyl-CoA isomerase, involved in fatty acid metabolism, contains peroxisome targeting signals at amino and carboxy termini
   2431; Actin assembly factor, activates the Arp2/3 protein complex that nucleates branched actin filaments; localizes with the Arp2/3 complex to actin patches; homolog of the human Wiskott-Aldrich syndrome protein (WASP)
   2432; 3-phosphoserine aminotransferase, catalyzes the formation of phosphoserine from
   3-phosphohydroxypyruvate, required for serine and glycine biosynthesis; regulated by the general control of amino acid biosynthesis mediated by Gcn4p
   2433; GTP binding protein (mammalian Ranp homolog) involved in the maintenance of nuclear organization, RNA processing and transport; interacts with Kap121p, Kap123p and Pdr6p (karyophilin betas); Gsp1p homolog that is not required for viability
   2434; Mitochondrial translation elongation factor Tu; comprises both GTPase and guanine nucleotide exchange factor activities, while these activities are found in separate proteins in S. pombe and humans
   2435; Protein that associates with the INO80 chromatin remodeling complex under low-salt conditions
   2436; Member of the SWI/SNF family of DNA-dependent ATPases, plays a role in antagonizing silencing during mating-type switching, contains an N-terminal domain that interacts with Sir4p and a C-terminal SNF2 domain
   2437; TFIIA large subunit; involved in transcriptional activation, acts as antirepressor or as coactivator; homologous to largest and second largest subunits of human and Drosophila TFIIA
   2438; Component of mRNP complexes associated with polyribosomes; implicated in secretion and nuclear segregation; multicopy suppressor of BFA (Brefeldin A) sensitivity
   2439; Ribose methyltransferase that modifies a functionally critical, conserved nucleotide in mitochondrial 21S rRNA
   2440; Imidazoleglycerol-phosphate dehydratase, catalyzes the sixth step in histidine biosynthesis; mutations cause histidine auxotrophy and sensitivity to Cu, Co, and Ni salts; transcription is regulated by general amino acid control via Gcn4p
   2441; ATP-dependent DEAD (Asp-Glu-Ala-Asp)-box RNA helicase, required for translation initiation of all yeast mRNAs; mutations in human DEAD-box DBY are a frequent cause of male infertility
   2442; The authentic, non-tagged protein was localized to the mitochondria
   2443; RNA polymerase subunit ABC10-beta, common to RNA polymerases I, II, and III 2444; Hypothetical protein
   2445; Golgi matrix protein involved in the structural organization of the cis-Golgi; interacts genetically with COG3 and USO1
   2446; Hypothetical protein
   2447; RNA polymerase subunit ABC14.5, common to RNA polymerases I, II, and III
   2448; Conserved protein of the mitochondrial matrix, required for synthesis of mitochondrial and cytosolic iron-sulfur proteins, performs a scaffolding function in mitochondria during Fe/S cluster assembly; isu1 isu2 double mutant is inviable
   2449; Hypothetical protein
   2450; Transcriptional repressor involved in regulation of meiosis and silencing; contains WD repeats
   2451; Mitogen-activated kinase kinase involved in protein kinase C signaling pathway that controls cell integrity; upon activation by Bck1p phosphorylates downstream target, Slt2p; functionally redundant with Mkk2p
   2452; Protein of the mitochondrial matrix involved in protein import into mitochondria; acts as a cochaperone and a nucleotide release factor for Ssc1p; homolog of E. coli GrpE
   2453; Nonessential protein kinase with unknown cellular role
   2454; Dihydrofolate reductase, part of the dTTP biosynthetic pathway, involved in folate metabolism, possibly required for mitochondrial function
   2455; Protein implicated in the regulation of ergosterol biosynthesis; one of a seven member gene family with a common essential function and non-essential unique functions; similar to human oxysterol binding protein (OSBP)
   2456; Sporulation specific protein that localizes to the spore wall; required for sporulation at a point after meiosis II and during spore wall formation; SSP2 expression is induced midway in meiosis
   2457; Pseudouridine synthase, catalyzes pseudouridylation at position 35 in U2 snRNA, position 13 in cytoplasmic tRNAs, and position 35 in pre-tRNA(Tyr); Asp(256) mutation abolishes activity; conserved in archaea, some bacteria, and vertebrates
   2458; Histone acetyltransferase catalytic subunit of the native multisubunit complex (NuA4) that acetylates four conserved internal lysines of histone H₄N-terminal tail; required for cell cycle progression
   2459; Diacylglycerol acyltransferase, catalyzes the terminal step of triacylglycerol (TAG) formation, acylates diacylglycerol using acyl-CoA as an acyl donor, localized to lipid particles
   2460; Protein with similarity to oxidoreductases, found in lipid particles; required for replication of Brome mosaic virus in S. cerevisiae, which is a model system for studying replication of positive-strand RNA viruses in their natural hosts
   2461; Subunit of the Anaphase-Promoting Complex/Cyclosome (APC/C), which is a ubiquitin-protein ligase required for degradation of anaphase inhibitors, including mitotic cyclins, during the metaphase/anaphase transition
   2462; Subunit of cleavage factor I (CFI), involved in both the endonucleolytic cleavage and polyadenylation steps of mRNA 3′-end maturation
   2463; catalyzes transfer of the sulfane atom of thiosulfate to cyanide to form sulfite and thiocyanate
   2464; Subunit of the N-terminal acetyltransferase NatA (Nat1p, Ard1p, Nat5p); N-terminally acetylates many proteins, which influences multiple processes such as the cell cycle, heat-shock resistance, mating, sporulation, and telomeric silencing
   2465; Essential subunit of Sec63 complex (Sec63p, Sec62p, Sec66p and Sec72p); with Sec61 complex, Kar2p/BiP and Lhs1p forms a channel competent for SRP-dependent and post-translational SRP-independent protein targeting and import into the ER 2466; Component of the spindle pole body (SPB) half-bridge, required for SPB duplication in mitosis and meiosis II; homolog of mammalian centrin; interacts with Kar1p
   2467; Member of the third branch of the histidine triad (HIT) superfamily of nucleotide-binding proteins; similar to Aprataxin, a Hint related protein that is mutated in individuals with ataxia with oculomotor apraxia
   2468; One of six ATPases of the 19S regulatory particle of the 26S proteasome involved in the degradation of ubiquitinated substrates; required for spindle pole body duplication; localized mainly to the nucleus throughout the cell cycle
   2469; Protein required for cell viability
   2470; Protein involved in microtubule morphogenesis, required for protection from excess free beta-tubulin; proposed to be involved the folding of beta-tubulin
   2471; Protein kinase implicated in activation of the plasma membrane H(+)-ATPase Pma1p in response to glucose metabolism; plays a role in ion homeostasis
   2472; Hypothetical protein
   2473; Constituent of 66S pre-ribosomal particles, required for maturation of the large ribosomal subunit
   2474; Delta 2-isopentenyl pyrophosphate:tRNA isopentenyl transferase, required for biosynthesis of the modified base isopentenyladenosine in mitochondrial and cytoplasmic tRNAs; gene is nuclear and encodes two isozymic forms
   2475; Protein involved in proteolytic activation of R1m101p in response to alkaline pH; member of the Pa1A/AIP1/Alix family; interacts with the ESCRT-III subunits Snf7p, suggesting a relationship between the response to pH and multivesicular body formation
   2476; DNA-binding protein required for vegetative repression of middle sporulation genes; specificity factor that directs the Hst1p histone deacetylase to some of the promoters regulated by Sum1p
   2477; Essential protein with similarity to phosducins, which are GTPase inhibitors; lethality of null mutation is functionally complemented by expression of mouse phosducin-like protein MgcPhLP
   2478; Hypothetical protein
   2479; Cytoplasmic protein of unknown function; computational analysis of large-scale protein-protein interaction data suggests a possible role in actin patch assembly
   2480; Hypothetical protein
   2481; The authentic, non-tagged protein was localized to the mitochondria
   2482; Member of the protein disulfide isomerase (PDI) family; overexpression suppresses the defect in maturation of carboxypeptidase Y, and defects in other essential Pdi1p functions, caused by PDI1 deletion
   2483; Catalytic subunit of the 1-subunit SWI/SNF chromatin remodeling complex involved in transcriptional regulation; contains DNA-stimulated ATPase activity; functions interdependently in transcriptional activation with Snf5p and Snf6p
   2484; Hypothetical protein
   2485; Hypothetical protein
   2486; Essential protein that binds ribosomal protein L11 and is required for nuclear export of the 60S pre-ribosomal subunit during ribosome biogenesis; mouse homolog shows altered expression in Huntington's disease model mice
   2487; Component of the mitochondrial Tim54p-Tim22p complex involved in insertion of polytopic proteins into the inner membrane; may function to stabilize the complex
   2488; Protein of unknown function involved in the organization of the outer spore wall layers; has similarity to the tafazzins superfamily of acetyltransferases
   2489; Protein involved in bud-site selection; diploid mutants display an axial-like budding pattern
   2490; CPA1 uORF, Arginine attenuator peptide, regulates translation of the CPA1 mRNA
   2491; Protein of unknown function; green fluorescent protein (GFP)-fusion protein localizes to the cell periphery, cytoplasm, bud, and bud neck
   2492; Protein with similarity to mammalian monocarboxylate permeases, which are involved in transport of monocarboxylic acids across the plasma membrane; mutant is not deficient in monocarboxylate transport
   2493; Protein involved in ER-to-Golgi transport
   2494; U2-snRNP associated splicing factor with similarity to the mammalian splicing factor SAP49; proposed to function as a U2-snRNP assembly factor along with Hsh155p and binding partner Cus1p; contains two RNA recognition motifs (RRM)
   2495; N-acetylglucosaminyltransferase capable of modification of N-linked glycans in the Golgi apparatus
   2496; Protein of unknown function; null mutant shows a reduced affinity for the alcian blue dye suggesting a decreased net negative charge of the cell surface
   2497; One of two type V myosins, involved in polarized distribution of mitochondria; required for mitochondrion and vacuole inheritance and nuclear spindle orientation; moves multiple cargo
   2498; Vesicle membrane receptor protein (v-SNARE) involved in the fusion between Golgi-derived secretory vesicles with the plasma membrane; member of the synaptobrevin/VAMP family of R-type v-SNARE proteins
   2499; Protein required for normal cortical actin organization and endocytosis; multicopy suppressor of clathrin deficiency; acts as a targeting subunit for protein phosphatase type 1
   2500; Subunit E of the eight-subunit V1 peripheral membrane domain of the vacuolar H+-ATPase (V-ATPase), an electrogenic proton pump found throughout the endomembrane system; required for the V1 domain to assemble onto the vacuolar membrane
   2501; Cytoplasmic alanyl-tRNA synthetase, required for protein synthesis; point mutation (cdc64-1 allele) causes cell cycle arrest at G1; lethality of null mutation is functionally complemented by human homolog
   2502; Protein required for beta-1,6 glucan biosynthesis; mutations result in aberrant morphology and severe growth defects
   2503; Ty1 enhancer activator required for full levels of Ty enhancer-mediated transcription; C6 zinc cluster DNA-binding protein
   2504; RNApolymerase I subunit A43
   2505; RNA polymerase I subunit; largest subunit of RNA polymerase I
   2506; Hypothetical protein
   2507; Serine-rich protein that contains a basic-helix-loop-helix (bHLH) DNA binding motif; binds E-boxes of glycolytic genes and contributes to their activation; may function as a transcriptional activator in Ty1-mediated gene expression
   2508; Proline permease, required for high-affinity transport of proline; also transports the toxic proline analog azetidine-2-carboxylate (AzC); PUT4 transcription is repressed in ammonia-grown cells
   2509; Tubulin folding factor D involved in beta-tubulin (Tub2p) folding; isolated as mutant with increased chromosome loss and sensitivity to benomyl
   2510; Protein required for cell morphogenesis and cell separation after mitosis
   2511; Protein of unknown function, required for growth on glycerol as a carbon source
   2512; Hypothetical protein
   2513; Subunit of the heme-activated, glucose-repressed Hap2/3/4/5 CCAAT-binding complex, a transcriptional activator and global regulator of respiratory gene expression; required for assembly and DNA binding activity of the complex
   2514; Protein of unknown function, shows genetic interactions with Vti1p, which is a v-SNARE involved in cis-Golgi membrane traffic
   2515; 20S proteasome alpha-type subunit
   2516; Autoregulatory oleate-specific transcriptional activator of peroxisome proliferation, contains Zn(2)Cys(6) cluster domain, forms heterodimer with Oaf1p, binds oleate response elements (OREs), activates beta-oxidation genes
   2517; Hypothetical protein.
   2518; Checkpoint protein, involved in the activation of the DNA damage and meiotic pachytene checkpoints; with Mec3p and Ddc1p, forms a clamp that is loaded onto partial duplex DNA; homolog of human and S. pombe Rad1 and U. maydis Rec1 proteins
   2519; Protein component of the small (40S) ribosomal subunit; has similarity to rat ribosomal protein S12
   2520; Rab escort protein, forms a complex with the Ras-like small GTPase Ypt1p that is required for the prenylation of Ypt1p by protein geranylgeranyltransferase type II (Bet2p-Bet4p)
   2521; Proposed beta subunit of the heterotrimeric G protein that interacts with the receptor Grp1p, has signaling role in response to nutrients; involved in regulation of pseudohyphal growth through cAMP levels; homolog of Gpb2p
   2522; Transcriptional activator essential for nuclear division; localized to the nucleus; essential component of the mechanism that activates the expression of a set of late-S-phase-specific genes
   2523; Mitochondrial aldehyde dehydrogenase, required for growth on ethanol and conversion of acetaldehyde to acetate; activity is K+ dependent; utilizes NADP+ or NAD+ equally as coenzymes; expression is glucose repressed
   2524; NADP(+)-dependent glutamate dehydrogenase, synthesizes glutamate from ammonia and alpha-ketoglutarate; rate of alpha-ketoglutarate utilization differs from Gdh3p; expression regulated by nitrogen and carbon sources
   2525; Hypothetical protein
   2526; Transcriptional repressor involved in the control of multidrug resistance; negatively regulates expression of the PDR5 gene; member of the Gal4p family of zinc cluster proteins
   2527; Mannoprotein that is incorporated into the cell wall via a glycosylphosphatidylinositol (GPI) anchor, involved in the retention of siderophore-iron in the cell wall
   2528; Mannoprotein that is incorporated into the cell wall via a glycosylphosphatidylinositol (GPI) anchor, involved in the retention of siderophore-iron in the cell wall
   2529; Putative ferric reductase with similarity to Fre2p; expression induced by low iron levels
   2530; DNA photolyase involved in photoreactivation, repairs pyrimidine dimers in the presence of visible light; induced by DNA damage; regulated by transcriptional repressor Rph1p
   2531; Beta subunit of the translation initiation factor eIF2, involved in the identification of the start codon; proposed to be involved in mRNA binding
   2532; Hypothetical protein
   2533; Essential protein involved in transcription regulation; component of chromatin remodeling complexes; required for assembly and function of the INO80 complex; member of the RUB-like protein family
   2534; Vacuolar ATPase V0 domain subunit c′, involved in proton transport activity; hydrophobic integral membrane protein (proteolipid) containing four transmembrane segments; N and C termini are in the vacuolar lumen
   2535; Essential component of the MIND kinetochore complex (Mtw1p Including Nnf1p-Nsl1p-Dsn1p) which joins kinetochore subunits contacting DNA to those contacting microtubules; required for accurate chromosome segregation
   2536; Plasma membrane t-SNARE involved in fusion of secretory vesicles at the plasma membrane; forms a complex, with t-SNARE Sec9p, that binds v-SNARE Snc2p; also required for sporulation; syntaxin homolog that is functionally redundant with Sso2p
   2537; Alpha subunit of fatty acid synthetase, which catalyzes the synthesis of long-chain saturated fatty acids; contains beta-ketoacyl reductase and beta-ketoacyl synthase activities
   2538; Hypothetical protein
   2539; Beta (RNA 5′-triphosphatase) subunit of the mRNA capping enzyme, a heterodimer (the other subunit is CEG1, a guanylyltransferase) involved in adding the 5′ cap to mRNA; the mammalian enzyme is a single bifunctional polypeptide
   2540; UDP-glucose:dolichyl-phosphate glucosyltransferase, involved in asparagine-linked glycosylation in the endoplasmic reticulum
   2541; ATP binding cassette family member; Asn/Gln-rich rich region supports [NU+] prion formation, susceptibility to [PSI+] prion induction and aggregation of a fragment of the human Machado-Joseph Disease protein
   2542; Hypothetical protein
   2543; Cyclin, interacts with Pho85p cyclin-dependent kinase (Cdk) to phosphorylate and regulate glycogen synthase, also activates Pho85p for Glc8p phosphorylation
   2544; Essential conserved nucleolar GTP-binding protein required for synthesis of 40S ribosomal subunits and for processing of the 35S pre-rRNA at sites A0, A1, and A2; interacts with Rcl1p, has similarity to Tsr1p
   2545; Component of U2 snRNP; disruption causes reduced U2 snRNP levels; physically interacts with Msl1p; putative homolog of human U2A′ snRNP protein
   2546; Nucleolar protein required for 60S ribosome subunit biogenesis, constituent of 66S pre-ribosomal particles; physically interacts with Nop8p and the exosome subunit Rrp43p
   2547; SET-domain lysine-N-methyltransferase, catalyzes the formation of dimethyllysine residues on the large ribosomal subunit protein L23a (RPL23A and RPL23B)
   2548; Endoplasmic reticulum protein of unknown function; contains glycerophosphodiester phosphodiesterase motifs but mutation does not detectably affect glycerophosphoinositol or glycerophosphocholine metabolism
   2549; Protein kinase involved in regulating diverse events including vesicular trafficking, gene expression, DNA repair, and chromosome segregation; binds the CTD of RNA pol II; homolog of mammalian casein kinase 1 delta (CK1 delta)
   2550; Subunit of cytoplasmic cAMP-dependent protein kinase, which contains redundant catalytic subunits Tpk1p, Tpk2p, and Tpk3p and regulatory subunit Bcy1p; promotes vegetative growth in response to nutrients; activates filamentous growth
   2551; Protein that interacts with glycerol 3-phosphatase and plays a role in anaerobic glycerol production; localizes to the nucleus and cytosol
   2552; Protein required for accurate chromosome segregation during meiosis
   2553; Protein of unknown function required for normal levels of resistance to oxidative damage, null mutants are sensitive to hydrogen peroxide; member of a conserved family of proteins found in eukaryotes but not in prokaryotes
   2554; DNA damage checkpoint protein, part of a PCNA-like complex required for DNA damage response, required for pachytene checkpoint to inhibit cell cycle in response to unrepaired recombination intermediates; potential Cdc28p substrate
   2555; Hypothetical protein
   2556; Identified by homology to Ashbya gossypii
   2557; Probable membrane protein with a possible role in proton symport of glycerol; member of the MBOAT family of putative membrane-bound O-acyltransferases; Gup1p homolog
   2558; Mating pheromone alpha-factor, made by alpha cells; interacts with mating type a cells to induce cell cycle arrest and other responses leading to mating; also encoded by MF(ALPHA)2, although MF(ALPHA)1 produces most alpha-factor
   2559; Homolog of the prokaryotic ribosomal protein L36, likely to be a mitochondrial ribosomal protein coded in the nuclear genome
   2560; Hypothetical protein
   2561; Small subunit of the heterodimeric cap binding complex that also contains Sto1p, component of the spliceosomal commitment complex; interacts with Npl3p, possibly to package mRNA for export from the nucleus; contains an RNA-binding motif
   2562; Homeodomain-containing transcriptional repressor of PTR2, which encodes a major peptide transporter; imported peptides activate ubiquitin-dependent proteolysis, resulting in degradation of Cup9p and de-repression of PTR2 transcription
   2563; Plasma membrane localized protein of unknown function; contains sequence similarity to the transferrin receptor
   2564; Mitochondrial ribosomal protein of the large subunit
   2565; Heme-binding protein involved in regulation of cytochrome P450 protein Erg11p; damage response protein, related to mammalian membrane progesterone receptors; mutations lead to defects in telomeres, mitochondria, and sterol synthesis
   2566; Protein of unknown function; deletion heterozygote is sensitive to compounds that target ergosterol biosynthesis, may be involved in compound availability
   2567; Cell wall and vacuolar protein, required for wild-type resistance to vanadate
   2568; Hypothetical protein
   2569; Cytosolic leucyl tRNA synthetase, ligates leucine to the appropriate tRNA
   2570; Protein required for respiratory growth and stability of the mitochondrial genome
   2571; Trimethyl guanosine synthase, conserved nucleolar methyl transferase responsible for conversion of the m(7)G cap structure of snRNAs and snoRNAs to m(2,2,7)G; also required for ribosome synthesis and nucleolar morphology
   2572; Pheromone-regulated protein, predicted to have 1 transmembrane segment; transcriptionally regulated by Ste12p during mating and by Cat8p during the diauxic shift
   2573; Vacuolar aspartyl protease (proteinase A), required for the posttranslational precursor maturation of vacuolar proteinases; synthesized as a zymogen, self-activates
   2574; Protein kinase, required for cell-cycle arrest in response to DNA damage; activated by trans autophosphorylation when interacting with hyperphosphorylated Rad9p
   2575; Activator of the phosphotyrosyl phosphatase activity of PP2A; regulates G1 phase progression, the osmoresponse and microtubule dynamics; implicated in the spindle assembly check; subunit of the Tap42p-Pph21p-Rrd2p complex
   2576; Splicing factor that is found in the Cef1p subcomplex of the spliceosome
   2577; Subunit of a heterodimeric peroxisomal ATP-binding cassette transporter complex (Pxa1p-Pxa2p), required for import of long-chain fatty acids into peroxisomes; similarity to human adrenoleukodystrophy transporter and ALD-related proteins
   2578; Nucleolar protein; involved in biogenesis of the 60S subunit of the ribosome; interacts with rRNA processing factors Cbf5p and Nop2p; null mutant is viable but growth is severely impaired
   2579; Member of the oxysterol binding protein family, which includes seven yeast homologs; involved in negative regulation of Sec14p-dependent Golgi complex secretory functions, peripheral membrane protein that localizes to the Golgi complex 2580; Subunit of COMPASS (Set1C), a complex which methylates histone H3 on lysine 4 and is required in telomeric transcriptional silencing; PHD finger domain protein similar to human CGBP, an unmethylated CpG binding protein
   2581; Conserved protein of the mitochondrial matrix, performs a scaffolding function during assembly of iron-sulfur clusters, interacts physically and functionally with yeast frataxin (Yfh1p); isu1 isu2 double mutant is inviable
   2582; Identified by gene-trapping, microarray-based expression analysis, and genome-wide homology searching
   2583; Zinc cluster protein involved in conferring resistance to ketoconazole
   2584; Protein component of the large (60S) ribosomal subunit with similarity to E. coli L18 and rat L5 ribosomal proteins; binds 5S rRNA and is required for 60S subunit assembly
   2585; Meiosis-specific protein of unknown function, involved in completion of nuclear divisions; identified as a weak high-copy suppressor of the spo1-1 ts mutation; putative GPI-dependent cell-wall protein
   2586; Histone H1, a linker histone required for nucleosome packaging at restricted sites; suppresses DNA repair involving homologous recombination; not required for telomeric silencing, basal transcriptional repression, or efficient sporulation
   2587; U3 snoRNP protein, component of the small (ribosomal) subunit (SSU) processosome containing U3 snoRNA; required for the biogenesis of 18S rRNA
   2588; Inner plaque spindle pole body (SPB) component, links the central plaque component Spc42p to the inner plaque component Spc110p; required for SPB duplication
   2589; Subunit of TFIIH and nucleotide excision repair factor 3 complexes, involved in transcription initiation, required for nucleotide excision repair, similar to 52 kDa subunit of human TFIIH
   2590; Putative ATP-dependent RNA helicase of the DEAD-box protein family; mutants show reduced stability of the 40S ribosomal subunit scanning through 5′ untranslated regions of mRNAs
   2591; Mitochondrial ribosomal protein of the large subunit; MRP51 exhibits genetic interactions with mutations in the COX2 and COX3 mRNA 5′-untranslated leader sequences
   2592; Isopentenyl diphosphate:dimethylallyl diphosphate isomerase (IPP isomerase), catalyzes an essential activation step in the isoprenoid biosynthetic pathway; required for viability
   2593; Trichostatin A-insensitive homodimeric histone deacetylase (HDAC) with specificity in vitro for histones H3, H4, H2A, and H2B; similar to Hda1p, Rpd3p, Hos1p, and Hos2p; deletion results in increased histone acetylation at rDNA repeats
   2594; Rho GTPase activating protein (RhoGAP) involved in control of the cytoskeleton organization; targets the essential Rho-GTPase Cdc42p, which controls establishment and maintenance of cell polarity, including bud-site assembly
   2595; Putative dehydrogenase
   2596; Peripheral peroxisomal membrane peroxin required for the regulation of peroxisome size and maintenance, recruits GTPase Rho1p to peroxisomes, induced by oleate, interacts with homologous protein Pex27p
   2597; Arginase, responsible for arginine degradation, expression responds to both induction by arginine and nitrogen catabolite repression; disruption enhances freeze tolerance
   2598; Glycerophosphocholine (GroPCho) phosphodiesterase; hydrolyzes GroPCho to choline and glycerolphosphate after its uptake by Git1p permease, for use as a phosphate source and as a precursor for phosphocholine synthesis
   2599; Hypothetical protein
   2600; Mitochondrial aspartyl-tRNA synthetase, required for acylation of aspartyl-tRNA; yeast and bacterial aspartyl-, asparaginyl-, and lysyl-tRNA synthetases contain regions with high sequence similarity, suggesting a common ancestral gene
   2601; The authentic, non-tagged protein was localized to the mitochondria
   2602; Elongator protein, part of the HAP subcomplex of Elongator, which is a six-subunit component of the RNA polymerase II holoenzyme; required for Elongator structural integrity and histone acetyltransferase activity
   2603; The authentic, non-tagged protein was localized to the mitochondria
   2604; Protein required for growth of cells lacking the mitochondrial genome
   2605; Endoplasmic reticulum membrane protein that binds to and inhibits GTP-bound Ras2p at the ER; component of the GPI-GnT complex which catalyzes the first step in GPI-anchor biosynthesis
   2606; Putative GTPase that associates with free 60S ribosomal subunits in the nucleolus and is required for 60S ribosomal subunit biogenesis; constituent of 66S pre-ribosomal particles; member of the ODN family of nucleolar G-proteins
   2607; Cytosolic and mitochondrial glutathione oxidoreductase, converts oxidized glutathione to reduced glutathione
   2608; MADS-box transcription factor, component of the protein kinase C-mediated MAP kinase pathway involved in the maintenance of cell integrity; phosphorylated and activated by the MAP-kinase Slt2p
   2609; Alkaline dihydroceramidase, involved in sphingolipid metabolism; preferentially hydrolyzes dihydroceramide to a free fatty acid and dihydrosphingosine; has a minor reverse activity
   2610; Histone acetyltransferase subunit of the Elongator complex, which is a component of the RNA polymerase II holoenzyme; activity is directed specifically towards histones H3 and H4; disruption confers resistance to K. lactis zymotoxin
   2611; Cytoplasmic class E vacuolar protein sorting (VPS) factor that coordinates deubiquitination in the multivesicular body (MVB) pathway by recruiting Doa4p to endosomes
   2612; Subunit b of the stator stalk of mitochondrial F1F0 ATP synthase, which is a large, evolutionarily conserved enzyme complex required for ATP synthesis
   2613; Protein of unknown function, localized to the cytoplasm; computational analysis of large-scale protein-protein interaction data suggests a possible role in transcriptional regulation
   2614; Geranylgeranyl diphosphate synthase, increases the intracellular pool of geranylgeranyl diphosphate, suppressor of bet2 mutation that causes defective geranylgeranylation of small GTP-binding proteins that mediate vesicular traffic
   2615; Hypothetical protein
   2616; Hypothetical protein
   2617; Hypothetical protein
   2618; Component of the ESCRT-1 complex, which is involved in ubiquitin-dependent sorting of proteins into the endosome; involved in transport of precursors for soluble vacuolar hydrolases from the late endosome to the vacuole
   2619; Component of a complex containing Cef1p, putatively involved in pre-mRNA splicing; has similarity to S. pombe Cwf27p
   2620; Constituent of the mitochondrial inner membrane presequence translocase (TIM23 complex); may promote binding of incoming precursor proteins to the intermembrane space domain of Tom22p during translocation
   2621; Cytosolic aldehyde dehydrogenase that is activated by Mg2+ and utilizes NADP+ as the preferred coenzyme; required for the conversion of acetaldehyde to acetate; constitutively expressed
   2622; Protein of unknown function; null mutant forms abnormally large cells
   2623; GTPase of the Ras superfamily required to recruit Arl1p to the Golgi; similar to ADP-ribosylation factor
   2624; Subunit of Golgi mannosyltransferase complex also containing Anp1p, Mnn10p, Mnn11p, and Hoc1p that mediates elongation of the polysaccharide mannan backbone; forms a separate complex with Van1p that is also involved in backbone elongation
   2625; Translational cofactor elongation factor-1 gamma, participates in the regulation of GTP-binding protein EF-1 alpha, may play a redundant role in the regulation of protein synthesis or another GTP-dependent process
   2626; Integral subunit of SAGA histone acetyltransferase complex, regulates transcription of a subset of SAGA-regulated genes, required for the Ubp8p association with SAGA and for H₂B deubiquitylation
   2627; Elongin C, forms heterodimer with Ela1p that participates in transcription elongation; expression dramatically upregulated during sporulation; widely conserved among eukaryotes
   2628; Subunit of the homotypic vacuole fusion and vacuole protein sorting (HOPS) complex; part of the Class C Vps complex essential for membrane docking and fusion at both the Golgi-to-endosome and endosome-to-vacuole stages of protein transport
   2629; Nucleolar protein, essential for processing and maturation of 27S pre-rRNA and large ribosomal subunit biogenesis; constituent of 66S pre-ribosomal particles; contains four RNA recognition motifs (RRMs)
   2630; Cyclin-dependent protein kinase, component of RNA polymerase II holoenzyme; involved in phosphorylation of the RNA polymerase II C-terminal domain; involved in glucose repression
   2631; Hypothetical protein
   2632; Hypothetical protein
   2633; Zinc-finger DNA-binding protein, involved in regulating expression of the methionine biosynthetic genes, similar to Met32p
   2634; Subunit beta1 of the nascent polypeptide-associated complex (NAC) involved in protein targeting, associated with cytoplasmic ribosomes; enhances DNA binding of the Gal4p activator; homolog of human BTF3b
   2635; Protein of unknown function, mutant phenotype suggests a potential role in vacuolar function; green fluorescent protein (GFP)-fusion protein localizes to the cell periphery, cytoplasm, bud, and bud neck
   2636; Hypothetical protein
   2637; Acetyl-CoA C-acetyltransferase (acetoacetyl-CoA thiolase), cytosolic enzyme that transfers an acetyl group from one acetyl-CoA molecule to another, forming acetoacetyl-CoA; involved in the first step in mevalonate biosynthesis
   2638; Putative serine/threonine protein kinase; involved in the adaptation to low concentrations of glucose independent of the SNF3 regulated pathway
   2639; Involved in response to DNA damage; null mutants have increased rates of recombination and delayed S phase; interacts physically and genetically with Sgs1p (RecQ family member) and Top3p (topoisomerase III)
   2640; Non-essential protein of unconfirmed function; affects pre-rRNA processing, may act as a negative regulator of the transcription of genes involved in pseudohyphal growth; homologous to Srd1p
   2641; Ub1 (ubiquitin-like protein)-specific protease that cleaves Smt3p protein conjugates; specifically required for cell cycle progression; associates with nucleoporins and may interact with septin rings during telophase
   2642; Vacuolar membrane protein involved in vacuolar polyphosphate accumulation; functions as a regulator of vacuolar H+-ATPase activity and vacuolar transporter chaperones; involved in non-autophagic vacuolar fusion
   2643; Outer kinetochore protein, required for accurate mitotic chromosome segregation; component of the kinetochore sub-complex COMA (Ctf19p, Okp1p, Mcm21p, Ame1p) that functions as a platform for kinetochore assembly
   2644; One of 11 subunits of the SWI/SNF chromatin remodeling complex that regulates transcription by remodeling chromosomes; required for transcription of many genes, including ADH1, ADH2, GAL1, HO, INO1 and SUC2
   2645; Hypothetical protein
   2646; Mitochondrial ribosomal protein of the small subunit
   2647; Protein required for export of the ribosomal subunits; associates with the RNA components of the pre-ribosomes; contains HEAT-repeats
   2648; Zeta subunit of the coatomer complex (COP1), which coats Golgi-derived transport vesicles; involved in retrograde transport between Golgi and ER
   2649; Peripheral mitochondrial inner membrane protein, located on the matrix face of the membrane; stabilizes the bicistronic AAP1-ATP6 mRNA encoding subunits 6 and 8 of the ATP synthase complex
   2650; Long chain base-responsive inhibitor of protein kinases Pkh1p and Pkh2p, acts along with Pil1p to down-regulate heat stress resistance via regulation of the Pkc1p and Ypk1p pathways; phosphorylated by Phk1p and Phk2p
   2651; Protein that acts together with Uba3p to activate Rub1p before its conjugation to proteins (neddylation), which may play a role in protein degradation
   2652; Component of the ESCRT-II complex, which is involved in ubiquitin-dependent sorting of proteins into the endosome; appears to be functionally related to SNF7; involved in glucose derepression
   2653; Hypothetical protein
   2654; Meiosis-specific component of sister chromatid cohesion complex; maintains cohesion between sister chromatids during meiosis I; maintains cohesion between centromeres of sister chromatids until meiosis II; homolog of S. pombe Rec8p
   2655; Transcriptional activator involved in the transcription of TPO2, HSP30 and other genes encoding membrane stress proteins; despite sequence similarity with the transcription factor Ace1p, it is not subject to metalloregulation
   2656; Putative transcription factor; multicopy suppressor of mutations that cause low activity of the cAMP/protein kinase A pathway; highly similar to Sut1p
   2657; Hypothetical protein
   2658; Hypothetical protein
   2659; Hypothetical protein
   2660; Constituent of 66S pre-ribosomal particles, has similarity to human translation initiation factor 6 (eIF6); may be involved in the biogenesis and or stability of 60S ribosomal subunits
   2661; Nucleotide release factor functioning in the post-Golgi secretory pathway, required for ER-to-Golgi transport, binds zinc, found both on membranes and in the cytosol; guanine nucleotide dissociation stimulator
   2662; Essential helicase component of heterohexameric MCM2-7 complexes which bind pre-replication complexes on DNA and melt the DNA prior to replication; accumulates in the nucleus in G1; homolog of S. pombe Cdc21p
   2663; Subunit g of the mitochondrial F1F0 ATP synthase, which is a large enzyme complex required for ATP synthesis; associated only with the dimeric form of ATP synthase
   2664; Hypothetical protein
   2665; Subunit, with Mgr1p, of the mitochondrial inner membrane i-AAA protease complex, which is responsible for degradation of unfolded or misfolded mitochondrial gene products; mutation causes an elevated rate of mitochondrial turnover
   2666; Gamma-adaptin, large subunit of the clathrin-associated protein (AP-1) complex; binds clathrin; involved in vesicle mediated transport
   2667; Protein with roles in exocytosis and cation homeostasis; functions in docking and fusion of post-Golgi vesicles with plasma membrane; homolog of Sro77p and Drosophila lethal giant larvae tumor suppressor; interacts with SNARE protein Sec9p
   2668; Cytoplasmic and mitochondrial histidine tRNA synthetase; encoded by a single nuclear gene that specifies two messages; efficient mitochondrial localization requires both a presequence and an amino-terminal sequence
   2669; Glutamine synthetase (GS), synthesizes glutamine from glutamate and ammonia; with Glt1p, forms the secondary pathway for glutarnate biosynthesis from ammonia; expression regulated by nitrogen source and by amino acid limitation
   2670; Protein that interacts physically and genetically with Tap42p, which regulates protein phosphatase 2A; component of the TOR (target of rapamycin) signaling pathway
   2671; Member of the PUF protein family, which is defined by the presence of Pumilio homology domains that confer RNA binding activity; preferentially binds mRNAs encoding membrane-associated proteins
   2672; Hypothetical protein
   2673; Protein involved in kinetochore-microtubule mediated chromosome segregation; binds to centromere DNA
   2674; Protein with a potential role in DNA replication; displays synthetic lethal genetic interaction with the pol3-13 allele of POL3, which encodes DNA polymerase delta
   2675; Peripheral membrane protein required for delivery of aminopeptidase I (Lap4p) to the vacuole in the cytoplasm-to-vacuole targeting pathway; also required for peroxisomal degradation (pexophagy)
   2676; High-mobility group non-histone chromatin protein, functionally redundant with Nhp6 Bp; homologous to mammalian high mobility group proteins 1 and 2; acts to recruit transcription factor Rcs1p to certain promoters
   2677; Subunit of TFIIH complex, involved in transcription initiation, similar to 34 kDa subunit of human TFIIH; interacts with Ssl1p
   2678; Putative mitochondrial inner membrane transporter, member of the mitochondrial carrier (MCF) family
   2679; Chorismate mutase, catalyzes the conversion of chorismate to prephenate to initiate the tyrosine/phenylalanine-specific branch of aromatic amino acid biosynthesis
   2680; Probable Hsp40p co-chaperone, has a DnaJ-like domain and appears to be involved in ER-associated degradation of misfolded proteins containing a tightly folded cytoplasmic domain; inhibits replication of Brome mosaic virus in S. cerevisiae
   2681; Heme-dependent repressor of hypoxic genes; contains an HMG domain that is responsible for DNA bending activity
   2682; Putative class I histone deacetylase (HDAC) with sequence similarity to Hda1p, Rpd3p, Hos2p, and Hos3p; deletion results in increased histone acetylation at rDNA repeats; interacts with the Tup1p-Ssn6p corepressor complex
   2683; Spelmidine synthase, involved in biosynthesis of spermidine and also in biosynthesis of pantothenic acid; spermidine is required for growth of wild-type cells
   2684; Subunit of the RNA polymerase II mediator complex; associates with core polymerase subunits to form the RNA polymerase II holoenzyme; essential for transcriptional regulation
   2685; Subunit of the CCR4-NOT complex, which is a global transcriptional regulator with roles in transcription initiation and elongation and in mRNA degradation
   2686; Protein phosphotyrosine phosphatase of unknown cellular role; activated by adenine
   2687; Transketolase, similar to Tkl2p; catalyzes conversion of xylulose-5-phosphate and ribose-5-phosphate to sedoheptulose-7-phosphate and glyceraldehyde-3-phosphate in the pentose phosphate pathway; needed for synthesis of aromatic amino acids
   2688; Translational elongation factor EF-1 alpha; also encoded by TEF2; functions in the binding reaction of aminoacyl-tRNA (AA-tRNA) to ribosomes
   2689; 17-kDa component of the U4/U6aU5 tri-snRNP, plays an essential role in pre-mRNA splicing, orthologue of the human U5-specific 15-kDa protein
   2690; Protein required for normal mitochondrial morphology and inheritance
   2691; Hypothetical protein
   2692; Transcription factor TFIIB, a general transcription factor required for transcription initiation and start site selection by RNA polymerase II
   2693; Signal recognition particle (SRP) subunit homolog of mammalian SRP54); contains the signal sequence-binding activity of SRP, interacts with the SRP RNA, and mediates binding of SRP to signal receptor; contains GTPase domain
   2694; Guanine nucleotide exchange factor (GEF) for Arf proteins; involved in vesicular transport; suppressor of ypt3 mutations; member of the Sec7-domain family
   2695; Hypothetical protein
   2696; Hypothetical protein
   2697; Mitochondrial ribosomal protein of the large subunit
   2698; Protein component of the large (60S) ribosomal subunit, nearly identical to Rpl11Bp; involved in ribosomal assembly; depletion causes degradation of proteins and RNA of the 60S subunit; has similarity to E. coli L5 and rat L11
   2699; 20S proteasome beta-type subunit, responsible for the chymotryptic activity of the proteasome
   2700; Essential component of the conserved oligomeric Golgi complex (Cog1p through Cog8p), a cytosolic tethering complex that functions in protein trafficking to mediate fusion of transport vesicles to Golgi compartments
   2701; Predicted protein kinase, overexpression causes sensitivity to staurosporine, which is a potent inhibitor of protein kinase C
   2702; Essential, non-ATPase regulatory subunit of the 26S proteasome, similar to another S. cerevisiae regulatory subunit, Rpn5p, as well as to mammalian proteasome subunits
   2703; Ser/Thr kinase involved in late nuclear division, one of the mitotic exit network (MEN) proteins; necessary for the execution of cytokinesis
   2704; Phosphatidylinositol synthase, required for biosynthesis of phosphatidylinositol, which is a precursor for polyphosphoinositides, sphingolipids, and glycolipid anchors for some of the plasma membrane proteins
   2705; Hypothetical protein
   2706; B-type cyclin involved in cell cycle progression; activates Cdc28p to promote the transition from G2 to M phase; accumulates during G2 and M, then targeted via a destruction box motif for ubiquitin-mediated degradation by the proteasome
   2707; Haploid specific endoprotease that performs one of two N-terminal cleavages during maturation of a-factor mating pheromone; required for axial budding pattern of haploid cells
   2708; Hypothetical protein
   2709; Protein containing an Lsm domain, may bind RNA and have a role in RNA processing; overproduction suppresses a null mutation in CHC1, which encodes the heavy chain of clathrin
   2710; Catalytic subunit of the NatB N-terminal acetyltransferase, which catalyzes acetylation of the amino-terminal methionine residues of all proteins beginning with Met-Asp or Met-Glu and of some proteins beginning with Met-Asn or Met-Met
   2711; Small mitochondrial outer membrane protein crucial to a binding relay for the import of proteins into mitochondria; subunit on the outer mouth of the TOM channel that accepts precursors from the receptors Tom20p and Tom22p
   2712; Protein involved in pre-rRNA processing, associated with U3 snRNP; component of small ribosomal subunit (SSU) processosome; ortholog of the human U3-55k protein
   2713; Ammonium permease of high capacity and low affinity; belongs to a ubiquitous family of cytoplasmic membrane proteins that transport only ammonium (NH4+); expression is under the nitrogen catabolite repression regulation ammonia permease
   2714; Lyso-phosphatidylcholine acyltransferase, required for normal phospholipid content of mitochondrial membranes; may remodel acyl groups of cardiolipin in the inner membrane; similar to human tafazzin, which is implicated in Barth syndrome
   2715; Nucleolar protein, constituent of pre-60S ribosomal particles; required for processing of the 27S pre-rRNA at the A2 site to yield 5.8S and 25S rRNA
   2716; Asparagine synthetase, isozyme of Asn2p; catalyzes the synthesis of L-asparagine from L-aspartate in the asparagine biosynthetic pathway
   27-17; Hypothetical protein
   2718; Protein of unknown function; contains transmembrane domains; involved in secretion of proteins that lack classical secretory signal sequences; component of the detergent-insoluble glycolipid-enriched complexes (DIGs)
   2719; Protein that induces appearance of [PIN+] prion when overproduced
   2720; Protein involved in regulation of mitochondrial expression of subunits 6 (Atp6p) and 8 (Atp8p) of the Fo-F1 ATP synthase; functions with Nca3p
   2721; Polyamine transport protein specific for spermine; localizes to the plasma membrane; member of the major facilitator superfamily
   2722; Hypothetical protein
   2723; Protein required for beta-1,6 glucan biosynthesis; putative beta-glucan synthase; appears functionally redundant with Skn1p
   2724; Non-essential glycogen phosphorylase required for the mobilization of glycogen, activity is regulated by cyclic AMP-mediated phosphorylation, expression is regulated by stress-response elements and by the HOG MAP kinase pathway
   2725; Cyclin (Bur2p)-dependent protein kinase that functions in transcriptional regulation; phosphorylates the carboxy-terminal domain of Rpo21p, which is the largest subunit of RNA polymerase II; regulated by Cak1p
   2726; Subunit of the origin recognition complex, which directs DNA replication by binding to replication origins and is also involved in transcriptional silencing
   2727; Translation initiation factor eIF-4B, has RNA annealing activity; contains an RNA recognition motif and binds to single-stranded RNA
   2728; Protein likely involved in protection against replication-dependent DNA damage; mutants are sensitive to methyl methanesulfonate (MMS); implicated in regulation of Ty1 transposition
   2729; GTP-binding protein of the rho subfamily of Ras-like proteins, involved in establishment of cell polarity; regulates protein kinase C (Pkc1p) and the cell wall synthesizing enzyme 1,3-beta-glucan synthase (Fks1p and Gsc2p)
   2730; Mitochondrial ribosomal protein of the small subunit
   2731; 3′-phosphoadenylsulfate reductase, reduces 3′-phosphoadenylyl sulfate to adenosine-3′,5′-bisphosphate and free sulfite using reduced thioredoxin as cosubstrate, involved in sulfate assimilation and methionine metabolism
   2732; Adapter that links synaptojanins Inp2p and Inp53p to the cortical actin cytoskeleton
   2733; Protein of unknown function, transcriptionally activated by Yrm1p along with genes involved in multidrug resistance
   2734; AAA-type ATPase required for efficient late endosome to vacuole transport; catalyzes the release of an endosomal membrane-associated class E VPS protein complex; cytoplasmic protein that is also associated with an endosomal compartment 2735; Protein of unknown function; green fluorescent protein (GFP)-fusion protein localizes to the nuclear periphery; potential Cdc28p substrate
   2736; Beta subunit of Type II geranylgeranyltransferase required for vesicular transport between the endoplasmic reticulum and the Golgi; provides a membrane attachment moiety to Rab-like proteins Ypt1p and Sec4p
   2737; Splicing factor, component of the U4/U6-U5 snRNP complex
   2738; GTPase-activating protein; component of the Sec23p-Sec24p heterodimeric complex of the COPII vesicle coat, involved in ER to Golgi transport and autophagy; stimulates the GDP-bound form of Sar1p
   2739; Core Sm protein Sm F; part of heteroheptameric complex (with Smb1p, Smd1p, Smd2p, Smd3p, Sme1p, and Smx2p) that is part of the spliceosomal U1, U2, U4, and U5 snRNPs; homolog of human Sm F
   2740; Dolichol phosphate mannose (Dol-P-Man) synthase of the ER membrane, catalyzes the formation of Dol-P-Man from Dol-P and GDP-Man; required for glycosyl phosphatidylinositol membrane anchoring, O mannosylation, and protein glycosylation
   2741; Glycogen debranching enzyme containing glucanotransferase and alpha-1,6-amyloglucosidase activities, required for glycogen degradation
   2742; Regulatory light chain for the type II myosin, Myo1p; binds to an IQ motif of Myo1p, localization to the bud neck depends on Myo1p; involved in the disassembly of the Myo1p ring
   2743; Protein involved in exosome mediated 3′ to 5′ mRNA degradation and translation inhibition of non-poly(A) mRNAs; forms complex with Ski2p and Ski8p; required for repressing propagation of dsRNA viruses
   2744; RNA polymerase III subunit C82
   2745; Putative permease, member of the allantoate transporter subfamily of the major facilitator superfamily; mutation confers resistance to ethionine sulfoxide
   2746; Hypothetical protein
   2747; Guanine nucleotide exchange factor (GEF or GDP-release factor) for Cdc42p; required for polarity establishment and maintenance, and mutants have morphological defects in bud formation and shmooing
   2748; Cytochrome c heme lyase (holocytochrome c synthase), attaches heme to apo-Cyc1p in the mitochondrial intermembrane space; human ortholog may have a role in microphthalmia with linear skin defects (MLS)
   2749; Subunit of both RNase MRP, which cleaves pre-rRNA, and nuclear RNase P, which cleaves tRNA precursors to generate mature 5′ ends
   2750; Ortholog of human transcriptional coactivator SKIP, can activate transcription of a reporter gene; interacts with splicing factors Prp22p and Prp46p
   2751; Hypothetical protein
   2752; Protein with a potential role in regulatory interactions between microtubules and the cell cycle, as suggested by genetic and physical interactions with Nap 1p and genetic interactions with TUB1
   2753; Protein whose overexpression affects chromosome stability, potential Cdc28p substrate; homolog of Snf2p
   2754; Hypothetical protein
   2755; Subunit of the COMPASS (Set1C) complex, which methylates histone H3 on lysine
   4 and is required in transcriptional silencing near telomeres; WD40 beta propeller superfamily member with similarity to mammalian Rbbp7
   2756; Basic helix-loop-helix-leucine zipper (bHLH/Zip) transcription factor that forms a complex with another bHLH/Zip protein, Rtg1p, to activate the retrograde (RTG) and TOR pathways
   2757; Alpha subunit of the F1 sector of mitochondrial F1F0 ATP synthase, which is a large, evolutionarily conserved enzyme complex required for ATP synthesis
   2758; Protein implicated in polar growth, functionally redundant with Boi2p; interacts with bud-emergence protein Bem1p; contains an SH3 (src homology 3) domain and a PH (pleckstrin homology) domain
   2759; Protein required for autophagy; modified by the serial action of Atg4p, Atg7p, and Atg3p, and conjugated at the C terminus with phosphatidylethanolamine, to become the form essential for generation of autophagosomes
   2760; UBX (ubiquitin regulatory X) domain-containing protein that regulates Glc7p phosphatase activity and interacts with Cdc48p; interacts with ubiquitylated proteins in vivo and is required for degradation of a ubiquitylated model substrate
   2761; RNA binding protein with similarity to hnRNP-K that localizes to the cytoplasm and to subtelomeric DNA; required for the proper localization of ASH1 mRNA; involved in the regulation of telomere position effect and telomere length
   2762; Type I transmembrane sorting receptor for multiple vacuolar hydrolases; cycles between the late-Golgi and prevacuolar endosome-like compartments
   2763; Non-essential transcriptional corepressor involved in the cell cycle-regulated transcription of histone H2A, H₂B, H3 and H4 genes; contributes to nucleosome formation, heterochromatic gene silencing, and formation of functional kinetochores
   2764; Protein of the endoplasmic reticulum membrane involved in chitin deposition in the cell wall; overproduction confers resistance to Congo Red
   2765; Plasma membrane multidrug transporter, member of the major facilitator superfamily; involved in efflux of fluconazole, diazaborine, benomyl, methotrexate, and other drugs
   2766; Hypothetical protein
   2767; Alpha-1,2-mannosyltransferase, responsible for addition of the first alpha-1,2-linked mannose to form the branches on the mannan backbone of oligosaccharides, localizes to an early Golgi compartment
   2768; Protein anchored to the mitochondrial inner membrane, similar to Sco1p and may have a redundant function with Sco1p in delivery of copper to cytochrome c oxidase; interacts with Cox2p
   2769; RNA polymerase I enhancer binding protein; DNA binding protein which binds to genes transcribed by both RNA polymerase I and RNA polymerase II; required for termination of RNA polymerase I transcription

### 2770; ORF, Dubious

[0212] 2771; Hypothetical protein
2772; Essential protein of the inner mitochondrial membrane, peripherally localized; component of the TIM22 complex, which is a twin-pore translocase that mediates insertion of numerous multispanning inner membrane proteins
2773; Hsp70 (Ssa1p) nucleotide exchange factor, cytosolic homolog of Sil1p, which is the nucleotide exchange factor for BiP (Kar2p) in the endoplasmic reticulum
2774; Protein that acts as an adaptor between Myo4p and the She2p-mRNA complex; part of the mRNA localization machinery that restricts accumulation of certain proteins to the bud; also required for cortical ER inheritance
2775; Protein involved in vacuolar assembly, essential for autophagy and the cytoplasm-to-vacuole pathway
2776; Cytoplasmic protein of unknown function, potentially phosphorylated by Cdc28p; YBR138C is not an essential gene
2777; TPR-containing co-chaperone; binds both Hsp82p (Hsp90) and Ssa1p (Hsp70) and stimulates the ATPase activity of SSA1, ts mutants reduce Hsp82p function while over expression suppresses the phenotypes of an HSP82 ts allele and a cpr7 deletion
2778; Subunit of the Ipl1p-Sli15p-Bir1p complex that regulates kinetochore-microtubule attachments, activation of the spindle tension checkpoint, and mitotic spindle disassembly; regulates the activity and localization of the Ipl1p aurora kinase
2779; Soluble GTPase with a role in regulation of membrane traffic; regulates potassium influx; G protein of the Ras superfamily, similar to ADP-ribosylation factor
2780; Non-essential subunit of Sec63 complex (Sec63p, Sec62p, Sec66p and Sec72p); with Sec61 complex, Kar2p/BiP and Lhs1p forms a channel competent for SRP-dependent and post-translational SRP-independent protein targeting and import into the ER
2781; Essential subunit of the COMPASS (Set1C) complex, which methylates histone H3 on lysine 4 and is required in transcriptional silencing near telomeres; WD40 beta propeller superfamily member and ortholog of mammalian WDR5
2782; Putative transcription factor involved in regulating the response to osmotic stress; member of the MADS-box family of transcription factors
2783; Putative protein of unknown function; YBR184W is not an essential gene
2784; Protein of unknown function, has similarity to Erv14p
2785; RNA binding protein that negatively regulates growth rate; interacts with the 3′ UTR of the mitochondrial porin (POR1) mRNA and enhances its degradation; overexpression impairs mitochondrial function; expressed in stationary phase
2786; Mitochondrial ATP-binding protein, possibly a mitochondrial chaperone with non-proteolytic function; similar to bacterial ClpX proteins
2787; Methyltransferase, catalyzes the transfer of a methyl group from S-adenosylmethionine to the GpppN terminus of capped mRNA
2788; Subunit of both RNase MRP, which cleaves pre-rRNA, and nuclear RNase P, which cleaves tRNA precursors to generate mature 5′ ends; binds to the RPR1RNA subunit in Rnase P
2789; Putative S-adenosylmethionine-dependent methyltransferase of the seven beta-strand family; green fluorescent protein (GFP)-fusion protein localizes to the cytoplasm; YBR261c is not an essential gene
2790; The authentic, non-tagged protein was localized to the mitochondria
2791; 3-ketosphinganine reductase, catalyzes the second step in phytosphingosine synthesis, essential for growth in the absence of exogenous dihydrosphingosine or phytosphingosine, member of short chain dehydrogenase/reductase protein family 2792; Hypothetical protein
2793; UBX (ubiquitin regulatory X) domain-containing protein that interacts with Cdc48p
2794; Third-largest subunit of DNA polymerase II (DNA polymerase epsilon), required to maintain fidelity of chromosomal replication and also for inheritance of telomeric silencing; mRNA abundance peaks at the G1/S boundary of the cell cycle
2795; RNA polymerase II-associated protein, defines a large complex that is biochemically and functionally distinct from the Srb-Mediator form of Pol II holoenzyme and is required for full expression of a subset of cell cycle-regulated genes 2796; Mitochondrial inner membrane citrate transporter, member of the mitochondrial carrier family
2797; Protein involved in vacuole inheritance; acts as a vacuole-specific receptor for myosin Myo2p
2798; AdoMet-dependent methyltransferase involved in rRNA processing and 60S ribosomal subunit maturation; methylates G2922 in the putative tRNA docking site of the large subunit rRNA and in the absence of snR52, U2921; suppressor of PAB1 mutants
2799; Protein of unknown function, redundant with Sps2p for the organization of the beta-glucan layer of the spore wall
2800; DNA polymerase IV, undergoes pair-wise interactions with Dnl4p-Lif1p and Rad27p to mediate repair of DNA double-strand breaks by non-homologous end joining NJ); homologous to mammalian DNA polymerase beta
2801; Putative sensor/transporter protein involved in cell wall biogenesis; contains 14-16 transmembrane segments and several putative glycosylation and phosphorylation sites; null mutation is synthetically lethal with pkc1 deletion
2802; Protein necessary for structural stability of L-A double-stranded RNA-containing particles
2803; Subunit of the RSC chromatin remodeling complex, a multisubunit complex that functions in transcriptional regulation, chromosome stability and establishing sister chromatid cohesion
2804; Hypothetical protein
2805; Plasma membrane H+-pantothenate symporter; confers sensitivity to the antifungal agent fenpropimorph
2806; Protein involved in rRNA processing; component of the exosome 3->5 exonuclease complex with Rrp41p, Rrp42p, Rrp4p and Dis3p; required for efficient maturation of
5.8S, 18S and 25S rRNA
2807; Putative ribokinase
2808; Low-affinity inorganic phosphate (Pi) transporter, involved in activation of PHO pathway; expression is independent of Pi concentration and Pho4p activity; contains 12 membrane-spanning segments
2809; Plasma membrane permease, mediates uptake of glycerophosphoinositol and glycerophosphocholine as sources of the nutrients inositol and phosphate; expression and transport rate are regulated by phosphate and inositol availability
2810; Guanine deaminase, a catabolic enzyme of the guanine salvage pathway producing xanthine and ammonia from guanine; activity is low in exponentially-growing cultures but expression is increased in post-diauxic and stationary-phase cultures
2811; The authentic, non-tagged protein was localized to the mitochondria; cell cortex protein; not required for growth on nonfermentable carbon sources; required for viability in stationary phase
2812; Hypothetical protein
2813; Hypothetical protein
2814; Ubiquitin chain assembly factor (E4) that cooperates with a ubiquitin-activating enzyme (E1), a ubiquitin-conjugating enzyme (E2), and a ubiquitin protein ligase (E3) to conjugate ubiquitin to substrates; also functions as an E3
2815; Hypothetical protein
2816; Cyclin, forms a functional kinase complex with Pho85p cyclin-dependent kinase (Cdk), expressed in late M/early G1 phase, activated by Swi5p
2817; Hypothetical protein
2818; Protein of unknown function
2819; Bifunctional enzyme containing both alcohol dehydrogenase and glutathione-dependent formaldehyde dehydrogenase activities, functions in formaldehyde detoxification and formation of long chain and complex alcohols, regulated by Hog1p-Sko1p
2820; Hypothetical protein
2821; Protein of the MutS family, forms a dimer with Msh4p that facilitates crossovers between homologs during meiosis; msh5-Y823H mutation confers tolerance to DNA alkylating agents; homologs present in C. elegans and humans
2822; Hypothetical protein
2823; Cardiolipin synthase; produces cardiolipin, which is an important constituent of mitochondrial membranes; required for normal mitochondrial membrane potential and function
2824; Plasma membrane glucose receptor, highly similar to Snf3p; both Rgt2p and Snf3p serve as transmembrane glucose sensors generating an intracellular signal that induces expression of glucose transporter (HXT) genes
2825; Subunit of the nuclear pore complex (NPC), forms a subcomplex with Nup85p, Nup120p, Nup145p-C, Sec13p, and Seh1p that plays a role in nuclear mRNA export and NPC biogenesis
2826; Protein of unknown function, deletion causes hypersensitivity to the K1 killer toxin
2827; Peripherally bound inner membrane protein of the mitochondrial matrix, required for export of C-terminal tail of Cox2p through the inner membrane
2828; Component of U4/U6.U5 snRNP involved in mRNA splicing via spliceosome
2829; Essential protein associated with the U1 snRNP complex; splicing factor involved in recognition of 5′ splice site
2830; Pbp1p binding protein, interacts strongly with Pab1p-binding protein 1 (Pbp1p) in the yeast two-hybrid system
2831; RNA binding protein required for maturation of tRNA and snRNA precursors; acts as a molecular chaperone for RNAs transcribed by polymerase III; homologous to human La (SS-B) autoantigen
2832; Protein with similarity to Kre9p, which is involved in cell wall beta 1,6-glucan synthesis; overproduction suppresses growth defects of a kre9 null mutant 2833; Subunit of the SF3a splicing factor complex, required for spliceosome assembly
2834; Mitochondrial tRNA pseudouridine synthase involved in pseudouridylation of mitochondrial tRNAs at position 32
2835; Ran GTPase binding protein; involved in nuclear protein import and RNA export, ubiquitin-mediated protein degradation during the cell cycle; shuttles between the nucleus and cytoplasm; is essential; homolog of human RanBP1
2836; Phosphoribosylanthranilate isomerase that catalyzes the third step in tryptophan biosynthesis; in 2004, the sequence of TRP1 from strain S228C was updated by changing the previously annotated internal STOP (TAA) to serine (TCA)
2837; Transcriptional regulator involved in activation of the GAL genes in response to galactose; forms a complex with Gal80p and Gal4p to relieve inhibition by Gal80p; binds galactose and ATP but does not have galactokinase activity
2838; Protein of unknown function; mutation confers radiation sensitivity
2839; T subunit of the mitochondrial glycine decarboxylase complex, required for the catabolism of glycine to 5,10-methylene-THF; expression is regulated by levels of levels of 5,10-methylene-THF in the cytoplasm
2840; Lysyl-tRNA synthetase; also identified as a negative regulator of general control of amino acid biosynthesis
2841; Hypothetical protein
2842; Constituent of 66S pre-ribosomal particles, required for large (60S) ribosomal subunit biogenesis; involved in nuclear export of pre-ribosomes; required for maintenance of dsRNA virus; homolog of human CAATT-binding protein
2843; Mitochondrial protein, member of the ATP-binding cassette (ABC) transporter family; transcriptionally activated by Yrm1p along with genes involved in multidrug resistance
2844; Vacuolar membrane protein that is a subunit of the homotypic vacuole fusion and vacuole protein sorting (HOPS) complex; essential for membrane docking and fusion at the Golgi-to-endosome and endosome-to-vacuole stages of protein transport
2845; Telomere end-binding and capping protein, plays a key role with Pol12p in linking telomerase action with completion of lagging strand synthesis, and in a regulatory step required for telomere capping
2846; Non-essential P-type ATPase that is a potential aminophospholipid translocase, localizes to the plasma membrane and late exocytic or early endocytic membranes, likely involved in protein transport; potential Cdc28p substrate
2847; Actin-related protein
2848; Hypothetical protein
2849; Hypothetical protein
2850; Ubiquitin-protein ligase, involved in the proteasome-dependent degradation of aberrant nuclear proteins; san1 mutations suppress sir4, spt16, and cdc68 mutations, suggesting a role in chromatin silencing
2851; Ethanolamine kinase, primarily responsible for phosphatidylethanolamine synthesis via the CDP-ethanolamine pathway, also exhibits choline kinase activity
2852; Nuclear protein, possibly involved in regulation of cation stress responses and/or in the establishment of bipolar budding pattern
2853; RNA-binding protein involved in the cleavage step of mRNA 3′-end formation prior to polyadenylation, and in snoRNA maturation; part of holo-CPF subcomplex APT, which associates with 3′-ends of snoRNA- and mRNA-encoding genes
2854; predicted to catalyze the final step in synthesis of Coenzyme A
2855; Hypothetical protein
2856; Sporulation-specific homolog of the yeast CDC3/10/11/12 family of bud neck microfilament genes; meiotic septin expressed at high levels during meiotic divisions and ascospore formation
2857; U1 snRNP protein involved in splicing, required for U1 snRNP biogenesis; contains multiple tetriatricopeptide repeats
2858; Cytoplasmic serine/threonine protein kinase; identified as a high-copy suppressor of the synthetic lethality of a sis2 sit4 double mutant, suggesting a role in G1/S phase progression; homolog of Sks1p
2859; Beta3 subunit of the heterotrimeric nascent polypeptide-associated complex (alpha, beta1, beta3) which binds ribosomes via its beta-subunits in close proximity to nascent polypeptides
2860; Putative basic leucine zipper (bZIP) transcription factor; overexpression increases sodium and lithium tolerance
2861; Hypothetical protein
2862; Essential protein involved in assembly of cytosolic and nuclear iron-sulfur proteins
2863; Protein involved in rRNA processing; component of the exosome 3->5 exonuclease complex
2864; Protein of unknown function, expression is regulated by phosphate levels
2865; Diacylglycerol pyrophosphate (DGPP) phosphatase, zinc-regulated vacuolar membrane-associated lipid phosphatase, dephosphorylates DGPP to phosphatidate (PA) and Pi, then PA to diacylglycerol; involved in lipid signaling and cell metabolism
2866; Hypothetical protein
2867; Putative DNA helicase
2868; Sphinganine C4-hydroxylase, catalyses the conversion of sphinganine to phytosphingosine in sphingolipid biosynthesis
2869; Gamma-glutamyl kinase, catalyzes the first step in proline biosynthesis
2870; Protein of unknown function involved in initiation of budding and cellular polarization, interacts with Cdc42p via the Cdc42/Rac-interactive binding (CRIB) domain
2871; Transcriptional repressor required for repression of middle sporulation-specific genes during mitosis; regulated by the pachytene checkpoint; a dominant mutation acts as a suppressor of silencing defects of SIR2 mutations
2872; Subunit of TFIIH and nucleotide excision repair factor 3 complexes, required for nucleotide excision repair, target for transcriptional activators
2873; Non-SMC subunit of the condensin complex (Smc2p-Smc4p-Ycs4p-Brn1p-Ycg1p); required for establishment and maintenance of chromosome condensation, chromosome segregation and for chromatin binding of the condensin complex
2874; Peroxisomal membrane protein (PMP) required to recruit Pex19p chaperone to peroxisomes; plays selective, essential, direct role in PMP import as a docking factor for Pex19p
2875; UBX (ubiquitin regulatory X) domain-containing protein that interacts with Cdc48p
2876; Hypothetical protein
2877; Hypothetical protein
2878; One of six subunits of RNA polymerase III transcription initiation factor complex (TFRIIIC); part of TFIIIC TauB domain that binds BoxB promoter sites of tRNA and other genes; cooperates with Tfc3p in DNA binding; human homolog is TFIIIC-110
2879; Hypothetical protein
2880; Sporulation-specific chitinase
2881; GTPase activating protein (GAP) for Rho1p, involved in signaling to the actin cytoskeleton, null mutations suppress tor2 mutations and temperature sensitive mutations in actin; potential Cdc28p substrate
2882; Dimeric hypoxanthine-guanine phosphoribosyltransferase, catalyzes the formation of both inosine monophosphate and guanosine monophosphate; mutations in the human homolog HPRT1 can cause Lesch-Nyhan syndrome and Kelley-Seegmiller syndrome
2883; N-formyltyrosine oxidase, sporulation-specific microsomal enzyme required for spore wall maturation, involved in the production of a soluble LL-dityrosine-containing precursor of the spore wall, homologous to cytochrome P-450s
2884; Farnesyl cysteine-carboxylmethyltransferase, mediates the carboxylmethylation step during C-terminal CAAX motif processing of a-factor and RAS proteins in the endoplasmic reticulum, localizes to the ER membrane
2885; Protein of unknown function, localizes to the ER, contains four transmembrane domains; member of the Der1p-like family
2886; Hypothetical protein
2887; DNA polymerase eta, involved in the predominantly error-free bypass replication of DNA lesions, catalyzes the efficient and accurate synthesis of DNA opposite cyclobutane pyrimidine dimers; homolog of human POLH and bacterial DinB proteins
2888; Transmembrane protein subunit of the glycosylphosphatidylinositol transamidase complex that adds GPIs to newly synthesized proteins; human PIG-Sp homolog
2889; Palmitoyltransferase with autoacylation activity; likely functions in pathway(s) outside Ras; member of a family of putative palmitoyltransferases containing an Asp-His-His-Cys-cysteine rich (DHHC-CRD) domain
2890; Mating pheromone a-factor, made by a cells; interacts with alpha cells to induce cell cycle arrest and other responses leading to mating; biogenesis involves C-terminal modification, N-terminal proteolysis, and export; also encoded by MFA2
2891; Protein involved in negative regulation of expression of spliceosome components PRP4 and PRP3
2892; Identified by gene-trapping, microarray-based expression analysis, and genome-wide homology searching
2893; Arginine methyltransferase; ribosomal protein L12 is a substrate
2894; Subunit of the COMPASS (Set1C) complex, which methylates histone H3 on lysine
4 and is required in transcriptional silencing near telomeres; has similarity to C. elegans Dpy-30
2895; One of 10 subunits of the transport protein particle (TRAPP) complex of the cis-Golgi which mediates vesicle docking and fusion; involved in endoplasmic reticulum (ER) to Golgi membrane traffic
2896; Repressible alkaline phosphatase, a glycoprotein localized to the vacuole; regulated by levels of inorganic phosphate and by a system consisting of Pho4p, Pho9p, Pho80p, Pho81p and Pho85p; dephosphorylates phosphotyrosyl peptides
2897; Membrane protein involved in zinc metabolism, member of the four-protein IZH family; transcription is regulated directly by Zap1p, expression induced by zinc deficiency and fatty acids; deletion increases sensitivity to elevated zinc
2898; The authentic, non-tagged protein was localized to the mitochondria
2899; Cytoplasmic protein required for the sorting and processing of soluble vacuolar proteins, acidification of the vacuolar lumen, and assembly of the vacuolar H+-ATPase
2900; Membrane glycoprotein v-SNARE involved in retrograde transport from the Golgi to the ER; required for N- and O-glycosylation in the Golgi but not in the ER; forms a complex with the cytosolic Tip20p
2901; Protein of the mitochondrial intermembrane space, required for acetate utilization and gluconeogenesis; has orthologs in higher eukaryotes
2902; Plasma membrane arginine permease, requires phosphatidyl ethanolamine (PE) for localization, exclusively associated with lipid rafts; mutation confers canavanine resistance
2903; Protein with sequence similarity to the human MybBP1A and weak sequence similar to B-type DNA polymerases, not required for chromosomal DNA replication; required for the synthesis of rRNA
2904; Putative ATPase of the CDC48/PAS1/SEC18 (AAA) family, localized to mitochondria
2905; Transcriptional activator of amino acid biosynthetic genes in response to amino acid starvation; expression is tightly regulated at both the transcriptional and translational levels
2906; Putative mitochondrial NAD+ transporter, member of the mitochondrial carrier subfamily (see also YIA6); has putative human ortholog
2907; Alpha-1,3-mannosyltransferase, integral membrane glycoprotein of the Golgi complex, required for addition of alpha-1,3-mannose linkages to N-linked and O-linked oligosaccharides, one of five S. cerevisiae proteins of the MNN1 family
2908; RNA-binding protein, activates mRNA decapping directly by binding to the mRNA substrate and enhancing the activity of the decapping proteins Dcp1p and Dcp2p
2909; Basic leucine zipper (bZIP) transcription factor of the ATF/CREB family, may regulate transcription of genes involved in utilization of non-optimal carbon sources
2910; Aspartate kinase (L-aspartate 4-P-transferase); cytoplasmic enzyme that catalyzes the first step in the common pathway for methionine and threonine biosynthesis; expression regulated by Gcn4p and the general control of amino acid synthesis
2911; Putative regulatory subunit of the protein phosphatase Glc7p, involved in glycogen metabolism; contains a conserved motif (GVNK motif) that is also found in Gac1p, Pig1p, and Pig2p
2912; Protein required for assembly of cytochrome c oxidase
2913; Mitochondrial beta-keto-acyl synthase with possible role in fatty acid synthesis; required for mitochondrial respiration
2914; Anthranilate synthase, catalyzes the initial step of tryptophan biosynthesis, forms multifunctional hetero-oligomeric anthranilate synthase:indole-3-glycerol phosphate synthase enzyme complex with Trp3p
2915; 5-phospho-ribosyl-1(alpha)-pyrophosphate synthetase, involved in nucleotide, histidine, and tryptophan biosynthesis; one of a five related enzymes, which are active as heteromultimeric complexes
2916; Monopolin, kinetochore associated protein involved in chromosome attachment to meiotic spindle
2917; Hypothetical protein
2918; Protein that forms a heterodimeric histone-fold NC2 general transcription regulator complex with Ydr1p that binds to TBP and represses RNA pol II transcription during assembly of the preinitiation complex, homologous to human NC2alpha
2919; Non-essential P-type ATPase that is a potential aminophospholipid translocase, localizes to the plasma membrane and late exocytic or early endocytic membranes, likely involved in protein transport
2920; 5,10-methenyltetrahydrofolate synthetase, involved in folic acid biosynthesis
2921; Protein of unknown function, nearly identical to Sno2p; expression is induced before the diauxic shift and also in the absence of thiamin
2922; Protein of unknown function, nearly identical to Sno2p; expression is induced before the diauxic shift and also in the absence of thiamin
2923; Putative protein of unknown function; YFL042C is not an essential gene
2924; Glucose-repressible protein kinase involved in signal transduction during cell proliferation in response to nutrients, specifically the establishment of stationary phase; originally identified as a regulator of IME2
2925; F-box protein required for G1/S and G2/M transition, associates with Skp1p and Cdc53p to form a complex, SCFCdc4, which acts as ubiquitin-protein ligase directing ubiquitination of the phosphorylated CDK inhibitor Sic1p
2926; Vacuolar membrane protein involved in vacuolar polyphosphate accumulation; functions as a regulator of vacuolar H+-ATPase activity and vacuolar transporter chaperones; involved in protein localization and non-autophagic vacuolar fusion 2927; Protein involved in meiotic recombination, required for normal levels of crossing over, colocalizes with Zip2p to discrete foci on meiotic chromosomes, has homology to bacterial MutS protein
2928; Nuclear protein involved in asymmetric localization of ASH1 mRNA; binds double-stranded RNA in vitro; constituent of 66S pre-ribosomal particles
2929; Conserved zinc-finger domain protein involved in pre-mRNA splicing, required for assembly of U4 snRNA into the U4/U6 particle
2930; Ubiquitin-specific protease situated in the base subcomplex of the 26S proteasome, releases free ubiquitin from branched polyubiquitin chains; deletion causes hypersensitivity to cycloheximide and other toxic compounds
2931; Calmodulin-dependent protein kinase; may play a role in stress response, many CA++/calmodulan dependent phosphorylation substrates demonstrated in vitro, amino acid sequence similar to Cmk2p and mammalian Cam Kinase II
2932; Hypothetical protein
2933; Putative protein of unknown function; YFR039C is not an essential gene
2934; Cytosolic protein required for sporulation
2935; Mannosyltransferase involved in adding the 4th and 5th mannose residues of O-linked glycans
2936; Transcription factor of the Zn[II]2Cys6 family involved in sterol uptake; involved in induction of hypoxic gene expression
2937; Oxidoreductase, catalyzes NADPH-dependent reduction of the bicyclic diketone bicyclo[2.2.2]octane-2,6-dione (BCO2,6D) to the chiral ketoalcohol (1R,4S,6S)-6-hydroxybicyclo[2.2.2]octane-2-one (BCO2one6ol)
2938; Hypothetical protein
2939; Pho85p cyclin; recruits, activates, and targets Pho85p cyclin-dependent protein kinase to its substrate
2940; Protein required for ubiquinone (coenzyme Q) biosynthesis and for respiratory growth; exhibits genetic interaction with COQ9, suggesting a common function; similar to prokaryotic proteins involved in early steps of ubiquinone biosynthesis
2941; Protein involved in the initiation of DNA replication, required for proper assembly of replication proteins at the origins of replication; interacts with Cdc45p
2942; Constituent of 66S pre-ribosomal particles, involved in 60S ribosomal subunit biogenesis
2943; The authentic, non-tagged protein was localized to the mitochondria
2944; Hypothetical protein
2945; Essential membrane protein localized at the nuclear envelope and spindle pole body (SPB), required for insertion of the newly duplicated SPB into the nuclear envelope; potentially phosphorylated by Cdc28p
2946; Probable 73 kDa subunit of SAGA histone acetyltransferase complex
2947; Mannosyltransferase of the cis-Golgi apparatus, initiates the polymannose outer chain elongation of N-linked oligosaccharides of glycoproteins
2948; Identified by expression profiling and mass spectrometry
2949; Putative cysteine synthase; green fluorescent protein (GFP)-fusion protein localizes to the mitochondrion
2950; Potential regulatory effector of CDC4 function, suppresses a temperature-sensitive allele of CDC4, tripartite protein structure in which a charged region separates two uncharged domains, not essential for mitosis or meiosis
2951; One of 15 subunits of the ‘Remodel the Structure of Chromatin’ (RSC) complex; required for expression of mid-late sporulation-specific genes; contains two essential bromodomains, a bromo-adjacent homology (BAH) domain, and an AT hook
2952; Protein possibly involved in a post-Golgi secretory pathway; required for the transport of nitrogen-regulated amino acid permease Gap1p from the Golgi to the cell surface
2953; Splicing factor, component of the U4/U6-U5 snRNP complex
2954; Mitochondrial membrane transporter that mediates uptake of the essential cofactor thiamine pyrophosphate (ThPP) into mitochondria; expression appears to be regulated by carbon source; member of the mitochondrial carrier family
2955; Separase with cysteine protease activity (related to caspases) that promotes sister chromatid separation by mediating dissociation of the cohesin Scc1p from chromatin; inhibited by Pds1p
2956; Essential DNA-binding protein specific to single-stranded yeast telomeric DNA repeats, required for telomere length regulation and telomere position effect 2957; Essential protein that interacts with histones and is involved in nucleosome disassembly and reassembly during transcription elongation
2958; Hypothetical protein
2959; Ammonium permease; belongs to a ubiquitous family of cytoplasmic membrane proteins that transport only ammonium (NH4⁺); expression is under the nitrogen catabolite repression regulation
2960; Hypothetical protein
2961; Cytoplasmic GTP binding protein, negative regulator of the Ran/Tc4 GTPase cycle downstream of Gtr1p; homolog of human RagC and RagD proteins; component of the EGO complex, which is involved in the regulation of microautophagy
2962; Putative glycosidase of the cell wall, may have a role in cell wall architecture
2963; ATP-binding protein of unknown function; crystal structure resembles that of E. coli pantothenate kinase and other small kinases
2964; Protein involved in 7-aminocholesterol resistance; has seven potential membrane-spanning regions
2965; Protein that functions in a complex with Kel1p to negatively regulate mitotic exit, interacts with Tem1p and Lte1p; localizes to regions of polarized growth; potential Cdc28p substrate
2966; Beta subunit of succinyl-CoA ligase, which is a mitochondrial enzyme of the TCA cycle that catalyzes the nucleotide-dependent conversion of succinyl-CoA to succinate
2967; Putative protein of unknown function; deletion mutant has defects in pre-rRNA processing; green fluorescent protein (GFP)-fusion protein localizes to both the nucleus and the nucleolus; YGR251W is an essential gene
2968; Protein of unknown function; predicted to contain a single transmembrane domain; localized to both the mitochondrion and the plasma membrane
2969; Putative RNA helicase related to Ski2p, involved in translation inhibition of non-poly(A) mRNAs; required for repressing propagation of dsRNA viruses
2970; Cytosolic ribosome-associated chaperone, contains a DnaJ domain; together with Ssz1p, acts as a chaperone for nascent polypeptide chains
2971; Meiosis-specific protein that initiates meiotic recombination by catalyzing the formation of double-strand breaks in DNA via a transesterification reaction; required for homologous chromosome pairing and synaptonemal complex formation
2972; Putative protein of unknown function; green fluorescent protein (GFP)-fusion protein localizes to mitochondria
2973; Protein of unknown function; shares weak similarity to E. coli GTP-binding protein gtp1
2974; Mitochondrial ribosomal protein of the small subunit
2975; Member of an oxysterol-binding protein family with seven members in S. cerevisiae; family members have overlapping, redundant functions in sterol metabolism and collectively perform a function essential for viability
2976; Argininosuccinate lyase, catalyzes the final step in the arginine biosynthesis pathway
2977; Subunit c″ of the vacuolar ATPase, which functions in acidification of the vacuole; one of three proteolipid subunits of the V0 domain
2978; Essential protein required for the accumulation of box C/D snoRNA
2979; 2-deoxyglucose-6-phosphate phosphatase, similar to Dog2p, member of a family of low molecular weight phosphatases; confers 2-deoxyglucose resistance when overexpressed, in vivo substrate has not yet been identified
2980; Metallothionein, binds copper and mediates resistance to high concentrations of copper and cadmium; locus is variably amplified in different strains, with two copies, CUP1-1 and CUP 1-2, in the genomic sequence reference strain S288C
2981; Protein of unknown function involved in initiation of budding and cellular polarization, interacts with Cdc42p via the Cdc42/Rac-interactive binding (CRIB) domain
2982; Cyclin, interacts with Pho85p cyclin-dependent kinase (Cdk), induced by Gcn4p at level of transcription, specifically required for Gcn4p degradation, may be sensor of cellular protein biosynthetic capacity
2983; Protein with carboxylmethyl esterase activity that may have a role in demethylation of the phosphoprotein phosphatase catalytic subunit; also identified as a small subunit mitochondrial ribosomal protein
2984; Cytochrome c lysine methyltransferase, trimethylates residue 72 of apo-cytochrome c (Cyc1p) in the cytosol; not required for normal respiratory growth
2985; Protein that binds to cruciform DNA structures
2986; Protein that interacts with Mms22p and is implicated in Mms22-dependent DNA repair during S phase, damage induces phosphorylation by Mec1p at one or more SQ/TQ motifs; has four BRCT domains; has a role in regulation of Ty1 transposition
2987; Mitochondrial protein with a potential role in promoting mitochondrial fragmentation during programmed cell death in response to high levels of alpha-factor mating pheromone or the drug amiodarone
2988; Subunit of the THO complex, which functions to connect transcription elongation with mitotic recombination, and of the TREX complex, which is recruited to activated genes and couples transcription to mRNA export
2989; Autophagy-related protein and dual specificity member of the E1 family of ubiquitin-activating enzymes; mediates the conjugation of Atg12p with Atg5p and Atg8p with phosphatidylethanolamine, required steps in autophagosome formation.
2990; Widely conserved NADPH oxidoreductase containing flavin mononucleotide (FMN), homologous to Oye3p with slight differences in ligand binding and catalytic properties; may be involved in sterol metabolism
2991; Sporulation protein required for prospore membrane formation at selected spindle poles, ensures functionality of all four spindle pole bodies of a cell during meiosis II; not required for meiotic recombination or meiotic chromosome segregation
2992; Essential protein involved in the processing of the ITS2 region of the rRNA locus; required for the maturation and nuclear export of the 60S ribosomal subunit
2993; Exopolyphosphatase, hydrolyzes inorganic polyphosphate (poly P) into Pi residues; located in the cytosol, plasma membrane, and mitochondrial matrix
2994; Invertase, sucrose hydrolyzing enzyme; a secreted, glycosylated form is regulated by glucose repression, and an intracellular, nonglycosylated enzyme is produced constitutively
2995; The authentic, non-tagged protein was localized to the mitochondria
2996; Histidine kinase osmosensor that regulates a MAP kinase cascade; transmembrane protein with an intracellular kinase domain that signals to Ypd1p and Ssk1p, thereby forming a phosphorelay system similar to bacterial two-component regulators
2997; Subunit of DNA polymerase zeta, which is involved in DNA repair; required for mutagenesis induced by DNA damage
2998; Protein required for accurate chromosome segregation during meiosis
2999; Transcription factor of the forkhead family that regulates the cell cycle and pseudohyphal growth; also involved in chromatin silencing at HML and HMR
3000; ATPase component of the ATP-dependent RSC chromatin remodeling complex required for kinetochore function in chromosome segregation; required for expression of early meiotic genes; essential helicase-related protein homologous to Snf2p
3001; Pheromone-regulated protein, predicted to have 1 transmembrane segment; induced during cell integrity signaling
3002; Histidinol-phosphate aminotransferase, catalyzes the seventh step in histidine biosynthesis; responsive to general control of amino acid biosynthesis; mutations cause histidine auxotrophy and sensitivity to Cu, Co, and Ni salts
3003; Subunit of the nuclear pore complex that is found exclusively on the cytoplasmic side, forms a subcomplex with Nup82p and Nsp1p, required for mRNA export
3004; Putative S-adenosylmethionine-dependent methyltransferase of the seven beta-strand family; deletion mutant exhibits a weak vacuolar protein sorting defect and enhanced resistance to the glucan synthase inhibitor caspofungin
3005; Putative metalloprotease
3006; Protein required, along with Dph2p, Kti11p, Jjj3p, and Dph5p, for synthesis of diphthamide, which is a modified histidine residue of translation elongation factor 2 (Eft1p or Eft2p); may act in a complex with Dph2p and Kti11p
3007; Mitochondrial matrix protein, required for assembly or stability at high temperature of the F1 sector of mitochondrial F1F0 ATP synthase
3008; Possible shared subunit of Cop9 signalosome (CSN) and eIF3, binds eIF3b subunit Prt1p, has possible dual functions in transcriptional and translational control, contains a PCI (Proteasome-COP9 signalosome (CSN)-eIF3) domain
3009; Essential 88 kDa subunit of the exocyst complex (Sec3p, Sec5p, Sec6p, Sec8p, Sec10p, Sec15p, Exo70p, and Exo84p), which has the essential function of mediating polarized targeting of secretory vesicles to active sites of exocytosis
3010; Hypothetical protein
3011; Peptidase that deconjugates Smt3/SUMO-1 peptides from proteins, plays a role in chromosome cohesion at centromeric regions and recovery from checkpoint arrest induced by DNA damage or DNA replication defects; potential Cdc28p substrate 3012; Phosphoribosyl-5-amino-1-phosphoribosyl-4-imidazolecarboxamide isomerase, catalyzes the fourth step in histidine biosynthesis; mutations cause histidine auxotrophy and sensitivity to Cu, Co, and Ni salts
3013; Cytoplasmic RNA-binding protein, contains an RNA recognition motif (RRM); may have a role in mRNA translation, as suggested by genetic interactions with genes encoding proteins involved in translational initiation
3014; Essential protein involved in a late step of 60S ribosomal subunit assembly or modification; contains multiple WD repeats; interacts with Qsr1p in a two-hybrid assay
3015; Subunit of nuclear RNase P, which cleaves tRNA precursors to generate mature 5′ ends; not shared between Rnase MRP and Rnase P, in contrast to all other Rnase P protein subunits
3016; Protein phosphatase involved in vegetative growth at low temperatures, sporulation, and glycogen accumulation; transcription induced by low temperature and nitrogen starvation; member of the dual-specificity family of protein phosphatases
3017; Protein of unknown function, expression is sensitive to nitrogen catabolite repression and regulated by Dal80p; contains transmembrane domain
3018; Putative protein of unknown function; sequence similarity with short-chain dehydrogenase/reductase family members; green fluorescent protein (GFP)-fusion protein localizes to the cytoplasm; YIR036c is a non-essential gene
3019; ER associated glutathione S-transferase capable of homodimerization; expression induced during the diauxic shift and throughout stationary phase; functional overlap with Gtt2p, Grx1p, and Grx2p
3020; Major mitochondrial nuclease, has RNAse and DNA endo- and exonucleolytic activities; has a role in mitochondrial recombination
3021; Low-affinity phosphate transporter; deletion of pho84, pho87, pho89, pho90, and pho91 causes synthetic lethality; transcription independent of Pi and Pho4p activity; overexpression results in vigorous growth
3022; Essential ATP-binding protein required for DNA replication, component of the pre-replicative complex (pre-RC) which requires ORC to associate with chromatin and is in turn required for Mcm2-7p DNA association; homologous to S. pombe Cdc18p
3023; ER-membrane protein; suppressor of pma1-7, deletion of SOP4 slows down the export of wild-type Pma1p and Pma1-7 from the ER
3024; Protein of unknown function, proposed to be involved in the transfer of mannosylphosphate groups onto N-linked oligosaccharides; also proposed to be involved in responding to osmotic stress
3025; Histone methyltransferase with a role in transcriptional elongation, methylates a lysine residue of histone H3; associates with the C-terminal domain of Rpo21p; histone methylation activity is regulated by phosphorylation status of Rpo21p
3026; Integral membrane protein localized to vacuolar intralumenal vesicles, computational analysis of large-scale protein-protein interaction data suggests a possible role in either cell wall synthesis or protein-vacuolar targeting
3027; Putative phosphatidylinositol transfer protein (PITP), exhibits phosphatidylinositol- but not phosphatidylcholine-transfer activity, mainly localized to cytosol and microsomes, similar to Sec14p; may be PITP regulator rather than actual PITP
3028; Self-glucosylating initiator of glycogen synthesis, also glucosylates n-dodecyl-beta-D-maltoside; similar to mammalian glycogenin
3029; Hypothetical protein
3030; Hypothetical protein
3031; Component of the Trk1p-Trk2p potassium transport system; 180 kDa high affinity potassium transporter
3032; Subunit of the cytosolic chaperonin Cct ring complex, related to Tcp1p, required for the assembly of actin and tubulins in vivo
3033; Gamma glutamylcysteine synthetase, catalyzes the first step in the gamma-glutamyl cycle for glutathione (GSH) biosynthesis; expression induced by oxidants, cadmium, and mercury
3034; Protein of unknown function; homolog of mammalian PTPLA; involved in sphingolipid biosynthesis; required for cell viability
3035; Cytoplasmic protein of unknown function that interacts with Pcl7p, phosphorylated in vitro; potential Cdc28p substrate
3036; DnaJ-like chaperone required for nuclear membrane fusion during mating, localizes to the ER membrane; exhibits genetic interactions with KAR2
3037; Mitochondrial membrane protein of unknown function, contains no hydrophobic stretches
3038; Hypothetical protein identified by homology. See FEBS Letters [2000] 487:31-36.
3039; Hypothetical protein
3040; Component of the mitochondrial Tim54p-Tim22p complex involved in insertion of polytopic proteins into the inner membrane
3041; Putative protein of unknown function; YJL049W is a non-essential gene
3042; UBX (ubiquitin regulatory X) domain-containing protein that interacts with Cdc48p, transcription is repressed when cells are grown in media containing inositol and choline
3043; GTPase-activating protein (GAP) for the yeast Rab family member, Ypt6p; involved in vesicle mediated protein transport
3044; Protein required for respiratory growth
3045; Subunit of the cytosolic chaperonin Cct ring complex, related to Tcp1p, required for the assembly of actin and tubulins in vivo
3046; Beta subunit of C-terminal domain kinase I (CTDK-I), which phosphorylates the C-terminal repeated domain of the RNA polymerase II large subunit (Rpo21p) to affect both transcription and pre-mRNA 3′ end processing; has similarity to cyclins
3047; Adenylate cyclase, required for cAMP production and cAMP-dependent protein kinase signaling; involved in cell cycle control and glucose and nitrogen repression of sporulation
3048; Alpha-agglutinin of alpha-cells, binds to Aga1p during agglutination, N-terminal half is homologous to the immunoglobulin superfamily and contains binding site for a-agglutinin, C-terminal half is highly glycosylated and contains GPI anchor
3049; Hypothetical protein
3050; Protein involved in transcription-coupled repair nucleotide excision repair of UV-induced DNA lesions; homolog of human CSB protein
3051; Hypothetical protein
3052; Thymidylate and uridylate kinase, functions in de novo biosynthesis of pyrimidine deoxyribonucleotides; converts dTMP to dTDP and dUMP to dUTP; essential for mitotic and meiotic DNA replication; homologous to S. pombe Tmp1p
3053; Hypothetical protein
3054; Essential protein of unknown function
3055; Deoxyhypusine hydroxylase, a HEAT-repeat containing metalloenzyme that catalyses hypusine formation; binds to and is required for the modification of Hyp2p (eIF5A); complements S. pombe mmd1 mutants defective in mitochondrial positioning
3056; Alpha-1,6-mannosyltransferase involved in cell wall mannan biosynthesis; subunit of a Golgi-localized complex that also contains Anp1p, Mnn9p, Mnn1p, and Mnn10p; identified as a suppressor of a cell lysis sensitive pkc1-371 allele
3057; Subunit of the Cop9 signalosome, which is required for deneddylation, or removal of the ubiquitin-like protein Rub1p from Cdc53p (cullin); involved in adaptation to pheromone signaling
3058; F-box protein component of the SCF ubiquitin-ligase complex, required for Cln1p and Cln2p degradation; involved in carbon catabolite repression, glucose-dependent divalent cation transport, high-affinity glucose transport, and morphogenesis
3059; Component of the ESCRT-II complex, which is involved in ubiquitin-dependent sorting of proteins into the endosome
3060; Non-essential protein of unknown function
3061; Large subunit of carbamoyl phosphate synthetase, which catalyzes a step in the synthesis of citrulline, an arginine precursor
3062; Mitochondrial protein that interacts with Ccr4p in the two-hybrid system; 3′-untranslated region contains a putative mRNA localization element common to genes encoding mitochondrial proteins
3063; Hypothetical protein
3064; Protein involved in mitochondrial genome maintenance; component of the mitochondrial nucleoid, required for the repair of oxidative mtDNA damage
3065; Cell wall mannoprotein with similarity to Tir1p, Tir2p, Tir3p, and Tir4p; expressed under anaerobic conditions, completely repressed during aerobic growth
3066; Lactate transporter, required for uptake of lactate and pyruvate; expression is derepressed by transcriptional activator Cat8p under nonfermentative growth conditions, and repressed in the presence of glucose, fructose, and mannose
3067; ATP-binding cassette (ABC) transporter required for the export of a-factor, catalyzes ATP hydrolysis coupled to a-factor transport, contains 12 transmembrane domains and two ATP binding domains, expressed only in MATa cells
3068; Protein involved in 5′ end processing of mitochondrial COB, 15S_rRNA, and RPM1 transcripts; may also have a role in 3′ end processing of the COB pre-mRNA; displays genetic interaction with cell cycle-regulated kinase Dbf2p
3069; mRNA transport regulator, essential nuclear protein; Mex67p and Mtr2p form a mRNA export complex which binds to RNA
3070; Protein of unknown function; gene expression increases in cultures shifted to a lower temperature
3071; Receptor for a factor receptor, transcribed in alpha cells and required for mating by alpha cells, couples to MAP kinase cascade to mediate pheromone response; ligand bound receptors are endocytosed and recycled to the plasma membrane; GPCR
3072; Putative protein of unknown function; green fluorescent protein (GFP)-fusion protein localizes to the cytoplasm
3073; Nim1p-related protein kinase that regulates the morphogenesis and septin checkpoints; associates with the assembled septin filament; required along with Hsl7p for bud neck recruitment phosphorylation, and degradation of Swe1p
3074; GTPase activating factor for Rsr1p/Bud1p required for both axial and bipolar budding patterns; mutants exhibit random budding in all cell types
3075; Putative homolog of Sec14p, which is a phosphatidylinositol/phosphatidylcholine transfer protein involved in lipid metabolism; localizes to the nucleus
3076; Subunit of the nuclear pore complex (NPC) that is localized to both sides of the pore; contains a repetitive GLFG motif that interacts with mRNA export factor Mex67p and with karyopherin Kap95p; homologous to Nup116p
3077; Putative magnesium transporter; has similarity to Alr1p and Alr2p, which mediate influx of Mg2+ and other divalent cations

[0213] 3078; Mitochondrial 3-oxoacyl-[acyl-carrier-protein] reductase, may comprise a type II mitochondrial fatty acid synthase along with Met1p

3079; Serine/threonine protein kinase that regulates cellular morphogenesis, septin behavior, and cytokinesis; required for the regulation of other kinases; forms part of the bud neck ring
3080; Putative protein of unknown function; detectable in highly purified mitochondria
3081; Merged open reading frame, does not encode a discreet protein; YKR004C-A was originally annotated as an independent ORF, but was later demonstrated to be an exon of an adjacent ORF, YKR004c
3082; Nonessential mitochondrial protein of unknown function with sequence similarity to Net1p; identified as a topoisomerase I (Top1p) binding protein; displays synthetic genetic interactions with TOP1 and HPR1
3083; The authentic, non-tagged protein was localized to the mitochondria
3084; Putative protein of unknown function; green fluorescent protein (GFP)-fusion protein localizes to the cytoplasm
3085; Essential protein that forms a dimer with Ntr1p; also forms a trimer, with Ntr2p and the DExD/H-box RNA helicase Prp43p, that is involved in spliceosome disassembly
3086; Dubious open reading frame unlikely to encode a protein, based on available experimental and comparative sequence data; partially overlaps the verified gene DAL80
3087; S-adenosyl-L-methionine uroporphyrinogen III transmethylase, involved in sulfate assimilation, methionine metabolism, and siroheme biosynthesis
3088; LIM domain-containing protein that localizes to sites of polarized growth, required for selection and/or maintenance of polarized growth sites, may modulate signaling by the GTPases Cdc42p and Rho1p; has similarity to metazoan paxillin 3089; Phosphoenolpyruvate carboxykinase, key enzyme in gluconeogenesis, catalyzes early reaction in carbohydrate biosynthesis, glucose represses transcription and accelerates mRNA degradation, regulated by Mcm1p and Cat8p, located in the cytosol
3090; Protein of unknown function, transcription is activated by paralogous transcription factors Yrm1p and Yrr1p along with genes involved in multidrug resistance
3091; Protein of unknown function, transcription is activated by paralogous transcription factors Yrm1p and Yrr1p along with genes involved in multidrug resistance
3092; Ribonucleoprotein that contains two RNA recognition motifs (RRM)
3093; Splicing factor associated with the spliceosome; contains a U-box, a motif found in a class of ubiquitin ligases
3094; Putative ATPase of the AAA family, required for export of pre-ribosomal large subunits from the nucleus; distributed between the nucleolus, nucleoplasm, and nuclear periphery depending on growth conditions
3095; Identified by gene-trapping, microarray-based expression analysis, and genome-wide homology searching
3096; ABC type transmembrane transporter of MRP/CFTR family, found in vacuolar membrane, involved in the transport of unconjugated bilirubin and in heavy metal detoxification via glutathione conjugates, along with Ycf1p
3097; Protein that regulates degradation of specific mRNAs such as COX17, binds almost exclusively to cytoplasmic mRNAs encoding mitochondrial proteins, member of the PUF protein family that contains Pumilio homology domains
3098; Essential subunit of the U3 (box C+D) snRNP complex required for 2′ O-, methylation of pre-RNA; has similarity to the beta subunit of trimeric G-proteins and the splicing factor Prp4p
3099; Mitochondrial outer membrane protein required for normal mitochondrial morphology and mtDNA stability; involved in tethering mitochondria to the actin cytoskeleton and in anchoring mtDNA nucleoids
3100; Meiosis-specific protein of unknown function, required for spore wall formation during sporulation; dispensable for both nuclear divisions during meiosis
3101; Centrin (Cdc31p)-binding protein required for spindle pole body (SPB) duplication, localizes to the half-bridge of the SPB, required for progression through G(2)-M transition, has similarity to Xenopus laevis XCAP-C
3102; Protein with a role in regulation of Ty1 transposition
3103; Hypothetical protein
3104; Cytoplasmic response regulator, part of a two-component signal transducer that mediates osmosensing via a phosphorelay mechanism; dephosphorylated form is degraded by the ubiquitin-proteasome system; potential Cdc28p substrate
3105; Constituent of the mitochondrial import motor associated with the presequence translocase, along with Ssc1p, Tim44p, Mge1p, and Pam16p; stimulates the ATPase activity of Ssc1p to drive mitochondrial import; contains a J domain
3106; Putative NADPH-dependent FMN reductase with strong ferricyanide reductase activity in vitro; gene expression increases in cultures shifted to a lower temperature
3107; Protein containing GATA family zinc finger motifs
3108; Steryl ester hydrolase, catalyzes steryl ester hydrolysis at the plasma membrane; involved in sterol metabolism
3109; Membrane protein involved in zinc metabolism, member of the four-protein IZH family, expression induced by zinc deficiency; deletion reduces sensitivity to elevated zinc and shortens lag phase, overexpression reduces Zap1p activity
3110; Cell wall mannoprotein with similarity to Tir1p, Tir2p, Tir3p, and Tir4p; expressed under anaerobic conditions, completely repressed during aerobic growth
3111; Subunit of the condensin complex, which reorganizes chromosomes during cell division, forms a stable complex with Smc2p that has ATP-hydrolyzing and DNA-binding activity and promotes knotting of circular DNA; potential Cdc28p substrate 3112; Putative alanine transaminase (glutamic pyruvic transaminase)
3113; Hypothetical protein
3114; Member of a complex (Isw1b) with Isw1p and Ioc4p that exhibits nucleosome-stimulated ATPase activity and acts within coding regions to coordinate transcription elongation with termination and processing, contains a PHD finger motif
3115; Hypothetical protein
3116; RNA exonuclease; required for maturation of the RNA component of RNase MRP; functions redundantly with Rnh70p and Rex2p in processing of U5 snRNA and RNase P RNA; member of RNase D family of exonucleases

### 3117; ORF, Uncharacterized

[0214] 3118; Protein required for cell viability
3119; Subunit of a complex, with Slx1p, that hydrolyzes 5′ branches from duplex DNA in response to stalled or converging replication forks; function overlaps with that of Sgs1p-Top3p
3120; Proline oxidase, nuclear-encoded mitochondrial protein involved in utilization of proline as sole nitrogen source; PUT1 transcription is induced by Put3p in the presence of proline and the absence of a preferred nitrogen source
3121; Intracellular beta-1,3-endoglucanase, expression is induced during sporulation; may have a role in cortical actin cytoskeleton assembly
3122; Core Sm protein Sm D3; part of heteroheptameric complex (with Smb1p, Smd1p, Smd2p, Sme1p, Smx3p, and Smx2p) that is part of the spliceosomal U1, U2, U4, and U5 snRNPs; homolog of human Sm D3
3123; Pseudouridine synthase, catalyzes only the formation of pseudouridine (Psi)-2819 in mitochondrial 21S rRNA; not essential for viability
3124; Integral peroxisomal membrane receptor for the PTS1 peroxisomal matrix protein signal recognition factor Pex5p, required for the translocation of peroxisomal matrix proteins, also interacts with Pex7p and Pex14p, contains a C-terminal SH3 domain
3125; Protein with a likely role in ribosomal maturation, required for accumulation of wild-type levels of large (60S) ribosomal subunits; binds to the helicase Dbp6p in pre-60S ribosomal particles in the nucleolus
3126; Sterol regulatory element binding protein, regulates transcription of the sterol biosynthetic genes ERG2 and ERG3; member of the fungus-specific Zn[2]-Cys[6] binuclear cluster family of transcription factors; homologous to Upc2p
3127; Lipoyl ligase, involved in the modification of mitochondrial enzymes by the attachment of lipoic acid groups
3128; Cytidine deaminase; catalyzes the modification of cytidine to uridine in vitro but native RNA substrates have not been identified, localizes to both the nucleus and cytoplasm
3129; Subunit of a palmitoyltransferase, composed of Erf2p and Shr5p, that adds a palmitoyl lipid moiety to Ras2p through a thioester linkage; mutants partially mislocalize Ras2p to the vacuole
3130; Hypothetical protein
3131; Hypothetical protein
3132; Protein component of the axial elements of the synaptonemal complex, involved in chromosome segregation during the first meiotic division; interacts with Hop1p; required for wild-type levels of Mek1p kinase activity
3133; Protein involved in regulation of nonhomologous end joining; repressed by MAT heterozygosity; associates with Lif1p and regulates its cellular distribution 3134; Hypothetical protein
3135; Hypothetical protein
3136; Beta subunit of the translation initiation factor eIF2B, the guanine-nucleotide exchange factor for eIF2; activity subsequently regulated by phosphorylated eIF2; first identified as a negative regulator of GCN4 expression
3137; Hypothetical protein
3138; Aconitase, required for the tricarboxylic acid (TCA) cycle and also independently required for mitochondrial genome maintenance; component of the mitochondrial nucleoid; mutation leads to glutamate auxotrophy
3139; Chitin deacetylase, together with Cda1p involved in the biosynthesis ascospore wall component, chitosan; required for proper rigidity of the ascospore wall3140; Non-essential kinetochore protein, subunit of the Ctf19 central kinetochore complex (Ctf19p-Mcm21p-Okp1p-Mcm22p-Mcm16p-Ctf3p-Chl4p-Mcm19p-Nkp1p-Nkp2p-Ame1p-Mtw1p)
3141; Actin- and formin-interacting protein, involved in actin cable nucleation and polarized cell growth; isolated as bipolar budding mutant; potential Cdc28p substrate
3142; Protein involved in nucleocytoplasmic transport, binds to either the nucleoplasmic or cytoplasmic faces of the nuclear pore complex depending on Ran-GTP levels; also has a role in chromatin organization
3143; Essential nuclear protein with a possible role in the osmoregulatory glycerol response; interacts with phospholipase C (Plc1p); putative homolog of human NOM1 which is implicated in acute myeloid leukemia
3144; Putative 1,3-beta-glucanosyltransferase, has similarity to Gas1p
3145; Evolutionarily conserved protein with similarity to Orm1p, required for resistance to agents that induce the unfolded protein response; human ortholog is located in the endoplasmic reticulum
3146; Mitochondrial hsp70-type molecular chaperone, required for assembly of iron/sulfur clusters into proteins at a step after cluster synthesis, and for maturation of Yfh1p, which is a homolog of human frataxin implicated in Friedreich's ataxia
3147; Protein of unknown function; deletion results in a mutator phenotype suggesting a role for this protein as a mutational suppressor; deletion increases sensitivity to anticancer drugs oxaliplatin and cisplatin but not mitomycin C
33148; Fructose-1,6-bisphosphatase, key regulatory enzyme in the gluconeogenesis pathway, required for glucose metabolism
3149; Outer kinetochore protein that forms a complex with Mcm16p and Mcm22p; may bind the kinetochore to spindle microtubules
3150; Protein of unknown function, component of the Swr1p complex that incorporates Htz1p into chromatin
3151; Possible U3 snoRNP protein involved in maturation of pre-18S rRNA, based on computational analysis of large-scale protein-protein interaction data
3152; Substituent of the Paf1 complex together with RNA polymerase II, Paf1p, Hpr1p, Ctr9, Leo1, Rtf1 and Ccr4p, distinct from Srb-containing Pol II complexes; required for the expression of certain genes and modification of some histones
3153; Dihydroorotase, catalyzes the third enzymatic step in the de novo biosynthesis of pyrimidines, converting carbamoyl-L-aspartate into dihydroorotate
3154; Subunit of the 19S regulatory particle of the 26S proteasome lid
3155; Calcineurin A; one isoform (the other is CMP2) of the catalytic subunit of calcineurin, a Ca++/calmodulin-regulated protein phosphatase which regulates Crz1p (a stress-response transcription factor), the other calcineurin subunit is CNB1
3156; Silencing protein that interacts with Sir2p and Sir4p, and histone H3 and H4 tails, to establish a transcriptionally silent chromatin state; required for spreading of silenced chromatin; recruited to chromatin through interaction with Rap1p
3157; Non-essential protein of unknown function
3158; Hypothetical protein
3159; Protein that binds to the Rap1p C-terminus and acts synergistically with Rif1p to help control telomere length and establish telomeric silencing; deletion results in telomere elongation
3160; The authentic, non-tagged protein was localized to the mitochondria
3161; Part of 23-member seripauperin multigene family encoded mainly in subtelomeric regions, active during alcoholic fermentation, regulated by anaerobiosis, negatively regulated by oxygen, repressed by heme
3162; High-affinity inorganic phosphate (Pi) transporter and low-affinity manganese transporter; regulated by Pho4p and Spt7p; mutation confers resistance to arsenate; exit from the ER during maturation requires Pho86p
3163; Putative endonuclease, has a domain similar to a magnesium-dependent endonuclease motif in mRNA deadenylase Ccr4p; similar to Ngl1p and Ngl2p.
3164; Component of the mannan polymerase I; forms a complex with Mnn9p, which is involved in in mannan synthesis; mutants are vanadate-resistant
3165; TFIID subunit (65 kDa), involved in RNA polymerase II transcription initiation
3166; defines a new subfamily of the split beta-alpha-beta sandwiches.
3167; Component of the chromatin assembly complex (with Rlf2p and Msi1p) that assembles newly synthesized histones onto recently replicated DNA, required for building functional kinetochores, conserved from yeast to humans
3168; TFIID subunit (19 kDa), involved in RNA polymerase II transcription initiation, similar to histone H4 with atypical histone fold motif of Spt3-like transcription factors
3169; Hypothetical protein
3170; Uncharacterized protein with structural resemblance to plant storage and ligand binding proteins (canavalin, glycinin, auxin binding protein), and also to some plant and bacterial enzymes (epimerase, germin)
3171; Homodimeric Zn2Cys6 zinc finger transcription factor, binds to a weak acid response element to induce transcription of PDR12 and FUN34, encoding an acid transporter and a putative ammonia transporter, respectively
3172; Serine esterase that deacylates exogenous lysophospholipids, homolog of human neuropathy target esterase (NTE); mammalian NTE1 deacylates phosphatidylcholine to glycerophosphocholine
3173; Protein involved in the Mec1p-mediated checkpoint pathway that responds to DNA damage or replication arrest, transcription is induced by DNA damage
3174; Subunit of signal peptidase complex (Spc1p, Spc2p, Spc3p, Sec11p), which catalyzes cleavage of N-terminal signal sequences of proteins targeted to the secretory pathway; homologous to mammalian SPC25
3175; Pheromone-regulated protein, predicted to have 2 transmembrane segments; regulated by Ste12p during mating
3176; Hypothetical protein
3177; AMP deaminase, tetrameric enzyme that catalyzes the deamination of AMP to form IMP and ammonia; may be involved in regulation of intracellular adenine nucleotide pools
3178; Nuclear envelope protein with multiple putative transmembrane domains, required for nuclear pore complex assembly and spindle pole body duplication; required for meiosis II
3179; Protein that interacts in the two-hybrid system with the U1 snRNP-specific protein, Snp1p; may have a role in pre-mRNA splicing
3180; Uracil-DNA glycosylase, required for repair of uracil in DNA formed by spontaneous cytosine deamination, not required for strand-specific mismatch repair, cell-cycle regulated, expressed in late G1, localizes to mitochondria and nucleus
3181; Serine/threonine protein phosphatase Z, isoform of Ppz2p; involved in regulation of potassium transport, which affects osmotic stability, cell cycle progression, and halotolerance
3182; Protein of unknown function; green fluorescent protein (GFP)-fusion protein localizes to the cytoplasm in a punctate pattern
3183; Nuclear protein that plays a regulatory role in the cyclic AMP (cAMP)-dependent protein kinase (PKA) signal transduction pathway; negatively regulates pseudohyphal differentiation; homologous to several transcription factors
3184; Meiosis-specific subunit of the t-SNARE complex, required for prospore membrane formation during sporulation; similar to but not functionally redundant with Sec9p; SNAP-25 homolog
3185; Hypothetical protein
3186; Polyamine oxidase, converts spermine to spermidine, which is required for the essential hypusination modification of translation factor eIF-5A; also involved in pantothenic acid biosynthesis
3187; Subunit of the Cop9 signalosome, which is required for deneddylation, or removal of the ubiquitin-like protein Rub1p from Cdc53p (cullin); involved in adaptation to pheromone signaling
3188; Bud neck-localized, SH3 domain-containing protein required for cytokinesis; regulates actomyosin ring dynamics and septin localization; interacts with the formins, Bni1p and Bnr1p, and with Cyk3p, Vrp1p, and Bni5p
3189; Endoplasmic reticulum transmembrane protein, homolog of human BAP31 protein 3190; Subunit of the nuclear pore complex (NPC) that is localized to both sides of the pore; contains a repetitive GLFG motif that interacts with mRNA export factor Mex67p and with karyopherin Kap95p; homologous to Nup100p
3191; Protein required for maturation of the 25S and 5.8S ribosomal RNAs; constituent of 66S pre-ribosomal particles; homologous to mammalian Bop1
3192; Protein required for nuclear membrane fusion during karyogamy, localizes to the membrane with a soluble portion in the endoplasmic reticulum lumen, may form a complex with Jem1p and Kar2p; expression of the gene is regulated by pheromone
3193; Mitochondrial DNA-binding protein involved in mitochondrial DNA replication and recombination, member of HMG1 DNA-binding protein family; activity may be regulated by protein kinase A phosphorylation
3194; Protein required for establishment and maintenance of sister chromatid condensation and cohesion, colocalizes with cohesin on chromosomes in an interdependent manner, may function as a protein-protein interaction scaffold
3195; ATP-dependent RNA helicase of the SFI superfamily, required for nonsense mediated mRNA decay and for efficient translation termination at nonsense codons
3196; Permease of basic amino acids in the vacuolar membrane
3197; Component, with Afg3p, of the mitochondrial inner membrane m-AAA protease that mediates degradation of misfolded or unassembled proteins and is also required for correct assembly of mitochondrial enzyme complexes
3198; Nuclear protein that may have a role in nuclear protein import
3199; Hypothetical protein
3200; Protein of unknown function, transcription is activated by paralogous transcription factors Yrm1p and Yrr1p along with genes involved in multidrug resistance
3201; Protein kinase with similarity to serine/threonine protein kinase Ypk1p; functionally redundant with YPK1 at the genetic level; participates in a signaling pathway required for optimal cell wall integrity; homolog of mammalian kinase SGK
3202; Putative fatty aldehyde dehydrogenase, located in the mitochondrial outer membrane and also in lipid particles; has similarity to human fatty aldehyde dehydrogenase (FALDH) which is implicated in Sjogren-Larsson syndrome
3203; Hypothetical protein
3204; Dihydrofolate synthetase, involved in folic acid biosynthesis; catalyzes the conversion of dihydropteroate to dihydrofolate in folate coenzyme biosynthesis 3205; The authentic, non-tagged protein was localized to the mitochondria
3206; Hypothetical protein
3207; DNA 3′-phosphatase that functions in repair of endogenous damage of double-stranded DNA, activity is specific for removal of 3′ phosphates at strand breaks; has similarity to the 1-2-haloacid dehalogenase superfamily
3208; Co-chaperone for Hsp40p, anchored in the ER membrane; with its homolog Hdj1p promotes ER-associated protein degradation (ERAD) of integral membrane substrates; similar to E. coli DnaJ
3209; Putative metal transporter involved in mitochondrial iron accumulation; closely related to Mmt2p
3210; Hypothetical protein
3211; Putative transcriptional repressor with proline-rich zinc fingers; overproduction impairs cell growth
3212; Mitochondrial ribosomal protein of the small subunit
3213; Essential splicing factor; associated with Prp19p and the spliceosome, contains an N-terminal c-Myb DNA binding motif necessary for cell viability but not for Prp19p association, evolutionarily conserved and homologous to S. pombe Cdc5p
3214; Serine hydrolase that localizes to both the nucleus and cytoplasm; sequence is similar to Fsh1p and Fsh3p
3215; Peripheral vacuolar membrane protein required for protein trafficking and vacuole biogenesis; forms complex with Pep3p that promotes vesicular docking/fusion reactions in conjunction with SNARE proteins, also interacts with Pep7p
3216; Subunit (17 kDa) of TFIID and SAGA complexes, involved in RNA polymerase II transcription initiation and in chromatin modification, similar to histone H3
3217; Hypothetical protein
3218; Omega class glutathione transferase
3219; Endoplasmic reticulum membrane protein that recruits the ubiquitin-conjugating enzyme Ubc7p to the ER where it functions in protein degradation; contains a CUE domain that binds ubiquitin to facilitate intramolecular monoubiquitination 3220; Protein involved in promoting high level transcription of rDNA, subunit of UAF (upstream activation factor) for RNA polymerase I
3221; Ubiquitin-binding component of the Rsp5p E3-ubiquitin ligase complex, functional homolog of Bul2p, disruption causes temperature-sensitive growth, overexpression causes missorting of amino acid permeases
3222; Carboxy-terminal domain (CTD) phosphatase, essential for dephosphorylation of the repeated C-terminal domain of the RNApolymerase II large subunit (Rpo21p)
3223; Zinc cluster transcriptional activator necessary for derepression of a variety of genes under non-fermentative growth conditions, active after diauxic shift, binds carbon source responsive elements
3224; ER membrane protein involved in the second step of glycosylphosphatidylinositol (GPI) anchor assembly, the de-N-acetylation of the N-acetylglucosaminylphosphatidylinositol intermediate; functional homolog of human PIG-Lp
3225; Mitochondrial ribosomal protein of the large subunit
3226; Hypothetical protein
3227; Membrane protein of the plasma membrane and ER, involved in translocation of phospholipids and alkylphosphocholine drugs across the plasma membrane
3228; Essential nucleolar protein required for 40S ribosome biogenesis; physically and functionally interacts with Krr1p
3229; Gamma subunit of coatomer, a heptameric protein complex that together with Arf1p forms the COP1 coat; involved in ER to Golgi transport of selective cargo 3230; Part of the evolutionarily-conserved CCR4-NOT transcriptional regulatory complex involved in controlling mRNA initiation, elongation, and degradation
3231; Plasma membrane protein that binds HCO₃—, I—, Br—, NO3- and Cl—; putative boron efflux transporter with similarity to A. thaliana BOR1 which is a known boron efflux transporter
3232; Subunit of a replication-pausing checkpoint complex (Tof1p-Mrc1p-Csm3p) that acts at the stalled replication fork to promote sister chromatid cohesion after DNA damage, facilitating gap repair of damaged DNA; interacts with the MCM helicase
3233; Phosphatidylinositol transfer protein (PITP), downregulates Plb1p-mediated turnover of phosphatidylcholine, found in the cytosol and microsomes, homologous to Pdr16p, deletion affects phospholipid composition
3234; Catalytic subunit of DNA polymerase epsilon, one of the major chromosomal DNA replication polymerases characterized by processivity and proofreading exonuclease activity; also involved in DNA synthesis during DNA repair
3235; Protein required for cell viability
3236; Peripheral membrane protein required for the formation of cytosolic sequestering vesicles involved in vacuolar import through both the Cvt pathway and autophagy; interacts with Atg9p and is necessary for its trafficking
3237; Subunit of the Mediator complex; interacts with the RNA polymerase II holoenzyme to positively or negatively regulate transcription; dispensible for basal transcription
3238; Nitrogen catabolite repression regulator that acts by inhibition of GLN3 transcription in good nitrogen source; altered form of Ure2p creates [URE3] prion
3239; Protein that contains a 70 amino acid 3-domain, may function as a co-chaperone to recruit Hsp70-like activity to specific sites; mutation causes defects in fluid-phase endocytosis
3240; Protein with DNA-dependent ATPase and ssDNA annealing activities involved in maintenance of genome; interacts functionally with DNA polymerase delta; homolog of human Werner helicase interacting protein (WHIP)
3241; Peroxisomal membrane protein component of the peroxisomal translocation machinery, required for peroxisome biogenesis, binds Pex14p
3242; Hypothetical protein
3243; Peroxisomal 2,4-dienoyl-CoA reductase, auxiliary enzyme of fatty acid beta-oxidation; homodimeric enzyme required for growth and sporulation on petroselineate medium; expression induced during late sporulation and in the presence of oleate
3244; Hypothetical protein
3245; Protein required for cell viability; computational analysis of large-scale protein-protein interaction data suggests a possible role in assembly of the ribosomal large subunit
3246; Largest subunit of the Anaphase-Promoting Complex/Cyclosome (APC/C), which is a ubiquitin-protein ligase required for degradation of anaphase inhibitors, including mitotic cyclins, during the metaphase/anaphase transition
3247; Essential protein required for maturation of Gas1p and Pho8p; green fluorescent protein (GFP)-fusion protein localizes to the nuclear periphery; has synthetic genetic interactions with secretory pathway genes
3248; Protein required for cell viability

### 3249; ORF, Uncharacterized

[0215] 3250; Protein of unknown function, required for survival upon exposure to Kᵢ killer toxin; proposed to regulate double-strand break repair via non-homologous end-joining
3251; Putative S-adenosylmethionine-dependent methyltransferase of the seven beta-strand family
3252; Hypothetical protein
3253; Serine-rich protein of unknown function; overproduction suppresses the growth inhibition caused by exposure to the immunosuppressant leflunomide
3254; Protein of unknown function, localizes to the vacuole; potential Cdc28p substrate
3255; Alpha-1,2-mannosyltransferase, catalyzes addition of the terminal alpha 1,2-Man to the Man5GlcNAc2-PP-dolichol intermediate during asparagine-linked glycosylation in the ER
3256; Essential subunit of RNA polymerase III transcription factor (TFIIIB), which is involved in transcription of genes encoding tRNAs, 5S rRNA, U6 snRNA, and other small RNAs
3257; Hypothetical protein
3258; Non-essential protein with similarity to S. pombe hypothetical protein E349594
3259; Poly(A)+ RNA-binding protein, abundant mRNP-component protein hypothesized to bind a pool of non-translatable mRNAs; not reported to associate with polyribosomes
3260; Translational elongation factor EF-3; paralog of YEF3 and member of the ABC superfamily; stimulates EF-1 alpha-dependent binding of aminoacyl-tRNA by the ribosome; normally expressed in zinc deficient cells
3261; S-adenosylmethionine transporter of the mitochondrial inner membrane, member of the mitochondrial carrier family; required for biotin biosynthesis and respiratory growth
3262; Probable RNA-binding protein, functions in protein translation to promote G1 progression and differentiation, required for meiotic cell division
3263; RNA-dependent ATPase in the DEAH-box family, required for activation of the spliceosome before the first transesterification step in RNA splicing
3264; Hypothetical protein
3265; Guanine nucleotide exchange factor (GEF); glycosylated integral membrane protein of the endoplasmic reticulum, important for the initiation of transport vesicle budding from the endoplasmic reticulum through activation of the GTPase Sar1p
3266; Hypothetical protein
3267; Hypothetical protein
3268; Anchorage subunit of a-agglutinin of a-cells, highly O-glycosylated protein with N-terminal secretion signal and C-terminal signal for addition of GPI anchor to cell wall, linked to adhesion subunit Aga2p via two disulfide bonds
3269; Probable component of the secretory vesicle docking complex, acts at a late step in secretion; shows genetic and physical interactions with Sec1p and is enriched in microsomal membrane fractions; required for sporulation
3270; Dethiobiotin synthetase, catalyzes the third step in the biotin biosynthesis pathway; BIO4 is in a cluster of 3 genes (BIO3, BIO4, and BIO5) that mediate biotin synthesis; expression appears to be repressed at low iron levels
3271; Ferric reductase, reduces a specific subset of siderophore-bound iron prior to uptake by transporters; expression induced by low iron levels
3272; Epoxide hydrolase, member of the alpha/beta hydrolase fold family; may have a role in detoxification of epoxides
3273; Hypothetical protein
3274; Part of 23-member seripauperin multigene family encoded mainly in subtelomeric regions, active during alcoholic fermentation, regulated by anaerobiosis, negatively regulated by oxygen, repressed by heme
3275; Hypothetical protein
3276; Nucleolar protein required for 60S ribosomal subunit biogenesis
3277; Subunit of the RNA polymerase II mediator complex; associates with core polymerase subunits to form the RNA polymerase II holoenzyme; essential for transcriptional regulation
3278; Putative 1,3-beta-glucanosyltransferase, has similarity to Gas1p; localizes to the cell wall
3279; Subunit of a palmitoyltransferase, composed of Shr5p and Erf2p, that adds a palmitoyl lipid moiety to Ras2p through a thioester linkage; palmitoylation is required for Ras2p localization to the plasma membrane
3280; Myo-inositol transporter with strong similarity to the major myo-inositol transporter Itr1p, member of the sugar transporter superfamily; expressed constitutively
3281; tRNA 2′-phosphotransferase, catalyzes the final step in yeast tRNA splicing: the transfer of the 2′-PO(4) from the splice junction to NAD(+) to form ADP-ribose 1″-2″ cyclic phosphate and nicotinamide
3282; Cytoplasmic tryptophanyl-tRNA synthetase, aminoacylates tryptophanyl-tRNA
3283; O-methyltransferase, catalyzes two different O-methylation steps in ubiquinone (Coenzyme Q) biosynthesis; component of a mitochondrial ubiquinone-synthesizing complex
3284; Subunit of heteropentameric Replication factor C(RF-C), which is a DNA binding protein and ATPase that acts as a clamp loader of the proliferating cell nuclear antigen (PCNA) processivity factor for DNA polymerases delta and epsilon
3285; GTPase-activating protein that negatively regulates RAS by converting it from the GTP- to the GDP-bound inactive form, required for reducing cAMP levels under nutrient limiting conditions, has similarity to Ira1p and human neurofibromin
3286; Nuclear pore-associated protein, forms a complex with Sac3p that is involved in transcription and in mRNA export from the nucleus; contains a PAM domain implicated in protein-protein binding
3287; Non-essential protein of unknown function required for transcriptional induction of the early meiotic-specific transcription factor IME1, also required for sporulation
3288; Protein required for normal hydroxyurea resistance; one of constitutive RNR transcription (CRT) regulators
3289; Protein required for normal hydroxyurea resistance; one of constitutive RNR transcription (CRT) regulators
3290; 5-phospho-ribosyl-1(alpha)-pyrophosphate synthetase, involved in nucleotide, histidine, and tryptophan biosynthesis; one of a five related enzymes, which are active as heteromultimeric complexes
3291; Homolog of Gpm1p phosphoglycerate mutase which converts 3-phosphoglycerate to 2-phosphoglycerate in glycolysis; may be non-functional derivative of a gene duplication event
3292; Structural maintenance of chromosomes (SMC) protein, interacts with Smc6p and Nse1p to form a large complex; S. pombe homolog forms a heterodimer with S. pombe Rad18p that is involved in DNA repair
3293; Hypothetical protein
3294; Protein involved in telomeric and mating-type locus silencing, interacts with Sir2p and also interacts with the Gal11p, which is a component of the RNA pol II mediator complex
3295; Calmodulin-dependent protein kinase; may play a role in stress response, many CA++/calmodulan dependent phosphorylation substrates demonstrated in vitro, amino acid sequence similar to Cmk1p and mammalian Cam Kinase II
3296; Mitochondrial outer membrane protein, required for transmission of mitochondria to daughter cells; exists in a complex with Mmm1p and Mdm10p
3297; Coenzyme Q binding protein, required for function of coenzyme Q in respiration by functioning in the delivery of Q 6 to its proper location for electron transport, START domain protein with homologs in bacteria and eukaryotes
3298; RNA polymerase II subunit B12.5; part of central core; similar to Rpc19p and bacterial alpha subunit
3299; DNA binding subunit of Sin3p-Rpd3p histone deacetylase complex, involved in transcriptional repression of meiosis-specific genes during vegetative growth and silencing
3300; DNA ligase required for nonhomologous end-joining (NHEJ), forms stable heterodimer with required cofactor Lif1p, catalyzes DNA ligation as part of a complex with Lif1p and Nej1p; involved in meiosis, not essential for vegetative growth 3301; Hypothetical protein
3302; Copper-binding metallothionein, required for wild-type copper resistance
3303; Protein containing a CUE domain that binds ubiquitin, which may facilitate intramolecular monoubiquitination; green fluorescent protein (GFP)-fusion protein localizes to the cytoplasm in a punctate pattern
3304; Nuclear protein that inhibits replication of Brome mosaic virus in S. cerevisiae, which is a model system for studying replication of positive-strand RNA viruses in their natural hosts
3305; t-SNARE required for ER membrane fusion and vesicular traffic, integral membrane protein that constitutes with Sec20p and Use1p the trimeric acceptor for R/v-SNAREs on Golgi-derived vesicles at the ER; part of Dsl1p complex
3306; Contains three calcium and lipid binding domains; green fluorescent protein (GFP)-fusion protein localizes to the cell periphery; C-terminal portion of Tcb1p, Tcb2p and Tcb3p interact
3307; Alpha-isopropylmalate synthase II (2-isopropylmalate synthase), catalyzes the first step in the leucine biosynthesis pathway; the minor isozyme, responsible for the residual alpha-IPMS activity detected in a leu4 null mutant
3308; GTPase-activating protein for the polarity-establishment protein Cdc42p; implicated in control of septin organization, pheromone response, and haploid invasive growth
3309; Hypothetical protein
3310; Protein of unassigned function involved in activation of the Pma1p plasma membrane H+-ATPase by glucose
3311; Protein involved in regulation of Rsp5p, which is an essential HECT ubiquitin ligase; required for binding of Rsp5p to Ubp2p; contains an UBA domain
3312; Essential protein that promotes the first step of splicing and is required for the final stages of spliceosome maturation; interacts with Prp2p, which may release Spp2p from the spliceosome following the first cleavage reaction
3313; Alpha 1,2-mannosyltransferase involved in glycosyl phosphatidyl inositol (GPI) biosynthesis; required for addition of the fourth, side branching mannose to the GPI core structure
3314; Mitochondrial ribosomal protein of the large subunit
3315; Mitochondrial ribosomal protein of the small subunit; PET123 exhibits genetic interactions with PET122, which encodes a COX3 mRNA-specific translational activator
3316; Zn2-Cys6 zinc-finger transcription factor that activates genes involved in multidrug resistance; paralog of Yrr1p, acting on an overlapping set of target genes
3317; Sporulation-specific exo-1,3-beta-glucanase; contributes to ascospore thermoresistance
3318; Peripheral peroxisomal membrane protein involved in controlling peroxisome size and number, interacts with homologous protein Pex25p
3319; Protein involved in biosynthesis of the coenzyme lipoic acid, has similarity to E. coli lipoic acid synthase
3320; Nicotinate phosphoribosyltransferase, acts in the salvage pathway of NAD+biosynthesis; required for silencing at rDNA and telomeres and has a role in silencing at mating-type loci; localized to the nucleus
3321; Hypothetical protein
3322; Hypothetical protein
3323; Hypothetical protein
3324; Mannoprotein that exhibits a tight association with the cell wall, required for cell wall stability in the absence of GPI-anchored mannoproteins; has a high serine-threonine content; expression is induced in cell wall mutants
3325; Protein of unknown function required for the construction of the outer spore wall layers
3326; Daughter cell-specific protein, may help establish daughter fate
3327; Subunit of vacuolar-ATPase V0 domain, one of two isoforms (Vph1p and Sty1p); Vph1p is located in V-ATPase complexes of the vacuole while Sty1p is located in V-ATPase complexes of the Golgi and endosomes
3328; Phosphoprotein of the mRNA cap-binding complex involved in translational control, repressor of cap-dependent translation initiation, competes with eIF4G for binding to eIF4E
3329; Uroporphyrinogen III synthase, catalyzes the conversion of hydroxymethylbilane to uroporphyrinogen III, the fourth step in the heme biosynthetic pathway
3330; Member of the imitation-switch (ISWI) class of ATP-dependent chromatin remodeling complexes; ATPase component that, with Itc1p, forms a complex required for repression of a-specific genes, INO1, and early meiotic genes during mitotic growth
3331; Vacuolar transporter that mediates zinc transport into the vacuole; overexpression confers resistance to cobalt and rhodium
3332; Tail-anchored endoplasmic reticulum membrane protein that is a substrate of the phosphatase calcineurin, interacts with homolog Frt2p, promotes cell growth in conditions of high Na+, alkaline pH, and cell wall stress
3333; Hypothetical protein
3334; Ubiquitin-conjugating enzyme most similar in sequence to Xenopus ubiquitin-conjugating enzyme E2-C, but not a true functional homolog of this E2; unlike E2-C, not required for the degradation of mitotic cyclin Clb2
3335; Mitochondrial protein similar to Lucilia illustris mitochondrial cytochrome oxidase
3336; Hypothetical protein
3337; Protein of unknown function, green fluorescent protein (GFP)-fusion protein localizes to mitochondria; msc6 mutants are defective in directing meiotic recombination events to homologous chromatids
3338; Sorting nexin required to maintain late-Golgi resident enzymes in their proper location by recycling molecules from the prevacuolar compartment; contains a PX domain and sequence similarity to human Snx3p
3339; Hypothetical protein; open reading frame overlaps 5′ end of essential SUI3 gene encoding a translation initiation factor subunit
3340; The authentic, non-tagged protein was localized to the mitochondria.
3341; Bifunctional enzyme with thiamine-phosphate pyrophosphorylase and 4-methyl-5-beta-hydroxyethylthiazole kinase activities, required for thiamine biosynthesis; GFP-fusion protein localizes to the cytoplasm in a punctate pattern
3342; tRNA:pseudouridine synthase, introduces pseudouridines at positions 26-28, 34-36, 65, and 67 of tRNA; nuclear protein that appears to be involved in tRNA export; also acts on U2 snRNA
3343; Aurora kinase involved in regulating kinetochore-microtubule attachments, associates with Sli5p, which stimulates Ipl1p kinase activity and promotes its association with the mitotic spindle, potential Cdc28p substrate
3344; Iron-regulated transcriptional activator, required for iron homeostasis and resistance to oxidative stress; similar to Aft1p
3345; Hypothetical protein
3346; Protein that relieves transcriptional repression by binding to the Cyc8p-Tup1p corepressor and recruiting the SAGA complex to the repressed promoter; contains a PHD finger domain
3347; Large subunit of the dynactin complex, which is involved in partitioning the mitotic spindle between mother and daughter cells; putative ortholog of mammalian p150(glued)
3348; Heme A:farnesyltransferase, catalyzes the first step in the conversion of protoheme to the heme A prosthetic group required for cytochrome c oxidase activity; human ortholog is associated with mitochondrial disorders
3349; Protein of unknown function; green fluorescent protein (GFP)-fusion protein localizes to the cytoplasm in a punctate pattern
3350; Kinesin-related motor protein involved in mitotic spindle positioning, stabilizes microtubules by targeting Bik1p to the plus end; Kip2p levels are controlled during the cell cycle
3351; Mitogen-activated kinase kinase involved in protein kinase C signaling pathway that controls cell integrity; upon activation by Bck1p phosphorylates downstream target, Slt2p; functionally redundant with Mkk1p
3352; Glc7-interacting protein whose overexpression relocalizes Glc7p from the nucleus
3353; Mitochondrial inner membrane protein required for delivery of copper to the Cox1p subunit of cytochrome c oxidase; association with mitochondrial ribosomes suggests that copper delivery may occur during translation of Cox1p
3354; Karyopherin with a role in the assembly or export of 60S ribosomal subunits 3355; Meiosis specific protein involved in DMC1-dependent meiotic recombination, forms heterodimer with Sae3p; proposed to be an assembly factor for Dmc1p
3356; Phosphatidylinositol 3,5-bisphosphate-binding protein required for maturation of pro-aminopeptidase I, predicted to fold as a seven-bladed beta-propeller; displays punctate cytoplasmic localization
3357; Mitochondrial tyrosyl-tRNA synthetase
3358; Plasma membrane sulfite pump involved in sulfite metabolism and required for efficient sulfite efflux; major facilitator superfamily protein
3359; Putative aryl alcohol dehydrogenase; transcription is activated by paralogous transcription factors Yrm1p and Yrr1p along with genes involved in multidrug resistance
3360; Protein involved in the synthesis of N-acetylglucosaminyl phosphatidylinositol (GlcNAc-PI), the first intermediate in the synthesis of glycosylphosphatidylinositol (GPI) anchors; homologous to the human PIG-C protein
3361; Hypothetical protein
3362; Plasma membrane weak-acid-inducible ATP-binding cassette (ABC) transporter, required for weak organic acid resistance, strongly induced by sorbate and benzoate, regulated by War1p, mutants exhibit sorbate hypersensitivity
3363; Probable mannosylphosphate transferase involved in the synthesis of core oligosaccharides in protein glycosylation pathway; member of the KRE2/MNT1 mannosyltransferase family
3364; Conserved nuclear protein required to establish sister-chromatid pairing during S-phase, probable DNA helicase with similarity to human BACH1, which associates with tumor suppressor BRCA1; associates with acetyltransferase Ctf7p
3365; Mitochondrial protein that participates in respiration, induced by diauxic shift; homologous to E. coli PrpD, may take part in the conversion of 2-methylcitrate to 2-methylisocitrate
3366; Electron transfer flavoprotein complex subunit ETF-alpha; contains a FAD binding domain; interacts with YFH1, the yeast frataxin homolog
3367; Cytoplasmic protein involved in halotolerance; decreases intracellular Na+ (via Ena1p) and increases intracellular K+ by decreasing efflux; expression repressed by Ssn6p-Tup1p and Sko1p and induced by NaCl, KCl, and sorbitol through Gcn4p
3368; Mitochondrial transporter, acts both as a glutamate uniporter and as an aspartate-glutamate exchanger; involved in nitrogen metabolism, ornithine synthesis, and the malate-aspartate NADH shuttle
3369; Cyclin associated with protein kinase Kin28p, which is the TFIIH-associated carboxy-terminal domain (CTD) kinase involved in transcription initiation at RNA polymerase II promoters
3370; Acid trehalase required for utilization of extracellular trehalose
3371; Hypothetical protein
3372; Component of the histone acetyltransferase complex
3373; Translation initiation factor eIF-5; N-terminal domain functions as a GTPase-activating protein to mediate hydrolysis of ribosome-bound GTP; C-terminal domain is the core of ribosomal preinitiation complex formation
3374; Catalytic subunit of N-terminal acetyltransferase of the NatC type; required for replication of dsRNA virus
3375; snRNP protein component of spliceosomal snRNPs, required for pre-mRNA splicing and snRNP biogenesis; in null mutant newly-synthesized snRNAs are destabilized and 3′-end processing is slowed
3376; Hypothetical protein
3377; Protein with sequence similarity to Grs1p, which is a glycyl-tRNA synthetase; cannot substitute for Grs1p; possible pseudogene that is expressed at very low levels
3378; Hypothetical protein
3379; Hypothetical protein
3380; Methylthioribose-1-phosphate isomerase, catalyzes the isomerization of 5-methylthioribose-1-phosphate to 5-methylthioribulose-1-phosphate in the methionine salvage pathway
3381; B-type cyclin involved in DNA replication during S phase; activates Cdc28p to promote initiation of DNA synthesis; functions in formation of mitotic spindles along with Clb3p and Clb4p; most abundant during late G1 phase
3382; Nuclear encoded protein needed for efficient splicing of mitochondrial COX1 aI5beta intron; mss18 mutations block cleavage of 5′ exon-intron junction; phenotype of intronless strain suggests additional functions
3383; Chromatin-associated protein, required for sister chromatid cohesion; interacts with DNA polymerase alpha (Pol1p) and may link DNA synthesis to sister chromatid cohesion
3384; Minus-end-directed microtubule motor that functions in mitosis and meiosis, localizes to the spindle pole body and localization is dependent on functional Cik1p, required for nuclear fusion during mating; potential Cdc28p substrate
3385; Protein of unknown function; green fluorescent protein (GFP)-fusion protein localizes to the cytoplasm in a punctate pattern
3386; Mitochondrial protein required for degradation of unstable forms of cytochrome c
3387; Second largest subunit of DNA polymerase II (DNA polymerase epsilon), required for normal yeast chromosomal replication; expression peaks at the G1/S phase boundary; potential Cdc28p substrate
3388; Phosphorylated protein that interacts with Vac8p, required for the cytoplasm-to-vacuole targeting (Cvt) pathway and autophagy
3389; Hypothetical protein
3390; Questionable ORF from MIPS
3391; Protein of unknown function, localized in the nucleoplasm and the nucleolus, genetically interacts with MTR2 in 608 ribosomal protein subunit export
3392; Proposed beta subunit of the heterotrimeric G protein that interacts with the receptor Grp1p, has signaling role in response to nutrients; involved in regulation of pseudohyphal growth through cAMP levels; homolog of Gpb1p
3393; Oleate-activated transcription factor, acts alone and as a heterodimer with Pip2p; activates genes involved in beta-oxidation of fatty acids and peroxisome organization and biogenesis
3394; Oleate-activated transcription factor, acts alone and as a heterodimer with Pip2p; activates genes involved in beta-oxidation of fatty acids and peroxisome organization and biogenesis
3395; Component of the cytoplasmic Tub4p (gamma-tubulin) complex, binds spindle pole bodies and links them to microtubules; has roles in astral microtubule formation and stabilization
3396; Hypothetical protein
3397; Similar to pombe uvi31, putative DNA repair protein
3398; H subunit of the mitochondrial glycine decarboxylase complex, required for the catabolism of glycine to 5,10-methylene-THF; expression is regulated by levels of levels of 5,10-methylene-THF in the cytoplasm
3399; Subunit of holo-CPF, a multiprotein complex and functional homolog of mammalian CPSF, required for the cleavage and polyadenylation of mRNA and snoRNA 3′ ends; involved in pre-tRNA processing; binds to the phosphorylated CTD of RNAPII
3400; Hypothetical protein
3401; Hypothetical protein
3402; Identified by gene-trapping, microarray-based expression analysis, and genome-wide homology searching
3403; Non-essential protein of unknown function
3404; Questionable ORF from MIPS
3405; Vesicle membrane receptor protein (v-SNARE) involved in the fusion between Golgi-derived secretory vesicles with the plasma membrane; proposed to be involved in endocytosis; member of the synaptobrevin/VAMP family of R-type v-SNARE proteins
3406; Vesicle membrane receptor protein (v-SNARE) involved in the fusion between Golgi-derived secretory vesicles with the plasma membrane; proposed to be involved in endocytosis; member of the synaptobrevin/VAMP family of R-type v-SNARE proteins
3407; Nucleoside transporter with broad nucleoside selectivity; localized to intracellular membranes
3408; Transcriptional modulator involved in the regulation of structural genes involved in phospholipid biosynthesis, also participates in regulation of metabolically unrelated genes as well as maintenance of mating efficiency and sporulation
3409; Protein of unknown function, component of the Swr1p complex that incorporates Htz1p into chromatin; required for formation of nuclear-associated array of smooth endoplasmic reticulum known as karmellae
3410; Hypothetical protein
3411; Hypothetical protein
3412; Translation elongation factor 1 beta; stimulates nucleotide exchange to regenerate EF-1 alpha-GTP for the next elongation cycle; part of the EF-1 complex, which facilitates binding of aminoacyl-tRNA to the ribosomal A site
3413; Translation elongation factor 1 beta; stimulates nucleotide exchange to regenerate EF-1 alpha-GTP for the next elongation cycle; part of the EF-1 complex, which facilitates binding of aminoacyl-tRNA to the ribosomal A site
3414; Membrane-associated hydrophilic protein that interacts with the small GTPase, Vps21p, to facilitate soluble vacuolar protein localization; required for localization and trafficking of the CPY sorting receptor; contains a RING finger motif
3415; Largest of six subunits of the RNA polymerase III transcription initiation factor complex (TFIIIC); part of the TauB domain of TFIIIC that binds DNA at the BoxB promoter sites of tRNA and similar genes; cooperates with Tfc6p in DNA binding
3416; Subunit of the tRNA splicing endonuclease, which is composed of Sen2p, Sen15p, Sen34p, and Sen54p; Sen34p contains the active site for tRNA 3′ splice site cleavage and has similarity to Sen2p and to Archaeal tRNA splicing endonuclease
3417; Protein involved in bud-site selection, Bud14p-Glc7p complex functions as a cortical regulator of dynein; diploid mutants display a random budding pattern instead of the wild-type bipolar pattern
3418; Putative integral membrane protein of unknown function; interacts with Ulp1p at the nuclear periphery; member of DUP240 gene family
3419; Putative integral membrane protein of unknown function; interacts with Ulp1p at the nuclear periphery; member of DUP240 gene family
3420; Putative integral membrane protein of unknown function; interacts with Ulp1p at the nuclear periphery; member of DUP240 gene family
3421; Outer mitochondrial carnitine acetyltransferase, minor ethanol-inducible enzyme involved in transport of activated acyl groups from the cytoplasm into the mitochondrial matrix
3422; Outer mitochondrial carnitine acetyltransferase, minor ethanol-inducible enzyme involved in transport of activated acyl groups from the cytoplasm into the mitochondrial matrix
3423; Merged open reading frame, does not encode a discrete protein; YAR044W was originally annotated as an independent ORF, but as a result of a sequence change, it was merged with an adjacent ORF into a single reading frame, designated YAR042W
3424; Lectin-like protein involved in flocculation, cell wall protein that binds to mannose chains on the surface of other cells, confers floc-forming ability that is chymotrypsin sensitive and heat resistant; similar to Flo5p
3425; Lectin-like protein involved in flocculation, cell wall protein that binds to mannose chains on the surface of other cells, confers floc-forming ability that is chymotrypsin sensitive and heat resistant; similar to Flo5p
3426; Hypothetical protein
3427; Hypothetical protein
3428; Dubious open reading frame
3429; Kynurenine 3-mono oxygenase, required for biosynthesis of nicotinic acid from tryptophan via kynurenine pathway
3430; Essential protein required for chromosome condensation, likely to function as an intrinsic component of the condensation machinery, may influence multiple aspects of chromosome transmission and dynamics
3431; Hypothetical protein
3432; Hypothetical protein
3433; Protein component of the large (60S) ribosomal subunit, has similarity to rat L32 ribosomal protein; overexpression disrupts telomeric silencing
3434; Protein involved in regulation of phospholipid metabolism; homolog of Scs2p2; similar to D. melanogaster inturned protein
3435; Putative transporter, member of a family of seven S. cerevisiae genes (AVT1-7) related to vesicular GABA-glycine transporters
3436; Protein component of the large (60S) ribosomal subunit, identical to Rpl23 Bp and has similarity to E. coli L14 and rat L23 ribosomal proteins
3437; Protein of unknown function; green fluorescent protein (GFP)-fusion protein localizes to the cell periphery
3438; Dolichol-P-Man dependent alpha(1-3) mannosyltransferase, involved in the synthesis of dolichol-linked oligosaccharide donor for N-linked glycosylation of proteins
3439; Hypothetical protein
3440; Hypothetical protein
3441; Abundant subunit of the nuclear pore complex (NPC), required for proper localization of specific nucleoporins within the NPC, involved in nuclear envelope permeability and in chromosome segregation, has similarity to Nup157p
3442; Abundant subunit of the nuclear pore complex (NPC), required for proper localization of specific nucleoporins within the NPC, involved in nuclear envelope permeability and in chromosome segregation, has similarity to Nup157p
3443; Hypothetical protein; open reading frame overlaps 3′ end of essential ILS1 gene encoding cytoplasmic isoleucine-tRNA synthetase
3444; ATPase involved in protein folding and the response to stress; plays a role in SRP-dependent cotranslational protein-membrane targeting and translocation; member of the heat shock protein 70 (HSP70) family; localized to the cytoplasm
3445; ATPase involved in protein folding and the response to stress; plays a role in SRP-dependent cotranslational protein-membrane targeting and translocation; member of the heat shock protein 70 (HSP70) family; localized to the cytoplasm
3446; Component of the U5 snRNP, required for splicing of U3 precursors; originally described as a splicing factor specifically required for splicing pre-mRNA of the MATa1 cistron
3447; Component of the U5 snRNP, required for splicing of U3 precursors; originally described as a splicing factor specifically required for splicing pre-mRNA of the MATa1 cistron
3448; Hypothetical protein
3449; 5-phospho-ribosyl-1(alpha)-pyrophosphate synthetase, involved in nucleotide, histidine, and tryptophan biosynthesis; one of a five related enzymes, which are active as heteromultimeric complexes
3450; Putative ubiquitin-specific protease
3451; Putative transcription factor, has homolog in Kluyveromyces lactis
3452; Hypothetical protein
3453; Activator of Chs3p (chitin synthase III), recruits Chs3p to the bud neck via interaction with Bni4p; has similarity to Shc1p, which activates Chs3p during sporulation
3454; Activator of Chs3p (chitin synthase III), recruits Chs3p to the bud neck via interaction with Bni4p; has similarity to Shc1p, which activates Chs3p during sporulation
3455; Hypothetical protein
3456; Hypothetical protein
3457; One of two (see also PTH1) mitochondrially-localized peptidyl-tRNA hydrolases; dispensable for cell growth
3458; Hypothetical protein
3459; Peripheral membrane protein required for vesicular transport between ER and Golgi and for the ‘priming’ step in homotypic vacuole fusion, part of the cis-SNARE complex; has similarity to alpha-SNAP
3460; Key endocytic protein involved in a network of interactions with other endocytic proteins, binds membranes in a ubiquitin-dependent manner, may also bind ubiquitinated membrane-associated proteins
3461; Key endocytic protein involved in a network of interactions with other endocytic proteins, binds membranes in a ubiquitin-dependent manner, may also bind ubiquitinated membrane-associated proteins
3462; Integral membrane protein that binds to the HDEL motif in proteins destined for retention in the endoplasmic reticulum; has a role in maintenance of normal levels of ER-resident proteins
3463; Component of the mitotic spindle that binds to interpolar microtubules via its association with beta-tubulin (Tub2p); required for interpolar microtubules to provide an outward force on the spindle poles
3464; Component of the mitotic spindle that binds to interpolar microtubules via its association with beta-tubulin (Tub2p); required for interpolar microtubules to provide an outward force on the spindle poles
3465; Mitochondrial ATP-dependent protease involved in intramitochondrial proteolysis; involved in degradation of misfolded proteins in mitochondria, required for bigenesis and maintenance of mitochondria
3466; Mitochondrial ATP-dependent protease involved in intramitochondrial proteolysis; involved in degradation of misfolded proteins in mitochondria; required for bigenesis and maintenance of mitochondria
3467; Subunit of both RNase MRP, which cleaves pre-rRNA, and nuclear RNase P, which cleaves tRNA precursors to generate mature 5′ ends
3468; Mitogen-activated protein kinase involved in mating pheromone response; activated by phosphorylation by Step 7p; provides specificity during the mating vs. filamentous growth response by phosphorylating transcriptional and cytoplasmic targets
3469; Acetyl-coA hydrolase, primarily localized to mitochondria; required for acetate utilization and for diploid pseudohyphal growth
3470; Protein involved in the transcription of 35S rRNA genes by RNA polymerase I; component of the core factor (CF) complex also composed of Rrn11p, Rrn7p and TATA-binding protein
3471; Methionyl-tRNA formyltransferase, catalyzes the formylation of initiator Met-tRNA in mitochondria; potential Cdc28p substrate
3472; Protein of unknown function; null mutant shows a reduced affinity for the alcian blue dye suggesting a decreased net negative charge of the cell surface
3473; Galactokinase, phosphorylates alpha-D-galactose to alpha-D-galactose-1-phosphate in the first step of galactose catabolism; expression regulated by Gal4p
3474; Galactokinase, phosphorylates alpha-D-galactose to alpha-D-galactose-1-phosphate in the first step of galactose catabolism; expression regulated by Gal4p
3475; N-terminally acetylated protein component of the large (60S) ribosomal subunit, nearly identical to Rpl4 Bp and has similarity to E. coli L4 and rat L4 ribosomal proteins
3476; Non-essential protein of unknown function
3477; Chitin synthase II, requires activation from zymogenic form in order to catalyze the transfer of N-acetylglucosamine (GlcNAc) to chitin; required for the synthesis of chitin in the primary septum during cytokinesis
3478; Chitin synthase II, requires activation from zymogenic form in order to catalyze the transfer of N-acetylglucosamine (GlcNAc) to chitin; required for the synthesis of chitin in the primary septum during cytokinesis
3479; Fatty acid transporter and very long-chain fatty acyl-CoA synthetase, may form a complex with Faa1p or Faa4p that imports and activates exogenous fatty acids
3480; Hypothetical protein
3481; Hypothetical protein
3482; Multidrug transporter required for resistance to quinidine, barban, cisplatin, and bleomycin; member of the major facilitator superfamily of transporters conferring multiple drug resistance (MFS-MDR)
3483; Multidrug transporter required for resistance to quinidine, barban, cisplatin, and bleomycin; member of the major facilitator superfamily of transporters conferring multiple drug resistance (MFS-MDR)
3484; Protein involved in the assembly of the mitochondrial succinate dehydrogenase complex; putative chaperone
3485; Meiosis-specific regulatory subunit of the Glc7p protein phosphatase, regulates spore wall formation and septin organization, required for expression of some late meiotic genes and for normal localization of Glc7p
3486; Protein component of the small (40S) ribosomal subunit; identical to Rps11Ap and has similarity to E. coli S17 and rat S11 ribosomal proteins
3487; Splicing factor, component of the U4/U6-U5 snRNP complex
3488; Ubiquitin-specific protease that specifically disassembles unanchored ubiquitin chains; involved in fructose-1,6-bisphosphatase (Fbp1p) degradation; similar to human isopeptidase T
3489; Ser-Thr protein Idnase, member (with Ark1p and Prk1p) of the Ark kinase family; involved in endocytosis and actin cytoskeleton organization
3490; Ser-Thr protein kinase, member (with Ark1p and Prk1p) of the Ark kinase family; involved in endocytosis and actin cytoskeleton organization
3491; Component of UDP-GlcNAc transferase required for the second step of dolichyl-linked oligosaccharide synthesis; anchors the catalytic subunit Alg13p to the ER membrane; similar to bacterial and human glycosyltransferases
3492; DNA-dependent ATPase, stimulates strand exchange by modifying the topology of double-stranded DNA; involved in the recombinational repair of double-strand breaks in DNA during mitosis and meiosis; proposed to be involved in crossover interference
3493; Merged open reading frame, does not encode a discrete protein; YBR075W was originally annotated as an independent ORF, but as a result of a sequence change, it was merged with an adjacent ORF into a single reading frame, designated YBR074W
3494; Non-essential protein of unknown function
3495; Component of the EGO complex, which is involved in the regulation of microautophagy; gene exhibits synthetic genetic interaction with MSS4 encoding phosphatidylinositol 4-phosphate kinase
3496; Component of the EGO complex, which is involved in the regulation of microautophagy; gene exhibits synthetic genetic interaction with MSS4 encoding phosphatidylinositol 4-phosphate kinase
3497; GPI-anchored protein of unknown function, has a possible role in apical bud growth; GPI-anchoring on the plasma membrane crucial to function; similar to Sps2p and Pst1p
3498; Ubiquitin-conjugating enzyme that mediates degradation of short-lived and abnormal proteins; interacts with E3-CaM in ubiquitinating calmodulin; interacts with many SCF ubiquitin protein ligases; component of the cellular stress response
3499; Hypothetical protein
3500; Hypothetical protein
3501; Hypothetical protein
3502; Protein possibly involved in cell fusion and invasive growth
3503; Myristoylated serine/threonine protein kinase involved in vacuolar protein sorting; functions as a membrane-associated complex with Vps34p; active form recruits Vps34p to the Golgi membrane; also detected in mitochondria
3504; Myristoylated serine/threonine protein kinase involved in vacuolar protein sorting; functions as a membrane-associated complex with Vps34p; active form recruits Vps34p to the Golgi membrane; also detected in mitochondria
3505; Hypothetical protein
3506; WD40 repeat-containing subunit of the Set3C histone deacetylase complex, which represses early/middle sporulation genes; antagonizes telomeric silencing; binds specifically to the Sir4p N-terminus
3507; WD40 repeat-containing subunit of the Set3C histone deacetylase complex, which represses early/middle sporulation genes; antagonizes telomeric silencing; binds specifically to the Sir4p N-terminus
3508; Hypothetical protein identified by homology. See FEBS Letters [2000] 487:31-36.
3509; Protein interacting with Rsv167p
3510; Calmodulin; Ca++ binding protein that regulates Ca++ independent processes (mitosis, bud growth, actin organization, endocytosis, etc.) and Ca++ dependent processes (stress-activated pathways), targets include Nuf1p, Myo2p and calcineurin
3511; Nudix hydrolase family member with ADP-ribose pyrophosphatase activity
3512; Protein that recognizes and binds damaged DNA in an ATP-dependent manner (with Rad7p) during nucleotide excision repair; subunit of Nucleotide Excision Repair Factor 4 (NEF4); member of the SWI/SNF family
3513; Protein that recognizes and binds damaged DNA in an ATP-dependent manner (with Rad7p) during nucleotide excision repair; subunit of Nucleotide Excision Repair Factor 4 (NEF4); member of the SWI/SNF family
3514; Translational elongation factor EF-1 alpha; also encoded by TEF1; functions in the binding reaction of aminoacyl-tRNA (AA-tRNA) to ribosomes
3515; U1 snRNP A protein, homolog of human U1-A; involved in nuclear mRNA splicing
3516; Mitochondrial ribosomal protein of the large subunit; overproduction suppresses mutations in the COX2 leader peptide-encoding region
3517; One of six subunits of the RNA polymerase III transcription initiation factor complex (TFIIIC); part of the TauA globular domain of TFIIIC that binds DNA at the BoxA promoter sites of tRNA and similar genes; human homolog is TFIIIC-63
3518; One of six subunits of the RNA polymerase III transcription initiation factor complex (TFIIIC); part of the TauA globular domain of TFIIIC that binds DNA at the BoxA promoter sites of tRNA and similar genes; human homolog is TFIIIC-63
3519; Cytoplasmic type 2C protein phosphatase; identified as a high-copy number suppressor of the synthetic lethality of a cnb1 mpk1 double deletion; overexpression decreases high-osmolarity induced Hog1p phosphorylation and kinase activity
3520; Protein of unknown function, overproduction blocks cell cycle arrest in the presence of mating pheromone
3521; Genome integrity checkpoint protein and PI kinase superfamily member; signal transducer required for cell cycle arrest and transcriptional responses prompted by damaged or unreplicated DNA; monitors and participates in meiotic recombination
3522; Genome integrity checkpoint protein and PI kinase superfamily member; signal transducer required for cell cycle arrest and transcriptional responses prompted by damaged or unreplicated DNA; monitors and participates in meiotic recombination
3523; Putative serine type Carboxypeptidase; green fluorescent protein (GFP)-fusion protein localizes to the vacuole; YBR139W is not an essential gene
3524; Probable Zn-finger protein
3525; Probable Zn-finger protein
3526; Protein of unknown function; null mutation does not confer any obvious defects in growth, spore germination, viability, or carbohydrate utilization
3527; Protein required for daughter cell separation, multiple mitotic checkpoints, and chromosome stability; contains 12 degenerate leucine-rich repeat motifs; expression is induced by the Mitotic Exit Network (MEN)
3528; Protein required for daughter cell separation, multiple mitotic checkpoints, and chromosome stability; contains 12 degenerate leucine-rich repeat motifs; expression is induced by the Mitotic Exit Network (MEN)
3529; Protein of unknown function that interacts with Myo2p; has similarity to S. pombe Mpd2
3530; Dubious open reading frame unlikely to encode a protein, based on available experimental and comparative sequence data; partially overlaps the verified ORF YBR175W; null mutant is viable and sporulation defective
3531; Possible serine hydrolase, may be involved in lipid metabolism, null mutant slightly temperature sensitive at 37 C
3532; Mitochondrial integral membrane protein involved in mitochondrial fusion and maintenance of the mitochondrial genome; contains N-terminal GTPase domain
3533; Protein component of the small (40S) ribosomal subunit; identical to Rps6Ap and has similarity to rat S6 ribosomal protein
3534; Protein involved in assembly of mitochondrial respiratory complexes; may act as a receptor for proteins destined for export from the mitochondrial matrix to the inner membrane tive proteosomal subunits in other species; null mutant is temperature sensitive and exhibits cell cycle and proteasome assembly defects
5798; Non-ATPase regulatory subunit of the 26S proteasome, has similarity to putative proteosomal subunits in other species; null mutant is temperature sensitive and exhibits cell cycle and proteasome assembly defects
5799; RNA-binding protein that carries poly(A)+ mRNA from the nucleus into the cytoplasm; phosphorylation by Sky1p in the cytoplasm may promote release of mRNAs
5800; Apparent pseudogene, not transcribed or translated under normal conditions; encodes a protein with similarity to adenine phosphoribosyltransferase, but artificially expressed protein exhibits no enzymatic activity
5801; Nucleolar protein, component of the small subunit (SSU) processome containing the U3 snoRNA that is involved in processing of pre-18 S rRNA
5802; Stress inducible cytoplasmic thioredoxin peroxidase; cooperates with Tsa1p in the removal of reactive oxygen, nitrogen and sulfur species using thioredoxin as hydrogen donor; deletion enhances the mutator phenotype of tsa1 mutants
5803; Transcription factor, activated by proteolytic processing in response to signals from the SPS sensor system for external amino acids; activates transcription of amino acid permease genes and may have a role in tRNA processing
5804; Subunit of RNase MRP, which cleaves pre-rRNA; not shared between Rnase MRP and nuclear Rnase P, in contrast to all other Rnase MRP protein subunits; binds to the NME1 RNA subunit of Rnase MRP
5805; Component of a complex containing Cef1p, putatively involved in pre-mRNA splicing; may bind RNA; has similarity to S. pombe Cwf21p
5806; Hypothetical protein
5807; Hypothetical protein
5808; Protein involved in regulation of cell wall composition and integrity and response to osmotic stress; overproduction suppresses a lysis sensitive PKC mutation; similar to Lre1p, which functions antagonistically to protein kinase A

### 5809; Fumurate ReDuctase Soluble

[0216] 5810; Identified by fungal homology and RT-PCR
5811; Hypothetical protein
5812; Microtubule effector required for tubulin heterodimer formation, binds alpha-tubulin, required for normal microtubule function, null mutant exhibits cold-sensitive microtubules and sensitivity to benomyl
5813; Probable transcriptional repressor involved in response to toxic agents such as hydroxyurea that inhibit ribonucleotide reductase; phosphorylation by Snf1p or the Mec1p pathway inactivates Mig3p, allowing induction of damage response genes
5814; Purine-cytosine permease, mediates purine (adenine, guanine, and hypoxanthine) and cytosine accumulation
5815; Questionable ORF from MIPS
5816; Phosphotyrosine-specific protein phosphatase involved in the inactivation of mitogen-activated protein kinase (MAPK) during osmolarity sensing; dephosphorylates Hog 1p MAPK and regulates its localization; localized to the cytoplasm
5817; Hypothetical protein
5818; 3-phosphoglycerate dehydrogenase, catalyzes the first step in serine and glycine biosynthesis; isozyme of Ser33p
5819; Questionable ORF from MIPS
5820; Questionable ORF from MIPS
5821; Hypothetical protein
5822; Transmembrane osmosensor, participates in activation of both the Cdc42p- and MAP kinase-dependent filamentous growth pathway and the high-osmolarity glycerol response pathway
5823; Questionable ORF from MIPS
5824; Questionable ORF from MIPS
5825; Subunit of cohesin loading factor (Scc2p-Scc4p), a complex required for the loading of cohesin complexes onto chromosomes; involved in establishing sister chromatid cohesion during double-strand break repair via phosphorylated histone H2AX
5826; Hypothetical protein
5827; Questionable ORF from MIPS
5828; Questionable ORF from MIPS
5829; Questionable ORF from MIPS
5830; The authentic, non-tagged protein was localized to the mitochondria
5831; Probable Mg(2+) transporter; overexpression confers increased tolerance to Al(3+) and Ga(3+) ions
5832; Putative protein of unknown function; green fluorescent protein (GFP)-fusion protein localizes to the nucleus; YFL049W is not an essential gene; abundantly expressed in many growth conditions
5833; Protein involved in bud-site selection, nutrient signaling, and gene expression controlled by the TOR kinase; diploid mutants display a random budding pattern instead of the wild-type bipolar pattern
5834; Questionable ORF from MIPS
5835; Protein required for the negative regulation by ammonia of Gap1p, which is a general amino acid permease
5836; Hypothetical protein
5837; Dubious open reading frame unlikely to encode a protein based on available experimental and comparative sequence data; partially overlaps the uncharacterized gene YFR055W
5838; Putative cystathionine beta-lyase; involved in copper ion homeostasis and sulfur metabolism; YFR055W is not an essential gene
5839; Protein with sequence similarity to iron/copper reductases (FRE1-8), possibly involved in iron homeostasis
5840; Putative protein of unknown function; deletion mutant has no detectable phenotype
5841; Dubious open reading frame unlikely to encode a protein, based on available experimental and comparative sequence data; partially overlaps the verified ORF INO80/YGL150C.
5842; Protein component of the large (60S) ribosomal subunit, nearly identical to Rpl9 Bp and has similarity to E. coli L6 and rat L9 ribosomal proteins
5843; Protein with similarity to hect domain E3 ubiquitin-protein ligases, not essential for viability
5844; Protein with similarity to hect domain E3 ubiquitin-protein ligases, not essential for viability
5845; Hypothetical protein
5846; Hypothetical protein
5847; Mitochondrial 21 S rRNA methyltransferase, required for methylation of U(2791) in
21 S rRNA; MRM2 deletion confers thermosensitive respiration and loss of mitochondrial DNA; has similarity to Spb1p and Trm7p, and to E. coli FtsJ/RrmJ
5848; Component of the ATP-dependent Isw2p-Itc1p chromatin remodeling complex, required for repression of a-specific genes, repression of early meiotic genes during mitotic growth, and repression of INO1
5849; Component of the ATP-dependent Isw2p-Itc1p chromatin remodeling complex, required for repression of a-specific genes, repression of early meiotic genes during mitotic growth, and repression of INO1
5850; Protein required for inositol prototrophy, appears to be involved in the synthesis of inositol phospholipids from inositol but not in the control of inositol synthesis
5851; Nuclear polyadenylated RNA-binding protein; autoregulates mRNA levels; related to human hnRNPs; has nuclear localization signal sequence that binds to Kap104p; required for poly(A) tail length control and nuclear mRNA export
5852; Mitochondrial protein required for sporulation
5853; Hypothetical protein; open reading frame overlaps 3′ end of essential RPL28 gene encoding a large subunit ribosomal protein
5854; Essential nucleoporin, catalyzes its own cleavage in vivo to generate a C-terminal fragment that assembles into the Nup84p subcomplex of the nuclear pore complex, and an N-terminal fragment of unknown function that is homologous to Nup100p
5855; Essential nucleoporin, catalyzes its own cleavage in vivo to generate a C-terminal fragment that assembles into the Nup84p subcomplex of the nuclear pore complex, and an N-terminal fragment of unknown function that is homologous to Nup100p
5856; Protein involved in DNA double-strand break repair; physically interacts with DNA ligase 4 (Lig4p); homologous to mammalian XRCC4 protein
5857; Protein involved in DNA double-strand break repair; physically interacts with DNA ligase 4 (Lig4p); homologous to mammalian XRCC4 protein
5858; Hypothetical protein; open reading frame overlaps 5′ end of essential HSF1 gene encoding heat shock transcription factor
5859; Identified by gene-trapping, microarray-based expression analysis, and genome-wide homology searching
5860; Catalytic component of UDP-GlcNAc transferase, required for the second step of dolichyl-linked oligosaccharide synthesis; anchored to the ER membrane via interaction with Alg14p; similar to bacterial and human glycosyltransferases
5861; Catalytic component of UDP-GlcNAc transferase, required for the second step of dolichyl-linked oligosaccharide synthesis; anchored to the ER membrane via interaction with Alg14p; similar to bacterial and human glycosyltransferases
5862; Hypothetical protein
5863; Hypothetical protein
5864; Subunit of the Mediator global transcriptional cofactor complex, which is part of the RNA polymerase II holoenzyme and plays an essential role in basal and activated transcription; direct target of the Cyc8p-Tup1p transcriptional corepressor
5865; Member of the PUF protein family, which is defined by the presence of Pumilio homology domains that confer RNA binding activity; preferentially binds mRNAs encoding nucleolar ribosomal RNA-processing factors
5866; Member of the PUF protein family, which is defined by the presence of Pumilio homology domains that confer RNA binding activity; preferentially binds mRNAs encoding nucleolar ribosomal RNA-processing factors
5867; Zinc cluster protein that is a master regulator involved in recruiting other zinc cluster proteins to pleiotropic drug response elements (PDREs) to fine tune the regulation of multidrug resistance genes
5868; Protein with similarity to methyltransferase family members; required for replication of Brome mosaic virus in S. cerevisiae, which is a model system for studying replication of positive-strand RNA viruses in their natural hosts
5869; Protein with similarity to methyltransferase family members; required for replication of Brome mosaic virus in S. cerevisiae, which is a model system for studying replication of positive-strand RNA viruses in their natural hosts
5870; Hypothetical protein
5871; Protein with both structural and functional similarity to Mid2p, which is a plasma membrane sensor required for cell integrity signaling during pheromone-induced morphogenesis; suppresses rgd1 null mutations
5872; tRNAHis guanylyltransferase, adds a guanosine residue to the 5′ end of tRNAHis after transcription and RNase P cleavage; couples nuclear division and migration to cell budding and cytokinesis; essential enzyme conserved among eukaryotes
5873; Putative protein of unknown function; green fluorescent protein (GFP)-fusion protein localizes to the mitochondrion
5874; Dubious open reading frame unlikely to encode a protein, based on available experimental and comparative sequence data; completely overlaps the uncharacterized ORF YGR031W
5875; Catalytic subunit of 1,3-beta-glucan synthase, has similarity to an alternate catalytic subunit, Fks1p (Gsc1p); Rho1p encodes the regulatory subunit; involved in cell wall synthesis and maintenance
5876; Catalytic subunit of 1,3-beta-glucan synthase, has similarity to an alternate catalytic subunit, Fks1p (Gsc1p); Rho1p encodes the regulatory subunit; involved in cell wall synthesis and maintenance
5877; Zinc finger protein involved in control of meiosis; prevents meiosis by repressing IME1 expression and promotes mitosis by activating CLN2 expression; directly repressed by a1-a2 regulator; mediates cell type control of sporulation
5878; Zinc finger protein involved in control of meiosis; prevents meiosis by repressing IME1 expression and promotes mitosis by activating CLN2 expression; directly repressed by a1-a2 regulator; mediates cell type control of sporulation
5879; Protein that forms a complex with Spt5p and mediates both activation and inhibition of transcription elongation, and plays a role in pre-mRNA processing; in addition, Spt4p is involved in kinetochore function and gene silencing
5880; Hypothetical protein; has similarity to Adr1p DNA-binding domain
5881; Putative protein of unknown function; deletion mutant has increased glycogen accumulation; green fluorescent protein (GFP)-fusion protein localizes to the nucleus
5882; Putative protein of unknown function; deletion mutant has increased glycogen accumulation; green fluorescent protein (GFP)-fusion protein localizes to the nucleus
5883; Hypothetical protein; open reading frame extensively overlaps essential SMD1 gene encoding a U6 snRNP protein
5884; Part of the heteromeric co-chaperone GimC/prefoldin complex, which promotes efficient protein folding
5885; Hypothetical protein
5886; Protein of unknown function; deletion mutant has synthetic fitness defect with an sgs1 deletion mutant
5887; Possible U3 snoRNP protein involved in maturation of pre-18S rRNA, based on computational analysis of large-scale protein-protein interaction data
5888; Possible U3 snoRNP protein involved in maturation of pre-18S rRNA, based on computational analysis of large-scale protein-protein interaction data
5889; Protein serine/threonine phosphatase with similarity to human phosphatase PP5; present in both the nucleus and cytoplasm; expressed during logarithmic growth
5890; Vacuolar protein sorting (VPS) protein required for cytoplasm to vacuole targeting of proteins
5891; Identified by gene-trapping, microarray-based expression analysis, and genome-wide homology searching
5892; Hypothetical protein
5893; 3′5′ exoribonuclease, exosome subunit; nucleolar protein involved in export of mRNA and ribosomal subunits; homologous to the E. coli exonuclease RNase PH
5894; Hypothetical protein
5895; Integral membrane protein required for the biogenesis of ER-derived COPII transport vesicles; interacts with Yif1p and Yos1p; localizes to the Golgi, the ER, and COPII vesicles
5896; Hypothetical protein; open reading frame overlaps 5′ end of essential HIP1 gene encoding histidine permease
5897; Protein involved in nitrosoguanidine (MNNG) resistance; expression is regulated by transcription factors involved in multidrug resistance
5898; Putative protein of unknown function; green fluorescent protein (GFP)-fusion protein localizes to the cytoplasm in a punctate pattern; YGR198W is an essential gene
5899; Putative protein of unknown function; deletion mutant is sensitive to rapamycin and nystatin; green fluorescent protein (GFP)-fusion protein localizes to the endosome
5900; Putative protein of unknown function; green fluorescent protein (GFP)-fusion protein localizes to the cytoplasm
5901; Protein component of the small (40S) ribosomal subunit, nearly identical to Rps0Bp; required for maturation of 18S rRNA along with Rps0Bp; deletion of either RPS0 gene reduces growth rate, deletion of both genes is lethal
5902; Protein required for splicing of the COX1 intron AI5 beta; also specifically required, together with Pet122p and Pet494p, for translation of the COX3 mRNA; located in the mitochondrial inner membrane
5903; Phosphatidylinositol 3,5-bisphosphate-binding protein, predicted to fold as a seven-bladed beta-propeller; displays punctate cytoplasmic localization
5904; Activator of meiotic anaphase promoting complex (APC/C); Cdc20p family member; required for initiation of spore wall assembly; required for Clb1p degradation during meiosis
5905; Dubious open reading frame unlikely to encode a protein, based on available experimental and comparative sequence data; partially overlaps the verified ORF SMI1/YGR229c
5906; Nitric oxide oxidoreductase, flavohemoglobin involved in nitric oxide detoxification; plays a role in the oxidative and nitrosative stress responses
5907; Protein involved in clathrin cage assembly; binds Pan1p and clathrin; homologous to Yap1801p, member of the AP180 protein family
5908; Dubious open reading frame unlikely to encode a protein, based on available experimental and comparative sequence data; partially overlaps the verified ORF YAP1802/YGR241c
5909; Highly conserved nuclear protein required for actin cytoskeleton organization and passage through Start, plays a critical role in G1 events, binds Nap1p, also involved in 60S ribosome biogenesis
5910; 6-phosphogluconate dehydrogenase (decarboxylating), catalyzes an NADPH regenerating reaction in the pentose phosphate pathway; required for growth on D-glucono-delta-lactone
5911; Single-stranded DNA endonuclease, cleaves single-stranded DNA during nucleotide excision repair to excise damaged DNA; subunit of Nucleotide Excision Repair Factor 3 (NEF3); homolog of human XPG protein
5912; Transporter, member of the ARN family of transporters that specifically recognize siderophore-iron chelates; responsible for uptake of iron bound to ferrirubin, ferrirhodin, and related siderophores
5913; Questionable ORF from MIPS
5914; Questionable ORF from MIPS
5915; ER membrane protein involved in the translocation of soluble secretory proteins and insertion of membrane proteins into the ER membrane; may also have a role in the stress response but has only partial functional overlap with WSC1-3
5916; Putative protein of unknown function, does not appear to be involved in monocarboxylic acid transport; green fluorescent protein (GFP)-fusion protein localizes to the vacuole
5917; Questionable ORF from MIPS
5918; Essential protein that interacts with proteasome components and has a potential role in proteasome substrate specificity; also copurifies with 66S pre-ribosomal particles
5919; Questionable ORF from MIPS
5920; Hypothetical protein
5921; Hypothetical protein
5922; Hypothetical protein
5923; Hypothetical protein
5924; Hypothetical protein
5925; Meiosis specific protein involved in DMC1-dependent meiotic recombination, forms heterodimer with Mei5p; proposed to be an assembly factor for Dmc1p
5926; Substrate-specific nuclear cofactor for exosome activity in the processing of stable RNAs; homolog of mammalian nuclear matrix protein C1D, which is involved in regulation of DNA repair and recombination
5927; Transcription factor that is activated by a MAP kinase signaling cascade, activates genes involved in mating or pseudohyphal/invasive growth pathways; cooperates with Tec1p transcription factor to regulate genes specific for invasive growth
5928; Transcription factor that is activated by a MAP kinase signaling cascade, activates genes involved in mating or pseudohyphal/invasive growth pathways; cooperates with Tec1p transcription factor to regulate genes specific for invasive growth
5929; Hexose transporter with moderate affinity for glucose, may function in accumulation of reserve carbohydrates during stress, expression induced by a decrease in growth rate, contains an extended N-terminal domain relative to other HXTs
5930; Endosomal protein of unknown function that contains a phox (PX) homology domain and binds to both phosphatidylinositol-3-phosphate (PtdIns(3)P) and proteins involved in ER-Golgi or vesicular transport
5931; Hypothetical protein
5932; Putative metalloprotease with similarity to the zinc carboxypeptidase family, required for normal cell wall assembly
5933; Aromatic aminotransferase, catalyzes the first step of tryptophan, phenylalanine, and tyrosine catabolism
5934; Identified by gene-trapping, microarray-based expression analysis, and genome-wide homology searching

### 5935; Homologous to PBI2

[0217] 5936; Daughter cell-specific secreted protein with similarity to glucanases, degrades cell wall from the daughter side causing daughter to separate from mother; expression is repressed by cAMP
5937; Protein of unknown function, required for spore formation
5938; Protein required for proper cell fusion and cell morphology; functions in a complex with Kel2p to negatively regulate mitotic exit, interacts with Tem1p and Lte1p; localizes to regions of polarized growth; potential Cdc28p substrate
5939; Protein required for proper cell fusion and cell morphology; functions in a complex with Kel2p to negatively regulate mitotic exit, interacts with Tem1p and Lte1p; localizes to regions of polarized growth; potential Cdc28p substrate
5940; Questionable ORF from MIPS
5941; Enolase II, a phosphopyruvate hydratase that catalyzes the conversion of 2-phosphoglycerate to phosphoenolpyruvate during glycolysis and the reverse reaction during gluconeogenesis; expression is induced in response to glucose

### 5942; ORF, Uncharacterized

### 5943; ORF, Uncharacterized

[0218] 5944; Hypothetical protein
5945; Alpha subunit of the heteromeric nascent polypeptide-associated complex (NAC) involved in protein sorting and translocation, associated with cytoplasmic ribosomes
5946; Putative protein of unknown function; green fluorescent protein (GFP)-fusion protein localizes to the cytoplasm; mRNA is enriched in Scp160p-associated mRNPs; YIL161W is a non-essential gene
5947; Myosin-like protein associated with the nuclear envelope, connects the nuclear pore complex with the nuclear interior; involved in the Tel1p pathway that controls telomere length
5948; Subunit Vb of cytochrome c oxidase, which is the terminal member of the mitochondrial inner membrane electron transport chain; predominantly expressed during anaerobic growth while its isoform Va (Cox5Ap) is expressed during aerobic growth
5949; Protein of unknown function, required for survival upon exposure to K1 killer toxin; involved in proteasome-dependent catabolite inactivation of fructose-1,6-bisphosphatase; contains CTLH domain
5950; Questionable ORF from MIPS
5951; Questionable ORF from MIPS
5952; Ubiquitin-protein ligase of the ER/nuclear envelope, required for degradation of Alpha2p and other proteins containing a Deg1 degradation signal; ssm4 mutation suppresses mRNA instability caused by an rna14 mutation
5953; Questionable ORF from MIPS
5954; Questionable ORF from MIPS
5955; Questionable ORF from MIPS
5956; GPI-anchored cell surface glycoprotein required for diploid pseudohyphal formation and haploid invasive growth, transcriptionally regulated by the MAPK pathway (via Ste12p and Tec1p) and the cAMP pathway (via Flo8p)
5957; Questionable ORF from MIPS
5958; Putative protein of unknown function; GFP-fusion protein localizes to mitochondria and native protein copurifies with mitochondria; interacts with Arh1p, a mitochondrial oxidoreductase; deletion mutant has a respiratory growth defect
5959; Hypothetical protein
5960; Hypothetical protein
5961; Hypothetical protein
5962; Hypothetical protein
5963; Hypothetical protein
5964; Hypothetical protein
5965; Mitochondrial elongation factor involved in translational elongation
5966; Mitochondrial elongation factor involved in translational elongation
5967; Putative K+/H+ antiporter
5968; Putative K+/H+ antiporter
5969; Protein of unknown function, green fluorescent protein (GFP)-fusion protein localizes to the cytoplasm and nucleus
5970; Hypothetical protein
5971; Hypothetical protein
5972; Putative protein of unknown function; expression induced in respiratory-deficient petite cells, in carbon-limited chemostat cultures, during meiosis, sporulation and after alpha factor treatment; similar to adjacent ORF, YJL038C
5973; Hypothetical protein
5974; Subunit of the cytosolic chaperonin Cct ring complex, related to Tcp1p, required for the assembly of actin and tubulins in vivo
5975; Component of the SSU processome, which is required for pre-18S rRNA processing, interacts with and controls the stability of Imp3p and Imp4p, essential for viability; similar to human Mpp10p
5976; ATP sulfurylase, catalyzes the primary step of intracellular sulfate activation, essential for assimilatory reduction of sulfate to sulfide, involved in methionine metabolism
5977; Hypothetical protein; open reading frame overlaps promoter and 5′ end of essential GPI14 gene encoding glycosylphosphatidylinositol-alpha 1,4 mannosyltransferase I involved in GPI anchor biosynthesis
5978; Hypothetical protein
5979; Hypothetical protein
5980; Hypothetical protein
5981; Hypothetical protein; open reading frame overlaps essential LSM8 gene encoding an snRNP protein required for RNA processing and splicing
5982; Helix-loop-helix protein that binds the motif CACRTG, which is present at several sites including MET gene promoters and centromere DNA element I (CDEI); required for nucleosome positioning at this motif; targets Isw1p to DNA
5983; Protein involved in bud-site selection and required for axial budding pattern; localizes with septins to bud neck in mitosis and may constitute an axial landmark for next round of budding; potential Cdc28p substrate
5984; Protein of unknown function, required for normal microtubule organization
5985; Protein of unknown function; may be involved in survival during stationary phase; substrate for the N-myristoyltransferase Nmt1p
5986; Protein of unknown function; may be involved in survival during stationary phase; substrate for the N-myristoyltransferase Nmt1p
5987; Protein of unknown function; may be involved in mitochondrial DNA maintenance; required for slowed DNA synthesis-induced filamentous growth
5988; Hypothetical protein
5989; Putative protein of unknown function; green fluorescent protein (GFP)-fusion protein localizes to the cytoplasm
5990; Putative protein of unknown function; green fluorescent protein (GFP)-fusion protein localizes to the cytoplasm
5991; Putative aryl-alcohol dehydrogenase with similarity to P. chrysosporium aryl-alcohol dehydrogenase; mutational analysis has not yet revealed a physiological role
5992; Protein of unknown function with similarity to hexose transporter family members, expression is repressed by high levels of glucose
5993; Putative protein of unknown function; green fluorescent protein (GFP)-fusion protein localizes to the cytoplasm
5994; Putative positive regulator of mannosylphosphate transferase (Mnn6p), involved in mannosylphosphorylation of N-linked oligosaccharides; expression increases in late-logarithmic and stationary growth phases
5995; Essential protein required for the maturation of 25S rRNA and 60S ribosomal subunit assembly, localizes to the nucleolus; constituent of 66S pre-ribosomal particles
5996; Essential protein required for the maturation of 25S rRNA and 60S ribosomal subunit assembly, localizes to the nucleolus; constituent of 66S pre-ribosomal particles
5997; Essential protein required for the maturation of 25S rRNA and 60S ribosomal subunit assembly, localizes to the nucleolus; constituent of 66S pre-ribosomal particles
5998; RNA lariat debranching enzyme, involved in intron turnover; required for efficient Ty1 transposition
5999; Dubious open reading frame, unlikely to encode a protein; not conserved in closely related Saccharomyces species; partially overlaps the verified gene AVT36000; One of six ATPases of the 19S regulatory particle of the 26S proteasome involved in the degradation of ubiquitinated substrates; required for optimal CDC20 transcription; interacts with Rpn12p and the E3 ubiquitin-protein ligase Ubr1p
6001; Protein required for growth at low temperature
6002; Protein required for growth at low temperature
6003; Hypothetical protein
6004; Putative protein of unknown function
6005; Putative protein of unknown function
6006; Putative protein of unknown function; identified by homology to uncharacterized proteins in other fingi
6007; Predicted phosphopantothenoylcysteine decarboxylase, may be involved in coenzyme A biosynthesis; interacts with Sis2p and Vhs3p
6008; Predicted phosphopantothenoylcysteine decarboxylase, may be involved in coenzyme A biosynthesis; interacts with Sis2p and Vhs3p
6009; Essential protein, constituent of 66S pre-ribosomal particles; interacts with proteins involved in ribosomal biogenesis and cell polarity; member of the SURF-6 family
6010; Subunit C of the eight-subunit V1 peripheral membrane domain of vacuolar H+-ATPase (V-ATPase), an electrogenic proton pump found throughout the endomembrane system; required for the V1 domain to assemble onto the vacuolar membrane
6011; Protein involved in early pre-mRNA splicing; component of the pre-mRNA-U1 snRNP complex, the commitment complex; interacts with Msl5p/BBP splicing factor and Sub2p; similar to metazoan splicing factor U2AF65
6012; Protein involved in early pre-mRNA splicing; component of the pre-mRNA-U1 snRNP complex, the commitment complex; interacts with Msl5p/BBP splicing factor and Sub2p; similar to metazoan splicing factor U2AF65
6013; RNAPII degradation factor, forms a complex with Rad26p in chromatin, enables ubiquitination and proteolysis of RNAPII present in an elongation complex
6014; Centromere protein that resembles histones, required for proper kinetochore function; homolog of human CENP-A
6015; Subunit of DNA primase, which is required for DNA synthesis and double-strand break repair
6016; Dubious open reading frame, unlikely to encode a protein; not conserved in closely related Saccharomyces species; partially overlaps the essential gene UGP1 gene and uncharacterized ORF YKL037W
6017; GTPase, similar to Ypt51p and Ypt53p and to mammalian rab5; required for vacuolar protein sorting and endocytosis
6018; Putative protein of unknown function
6019; Protein that forms a complex with the Sit4p protein phosphatase and is required for its function; member of a family of similar proteins including Sap4p, Sap155p, and Sap185p
6020; Phospholipase D, catalyzes the hydrolysis of phosphatidylcholine, producing choline and phosphatidic acid; involved in Sec14p-independent secretion; required for meiosis and spore formation; differently regulated in secretion and meiosis
6021; Negative regulator of genes in multiple nitrogen degradation pathways; expression is regulated by nitrogen levels and by Gln3p; member of the GATA-binding family, forms homodimers and heterodimers with Deh1p

### 6022; ORF, Dubious

### 6023; ORF, Dubious

[0219] 6024; Component of Dam1p complex, important for spindle and kinetochore integrity; localized to nuclear side of spindle pole body and along mitotic spindle
6025; Hypothetical protein
6026; Myosin-like protein associated with the nuclear envelope, connects the nuclear pore complex with the nuclear interior; involved with Tel1p in telomere length control; involved with Pml1p and Pml39p in nuclear retention of unspliced mRNAs
6027; Lectin-like protein with similarity to Flo1p, thought to be involved in flocculation
6028; Lectin-like protein with similarity to Flo1p, thought to be involved in flocculation
6029; Hypothetical protein
6030; E2-like conjugating enzyme that mediates formation of the Atg12p-Atg5p conjugate, which is a critical step in autophagy
6031; Protein required for cytochrome c oxidase assembly, located in the cytosol and mitochondrial intermembrane space; putative copper metallochaperone that delivers copper to cytochrome c oxidase
6032; Essential subunit of the U3 (box C+D) snRNP complex required for 2′ O-methylation of pre-RNA; has similarity to the beta subunit of trimeric G-proteins and the splicing factor Prp4p
6033; Essential subunit of the U3 (box C+D) snRNP complex required for 2′ O-methylation of pre-RNA; has similarity to the beta subunit of trimeric G-proteins and the splicing factor Prp4p
6034; Subunit of the COMPASS (Set1C) complex, which methylates histone H3 on lysine 4 and is required in transcriptional silencing near telomeres; has similarity to the trithorax-group protein ASH2L
6035; Cytoplasmic ubiquitin-protein ligase (E3)
6036; Cytoplasmic ubiquitin-protein ligase (E3)
6037; Hypothetical protein
6038; Protein required for fermentation at low temperature
6039; Subunit of the GPI (glycosylphosphatidylinositol):protein transamidase complex, removes the GPI-anchoring signal and attaches GPI to proteins in the ER
6040; Cell wall protein, mutants are defective in mating and agglutination, expression is downregulated by alpha-factor
6041; Mitogen-activated protein kinase involved in osmoregulation via three independent osmosensors; mediates the recruitment and activation of RNA Pol II at Hot1p-dependent promoters; localization regulated by Ptp2p and Ptp3p
6042; Mutation is synthetically lethal with apl2 vps1 double mutant
6043; Essential splicesome assembly factor; contains multiple tetratricopeptide repeat (TPR) protein-binding motifs and interacts specifically with many spliceosome components, may serve as a scaffold during splicesome assembly
6044; Essential splicesome assembly factor; contains multiple tetratricopeptide repeat (TPR) protein-binding motifs and interacts specifically with many spliceosome components, may serve as a scaffold during splicesome assembly
6045; Essential splicesome assembly factor; contains multiple tetratricopeptide repeat (TPR) protein-binding motifs and interacts specifically with many spliceosome components, may serve as a scaffold during splicesome assembly
6046; YLR164Wp is homologous to TIM18p
6047; Cytosolic NADP-specific isocitrate dehydrogenase, catalyzes oxidation of isocitrate to alpha-ketoglutarate; levels are elevated during growth on non-fermentable carbon sources and reduced during growth on glucose
6048; Multivesicular body (MVB) protein involved in endosomal protein sorting; binds to Vps20p and Vps4p; may regulate Vps4p function; binds Vps60p and may act at a late step in MVB formation; mutants show class E vacuolar-protein sorting defects
6049; Half-type ATP-binding cassette (ABC) transporter of the inner mitochondrial membrane, mediates export of peptides generated upon proteolysis of mitochondrial proteins, plays a role in the regulation of cellular resistance to oxidative stress
6050; Hypothetical protein
6051; Mitochondrial protein of unknown function
6052; Mitochondrial protein of unknown function
6053; Putative glycoside hydrolase of the spore wall envelope; required for normal spore wall assembly, possibly for cross-linking between the glucan and chitosan layers; expressed during sporulation
6054; Structural component of the meiotic outer plaque, which is a membrane-organizing center that assembles on the cytoplasmic face of the spindle pole body during meiosis II and triggers the formation of the prospore membrane
6055; Hypothetical protein
6056; Hypothetical protein
6057; Protein of unknown function, overproduction suppresses a pam1 slv3 double null mutation
6058; Hypothetical protein
6059; Protein of unknown function, localizes to the nucleus; potential Cdc28p substrate
6060; Hypothetical protein
6061; Hypothetical protein
6062; Hypothetical protein
6063; Hypothetical protein
6064; Protein component of the large (60S) ribosomal subunit, has similarity to rat L38 ribosomal protein
6065; Hypothetical protein
6066; Protein required for synaptonemal complex formation, may have a role in meiotic recombination; localizes to synapsis initiation sites on meiotic chromosomes; potential Cdc28p substrate
6067; Transcription factor that controls expression of many ribosome biogenesis genes in response to nutrients and stress, regulates G2/M transitions during mitotic cell cycle and DNA-damage response, involved in cell size modulation
6068; Transcription factor that controls expression of many ribosome biogenesis genes in response to nutrients and stress, regulates G2/M transitions during mitotic cell cycle and DNA-damage response, involved in cell size modulation
6069; Identified by fungal homology and RT-PCR
6070; Protein of unknown function; green fluorescent protein (GFP)-fusion protein localizes to the cell periphery
6071; Peripheral membrane protein, required for autophagy and for the cytoplasm-to-vacuole targeting (Cvt) pathway
6072; Identified by gene-trapping, microarray-based expression analysis, and genome-wide homology searching
6073; L-ornithine transaminase (OTAse), catalyzes the second step of arginine degradation, expression is dually-regulated by allophanate induction and a specific arginine induction process; not nitrogen catabolite repression sensitive
6074; Hypothetical protein
6075; One of two orotate phosphoribosyltransferase isozymes (see also URA10) that catalyze the fifth enzymatic step in de novo biosynthesis of pyrimidines, converting orotate into orotidine-5′-phosphate
6076; Hypothetical protein
6077; Protein component of mitochondrial RNase P, along with the mitochondrially-encoded RNA subunit RPM1; Rnase P removes 5′ extensions from tRNA precursors; Rpm2p is also involved in maturation of RPMI and in translation of mitochondrial mRNAs
6078; Protein component of mitochondrial RNase P, along with the mitochondrially-encoded RNA subunit RPM1; Rnase P removes 5′ extensions from tRNA precursors; Rpm2p is also involved in maturation of RPMI and in translation of mitochondrial mRNAs
6079; F-box receptor protein, subunit of the Skp1-Cdc53-F-box receptor (SCF) E3 ubiquitin ligase complex; binds to phosphorylated Ho endonuclease, allowing its ubiquitylation by SCF and subsequent degradation
6080; One of two isozymes of HMG-CoA reductase that catalyzes the conversion of HMG-CoA to mevalonate, which is a rate-limiting step in sterol biosynthesis; localizes to the nuclear envelope; overproduction induces the formation of karmellae 6081; Dihydroxyacetone kinase, required for detoxification of dihydroxyacetone (DHA); involved in stress adaptation
6082; Hypothetical protein
6083; Questionable ORF from MIPS
6084; tRNA methyltransferase, catalyzes the esterification of modified uridine nucleotides in tRNAs, creating 5-methylcarbonylmethyluridine in tRNA(Arg3) and 5-methylcarbonylmethyl-2-thiouridine in tRNA(Glu); may have a role in stress response
6085; Hypothetical protein
6086; Phospholipase B (lysophospholipase) involved in phospholipid metabolism; displays transacylase activity in vitro; overproduction confers resistance to lysophosphatidylcholine
6087; Hypothetical protein
6088; Hypothetical protein
6089; Protein required for expression of the mitochondrial OLI1 gene encoding subunit 9 of F1-F0 ATP synthase
6090; Component of a complex containing the Tor2p kinase and other proteins, which may have a role in regulation of cell growth
6091; Serine-rich, hydrophilic protein with similarity to Mbr1p; overexpression suppresses growth defects of hap2, hap3, and hap4 mutants; expression is under glucose control; cotranscribed with NAM7 in a cyp1 mutant
6092; Protein of unknown function; green fluorescent protein (GFP)-fusion protein localizes to the cell periphery
6093; Hypothetical protein
6094; Protein component of the large (60S) ribosomal subunit, nearly identical to Rpl15Ap and has similarity to rat L15 ribosomal protein; binds to 5.8 S rRNA
6095; Hypothetical protein
6096; Hypothetical protein
6097; Hypothetical protein
6098; Protein required for normal transcription at several loci including HTA2-HTB2 and HHF2-HHT2, but not required at the other histone loci; functionally related to Spt10p
6099; RNA 5′-triphosphatase, localizes to both the nucleus and cytoplasm
6100; Nucleolar DNA helicase of the RecQ family involved in maintenance of genome integrity, regulates chromosome synapsis and meiotic crossing over; has similarity to human BLM and WRN helicases implicated in Bloom and Werner syndromes
6101; Phosphomevalonate kinase, an essential cytosolic enzyme that acts in the biosynthesis of isoprenoids and sterols, including ergosterol, from mevalonate
6102; Hypothetical protein
6103; Coiled-coiled protein of unknown function, identified as a high-copy suppressor of a dbp5 mutation
6104; Hypothetical protein
6105; Identified by gene-trapping, microarray-based expression analysis, and genome-wide homology searching
6106; Protein that interacts with silencing proteins at the telomere, involved in transcriptional silencing; has a role in localization of Bcy1p, a regulatory subunit of protein kinase A; implicated in mRNA nuclear export
6107; 2′-O-ribosyl phosphate transferase, modifies the initiator methionine tRNA at position 64 to distinguish it from elongator methionine tRNA
6108; Protein involved in 5.8S rRNA processing; Ccr4p-like RNase required for correct
3′-end formation of 5.8S rRNA at site E; similar to Ngl1p and Ngl3p
6109; Component of the yeast dynactin complex, consisting of Nip100p, Jnm1p, and Arp1p; required for proper nuclear migration and spindle partitioning during mitotic anaphase B
6110; Putative aryl-alcohol dehydrogenase with similarity to P. chrysosporium aryl-alcohol dehydrogenase; mutational analysis has not yet revealed a physiological role
6111; Glycosylphosphatidylinositol (GPI)-anchored cell wall endoglucanase required for proper cell separation after cytokinesis, expression is activated by Swi5p and tightly regulated in a cell cycle-dependent manner
6112; Hypothetical protein
6113; Hypothetical protein
6114; GTPase-activating protein for Sec4p and several other Rab GTPases, regulates exocytosis via its action on Sec4p, also required for proper actin organization; similar to Msb4p; both Msb3p and Msb4p localize to sites of polarized growth
6115; Subunit of heteropentameric Replication factor C(RF-C), which is a DNA binding protein and ATPase that acts as a clamp loader of the proliferating cell nuclear antigen (PCNA) processivity factor for DNA polymerases delta and epsilon
6116; Subunit of both RNase MRP, which cleaves pre-rRNA, and nuclear RNase P, which cleaves tRNA precursors to generate mature 5′ ends
6117; Hypothetical protein
6118; Subtilisin-like protease (proprotein convertase), a calcium-dependent serine protease involved in the activation of proproteins of the secretory pathway
6119; Hypothetical protein
6120; Phosphatidylinositol transfer protein (PITP) controlled by the multiple drug resistance regulator Pdr1p, localizes to lipid particles and microsomes, controls levels of various lipids, may regulate lipid synthesis, homologous to Pdr17p
6121; Nuclear protein of unknown function; deletion results in sensitivity to anticancer drugs oxaliplatin and cisplatin, but not mitomycin C; deletion is synthetically lethal with a chitin synthase (CHS1) null mutant
6122; Hypothetical protein
6123; Chitin synthase I, requires activation from zymogenic form in order to catalyze the transfer of N-acetylglucosamine (GlcNAc) to chitin; required for repairing the chitin septum during cytokinesis; transcription activated by mating factor
6124; Karyopherin alpha homolog, forms a dimer with karyopherin beta Kap95p to mediate import of nuclear proteins, binds the nuclear localization signal of the substrate during import; may also play a role in regulation of protein degradation
6125; Essential protein involved in karyogamy during mating and in spindle pole body duplication during mitosis, localizes to the half-bridge of the spindle pole body, interacts with Spc72p during karyogamy, also interacts with Cdc31p
6126; Protein kinase that stabilizes several plasma membrane amino acid transporters by antagonizing their ubiquitin-mediated degradation
6127; Hypothetical protein
6128; Hypothetical protein
6129; Hypothetical protein; open reading frame extensively overlaps essential RPC19 gene encoding an RNA polymerase subunit
6130; Hypothetical protein
6131; Hypothetical protein
6132; Protein localized in the bud neck at G2/M phase; physically interacts with septins; possibly involved in a mitotic signaling network
6133; Putative chaperone of the HSP40 (DNAJ) family; overexpression interferes with propagation of the [Psi+] prion
6134; Cell wall protein related to glucanases, possibly involved in cell wall septation; member of the SUN family
6135; S-adenosylmethionine-dependent Methyltransferase; methylates translational release factor Mrf1p; similar to E. coli PrmC; is not an essential gene
6136; Subunit of tRNA (1-methyladenosine) methyltransferase with Gcd14p, required for the modification of the adenine at position 58 in tRNAs, especially tRNAi-Met; first identified as a negative regulator of GCN4 expression
6137; Probable RNA m(5)C methyltransferase, essential for processing and maturation of 27S pre-rRNA and large ribosomal subunit biogenesis; localized to the nucleolus; constituent of 66S pre-ribosomal particles
6138; Hypothetical protein
6139; Hypothetical protein
6140; Hypothetical protein
6141; Hypothetical protein
6142; Hypothetical protein
6143; MAP kinase kinase kinase of the HOG1 mitogen-activated signaling pathway; interacts with Ssk1p, leading to autophosphorylation and activation of Ssk2p which phosphorylates Pbs2p; also mediates actin cytoskeleton recovery from osmotic stress
6144; Hypothetical protein
6145; Component of the Paf1p complex, which is a large complex that binds to and modulates the activity of RNA polymerase II and is required for expression of a subset of genes, including cyclin genes; contains TPR repeats
6146; Hypothetical protein; open reading frame extensively overlaps essential HRT1 gene encoding a subunit of Skp1-Cullin-F-box ubiquitin protein ligases
6147; Cytoplasmic malate dehydrogenase, one of the three isozymes that catalyze interconversion of malate and oxaloacetate; involved in gluconeogenesis during growth on ethanol or acetate as carbon source; interacts with Pck1p and Fbp1p
6148; Cytoplasmic malate dehydrogenase, one of the three isozymes that catalyze interconversion of malate and oxaloacetate; involved in gluconeogenesis during growth on ethanol or acetate as carbon source; interacts with Pck1p and Fbp1p
6149; Membrane protein involved in zinc metabolism, member of the four-protein IZH family, expression induced by fatty acids and altered zinc levels; deletion reduces sensitivity to excess zinc; possible role in sterol metabolism
6150; Hypothetical protein identified by homology. See FEBS Letters [2000] 487:31-36.
6151; Hypothetical protein
6152; Bisphosphate-3′-nucleotidase, involved in salt tolerance and methionine biogenesis; dephosphorylates 3′-phosphoadenosine-5′-phosphate and 3′-phosphoadenosine-5′-phosphosulfate, intermediates of the sulfate assimilation pathway
6153; Protein required for normal mitochondrial morphology, has similarity to hemolysins
6154; NAD-dependent glycerol 3-phosphate dehydrogenase, homolog of Gpd1p, expression is controlled by an oxygen-independent signaling pathway required to regulate metabolism under anoxic conditions; located in cytosol and mitochondria
6155; S-adenosylmethionine decarboxylase, required for the biosynthesis of spermidine and spermine; cells lacking Spe2p require spermine or spermidine for growth in the presence of oxygen but not when grown anaerobically
6156; One of two (see also PSK1) PAS domain containing S/T protein kinases; regulates sugar flux and translation in response to an unknown metabolite by phosphorylating Ugp1p and Gsy2p (sugar flux) and Caf20p, Tif11p and Sro9p (translation)
6157; Hypothetical protein
6158; Cell wall mannoprotein of the Srp1p/Tip1p family of serine-alanine-rich proteins; expressed under anaerobic conditions and required for anaerobic growth; transcription is also induced by cold shock
6159; Hypothetical protein
6160; 5′-3′ exonuclease and flap-endonuclease involved in recombination, double-strand break repair and DNA mismatch repair; member of the Rad2p nuclease family, with conserved N and I nuclease domains
6161; 5′-3′ exonuclease and flap-endonuclease involved in recombination, double-strand break repair and DNA mismatch repair; member of the Rad2p nuclease family, with conserved N and I nuclease domains
6162; Ankyrin repeat-containing protein similar to Akr1p; member of a family of putative palmitoyltransferases containing an Asp-His-His-Cys-cysteine rich (DHHC-CRD) domain; possibly involved in constitutive endocytosis of Step 3p
6163; Mitochondrial protein required for normal abundance of mitochondrial cytochrome c (Cyc1p) and for mitochondrial osmotic stability; may be involved in regulating the activity of cytochrome c heme lyase (Cyc3p); potential Cdc28p substrate
6164; Glucosyl transferase, involved in N-linked glycosylation; adds glucose to the dolichol-linked oligosaccharide precursor prior to transfer to protein during lipid-linked oligosaccharide biosynthesis; similar to Alg6p
6165; Nexin-1 homolog required for localizing membrane proteins from a prevacuolar/late endosomal-compartment back to the late Golgi apparatus; structural component of the retromer membrane coat complex; forms a retromer subcomplex with Vps17p
6166; Cis-golgi GTPase-activating protein (GAP) for the Rab family members Ypt1p (in vivo) and for Ypt1p, Sec4p, Ypt7p, and Ypt51p (in vitro); involved in vesicle docking and fusion
6167; Component of small ribosomal subunit (SSU) processosome that contains U3 snoRNA; originally isolated as bud-site selection mutant that displays a random budding pattern
6168; Component of small ribosomal subunit (SSU) processosome that contains U3 snoRNA; originally isolated as bud-site selection mutant that displays a random budding pattern
6169; Protein that regulates the critical cell size required for passage through Start and commitment to cell division; may act upstream of SCB binding factor (SBF) and MCB binding factor (MBF); periodically expressed in G1
6170; Syntaxin-related protein required for vacuolar assembly; functions with Vam7p in vacuolar protein trafficking; member of the syntaxin family of proteins
6171; Elongation factor 2 (EF-2), also encoded by EFT2; catalyzes ribosomal translocation during protein synthesis; contains diphthamide, the unique posttranslationally modified histidine residue specifically ADP-ribosylated by diphtheria toxin
6172; Rho GTPase activating protein (RhoGAP), stimulates the intrinsic GTPase activity of Rho 1p, which plays a role in actin cytoskeleton organization and control of cell wall synthesis; structurally and functionally related to Sac7p
6173; Hypothetical protein
6174; Hypothetical protein
6175; Transcription repressor involved in regulation of flocculation-related genes, inhibits transcription by recruiting general corepressor Cyc8p-Tup1p to different promoters; negatively regulated by cAMP-dependent protein kinase A subunit Tpk2p
6176; Component of the meiotic outer plaque, a membrane-organizing center which is assembled on the cytoplasmic face of the spindle pole body during meiosis II and triggers the formation of the prospore membrane; potential Cdc28p substrate
6177; Regulatory subunit for Glc7p type-1 protein phosphatase (PP1), tethers Glc7p to Gsy2p glycogen synthase, binds Hsf1p heat shock transcription factor, required for induction of some HSF-regulated genes under heat shock
6178; Kinetochore-associated protein required for normal segregation of chromosomes in meiosis and mitosis; component of the FEAR regulatory network, which promotes Cdc14p release from the nucleolus during anaphase; potential Cdc28p substrate
6179; Subunit of the SAS complex (Sas2p, Sas4p, Sas5p), which acetylates free histones and nucleosomes and regulates transcriptional silencing; stimulates Sas2p HAT activity
6180; Subunit of heteropentameric Replication factor C(RF-C), which is a DNA binding protein and ATPase that acts as a clamp loader of the proliferating cell nuclear antigen (PCNA) processivity factor for DNA polymerases delta and epsilon
6181; Hypothetical protein; open reading frame overlaps 3′ end of essential RFC1 gene encoding a replication factor complex subunit
6182; Protein involved in nuclear migration, part of the dynein/dynactin pathway; targets dynein to microtubule tips, which is necessary for sliding of microtubules along bud cortex; synthetic lethal with bni1; homolog of human LIS1
6183; Hypothetical protein; open reading frame overlaps 5′ end of essential PLP2 gene
6184; Component of the U4/U6.U5 snRNP complex involved in pre-mRNA splicing via spliceosome; has homology to human SART-1 and to an S. pombe protein; snu66 null mutation confers cold-sensitivity but is not lethal at normal growth temperatures
6185; Component of the U4/U6.U5 snRNP complex involved in pre-mRNA splicing via spliceosome; has homology to human SART-1 and to an S. pombe protein; snu66 null mutation confers cold-sensitivity but is not lethal at normal growth temperatures
6186; Endoplasmic reticulum (ER)-resident membrane protein, overproduction induces enlargement of ER-like membrane structures and suppresses a temperature-sensitive sly1 mutation
6187; Hypothetical protein
6188; Hypothetical protein
6189; Hypothetical protein
6190; Hypothetical protein
6191; Putative metal transporter involved in mitochondrial iron accumulation; closely related to Mmt1p
6192; Hydrophilin of unknown function; stress induced (osmotic, ionic, oxidative, heat shock and heavy metals); regulated by the HOG pathway
6193; N-terminally acetylated protein component of the large (60S) ribosomal subunit, nearly identical to Rpl1Bp and has similarity to E. coli L1 and rat L10a ribosomal proteins; rpl1a rpl1b double null mutation is lethal
6194; GTPase, GTP-binding protein of the ARF family, component of COPII coat of vesicles; required for transport vesicle formation during ER to Golgi protein transport
6195; Hypothetical protein
6196; Hypothetical protein
6197; Hypothetical protein
6198; Hypothetical protein
6199; Hypothetical protein
6200; Delta adaptin-like subunit of the clathrin associated protein complex (AP-3); functions in transport of alkaline phosphatase to the vacuole via the alternate pathway, suppressor of loss of casein kinase 1 function
6201; Widely conserved NADPH oxidoreductase containing flavin mononucleotide (FMN), homologous to Oye2p with slight differences in ligand binding and catalytic properties; may be involved in sterol metabolism
6202; Widely conserved NADPH oxidoreductase containing flavin mononucleotide (FMN), homologous to Oye2p with slight differences in ligand binding and catalytic properties; may be involved in sterol metabolism
6203; Protein involved in DNA mismatch repair; form s a complex with Mlh1p to promote meiotic crossing-over; mammalian homolog is implicated mammalian microsatellite instability
6204; Hypothetical protein
6205; Hypothetical protein
6206; Mitochondrial inner membrane transporter, exports 2-oxoadipate and 2-oxoglutarate from the mitochondrial matrix to the cytosol for use in lysine and glutamate biosynthesis and in lysine catabolism
6207; RNAse; member of the T(2) family of endoribonucleases
6208; Conserved peptide N-glycanase required for deglycosylation of misfolded glycoproteins during proteasome-dependent degradation, localizes to the cytoplasm and nucleus, interacts with the DNA repair protein Rad23p
6209; Conserved peptide N-glycanase required for deglycosylation of misfolded glycoproteins during proteasome-dependent degradation, localizes to the cytoplasm and nucleus, interacts with the DNA repair protein Rad23p
6210; Protein component of the small (40S) ribosomal subunit; identical to Rps6 Bp and has similarity to rat S6 ribosomal protein
6211; COPII vesicle coat protein required for ER transport vesicle budding and autophagosome formation; Sec16p is bound to the periphery of ER membranes and may act to stabilize initial COPII complexes; interacts with Sec23p, Sec24p and Sec31p
6212; Essential abundant protein involved in regulation of transcription, removes Spt15p (TBP) from DNA via its C-terminal ATPase activity, forms a complex with TBP that binds TATA DNA with high affinity but with altered specificity
6213; Hypothetical protein
6214; Hypothetical protein
6215; Regulatory protein of unknown function, constitutively-expressed, involved in the regulation of mating-specific genes and the invasive growth pathway, required for MAP-kinase imposed repression, inhibits pheromone-responsive transcription
6216; Regulatory protein of unknown function, constitutively-expressed, involved in the regulation of mating-specific genes and the invasive growth pathway, required for MAP-kinase imposed repression, inhibits pheromone-responsive transcription
6217; Hypothetical protein
6218; Plasma membrane H+-ATPase, isoform of Pma1p, involved in pumping protons out of the cell; regulator of cytoplasmic pH and plasma membrane potential
6219; Isozyme of methylenetetrahydrofolate reductase, catalyzes the reduction of 5,10-methylenetetrahydrofolate to 5-methyltetrahydrofolate in the methionine biosynthesis pathway
6220; Hypothetical protein identified by homology. See FEBS Letters [2000] 487:31-36.
6221; Largest subunit (p90) of the Chromatin Assembly Complex (CAF-I) with Cac2p and Msi1p that assembles newly synthesized histones onto recently replicated DNA; involved in the maintenance of transcriptionally silent chromatin
6222; Hypothetical protein
6223; Hypothetical protein
6224; Hypothetical protein
6225; Hypothetical protein identified by homology. See FEBS Letters [2000] 487:31-36.
6226; Protein of unknown function, overproduction blocks cell cycle arrest in the presence of mating pheromone
6227; Translational elongation factor EF-1 alpha; also encoded by TEF2; functions in the binding reaction of aminoacyl-tRNA (AA-tRNA) to ribosomes
6228; Zinc cluster protein involved in pre-mRNA splicing and cycloheximide resistance
6229; component of NineTeen complex (NTC) containing Prp19p involved in mRNA splicing, interacts physically and genetically with Pip19p
6230; Essential conserved protein that associates with 35S precursor rRNA and is required for its initial processing at the A(0)-A(2) cleavage sites, shows partial nucleolar localization, contains five consensus RNA-binding domains
6231; Hypothetical protein
6232; Cytoplasmic protein of unknown function involved in vacuolar protein sorting.
6233; Hypothetical protein; open reading frame overlaps 5′ end of essential RRP15 gene required for ribosomal RNA processing
6234; Identified by fungal homology and RT-PCR
6235; Identified by expression profiling and mass spectrometry
6236; Subunit of a possibly tetrameric trichostatin A-sensitive class II histone deacetylase complex that contains an Hda1p homodimer and an Hda2p-Hda3p heterodimer; required for the activity of the complex; has similarity to Hda2p

### (SEQ ID NOs.: 166154-166181)

[0220] 166154; Subunit I of cytochrome c oxidase, which is the terminal member of the mitochondrial inner membrane electron transport chain; one of three mitochondrially-encoded subunits
166155; Reverse transcriptase required for splicing of the COX1 pre-mRNA, encoded by a mobile group II intron within the mitochondrial COX1 gene
166156; Cytochrome b, mitochondrially encoded subunit of the ubiquinol-cytochrome c reductase complex which includes Cobp, Rip1p, Cyt1p, Cor1p, Qcr2p, Qcr6p, Qcr7p, Qcr8p, Qcr9p, and Qcr10p
166157; Subunit 8 of the F0 sector of mitochondrial inner membrane F1-F0 ATP synthase, encoded on the mitochondrial genome
166158; Mitochondrially encoded subunit 6 of the F0 sector of mitochondrial F1F0 ATP synthase, which is a large, evolutionarily conserved enzyme complex required for ATP synthesis
166159; F0-ATP synthase subunit 9 (ATPase-associated proteolipid), encoded on the mitochondrial genome; mutation confers oligomycin resistance; expression is specifically dependent on the nuclear genes AEP1 and AEP2
166160; Mitochondrial ribosomal protein of the small subunit, mitochondrially-encoded; polymorphic in different strains due to variation in number of AAT (asparagine) codons; translated near the mitochondrial inner membrane
166161; Subunit III of cytochrome c oxidase, which is the terminal member of the mitochondrial inner membrane electron transport chain; one of three mitochondrially-encoded subunits
166162; Intron within the mitochondrial COX1 gene
166163; Intron within the mitochondrial COX1 gene
166164; Intron within the mitochondrial COX1 gene
166165; Intron within the mitochondrial COB1 gene
166166; Hypothetical protein

### 166167; Identified by MPSS

### 166168; Identified by MPSS

### 166169; Identified by MPSS

### 166170; Identified by MPSS

### 166171; Identified by MPSS

### 166172; Identified by MPSS

### 166173; Identified by MPSS

### 166174; Identified by MPSS

### 166175; Identified by MPSS

### 166176; Identified by MPSS

### 166177; Identified by MPSS

### 166178; Identified by MPSS

### 166179; Identified by MPSS

### 166180; Identified by MPSS

### 166181; Identified by MPSS

### INDUSTRIAL APPLICABILITY

[0221] Since the method of the present invention allows efficient identification of genes associated with desired brewing characteristics and proteins encoded by the genes, the present method is useful for comprehensive function analysis of translation products of the genes contained in the genome of the bottom fermenting yeast.

[0222] The present invention is also useful for the production of alcohol or alcoholic beverages having improved productivity and quality, since the present invention allows control of brewing characteristics of the yeast by genetically disrupting the gene and/or by making the gene to be expressed in a high level.

1. A method for identifying a target protein of yeast or a gene encoding the target protein comprising the steps of:
(a) cultivating yeast under a predetermined cultivation condition;
(b) extracting a protein sample from the cultivation product of the yeast;
(c) separating the protein sample by a protein separation means, selecting a target peak or spot, and recovering the target protein or a fragment thereof contained in the peak or spot;
(d) determining the amino acid sequence of the target protein;
(e) comparing the amino acid sequence determined in step (d) with the amino acid sequence determined in advance based on all or a part of genome sequence information of bottom fermenting yeast;
(f) identifying the target protein and the gene encoding the target protein based on the results of comparison; and
(g) analyzing functions of the identified gene to identify characters given to the yeast by the gene.

2. A method for identifying a target protein of yeast or a gene encoding the target protein comprising the steps of:
(1) referring to a database comprising all or a part of genome sequence information of bottom fermenting yeast based on the amino acid sequence of the target protein of the yeast;
(2) identifying a gene encoding the target protein based on the result of reference; and
(3) analyzing functions of the identified gene to identify characters given to the yeast by the gene.

3. A method for identifying a target protein of yeast or a gene encoding the target protein comprising the steps of:
(1) separating one or more proteins from a protein extract derived from the yeast and determining the amino acid sequences of the one or more proteins;
(2) referring to a database comprising all or a part of genome sequence information of bottom fermenting yeast based on the amino acid sequence of the one or more proteins;
(3) identifying a gene encoding the one or more proteins based on the results of reference; and
(4) analyzing functions of the identified gene to identify characters given to the yeast by the gene.

4. A method for identifying a target protein of yeast or a gene encoding the target protein comprising the steps of:
(1) cultivating yeast under a predetermined cultivation condition;
(2) extracting a protein sample from cultivated products of the yeast;
(3) determining the amino acid sequence of the one or more proteins contained in the protein sample;
(4) comparing the amino acid sequence determined in step (3) with the amino acid sequence determined in advance based on all or a part of genome sequence information of bottom fermenting yeast;
(5) identifying the gene encoding the target protein based on the results of comparison; and
(6) analyzing functions of the identified gene to identify characters given to the yeast by the gene.

5. A method for identifying a target protein of yeast or a gene encoding the target protein comprising the steps of:
(1) cultivating the same strain of yeast under different cultivation conditions;
(2) extracting a protein sample from each cultivation product obtained in step (1);
(3) analyzing the protein sample and identifying a highly expressed or low expressed protein under each cultivation condition;
(4) determining the amino acid sequence of the protein identified in step (3);
(5) comparing the amino acid sequence determined in step (4) with the amino acid sequence determined in advance based on all or a part of genome sequence information of bottom fermenting yeast;
(6) identifying the gene encoding the target protein based on the results of comparison; and
(7) analyzing functions of the identified gene to identify characters given to the yeast by the gene.

6. A method for identifying a target protein of yeast or a gene encoding the target protein comprising the steps of:
(1) cultivating different strains of yeast under the same cultivation condition;
(2) extracting a protein sample from each cultivation product obtained in step (1);
(3) analyzing the protein sample and identifying a protein whose expression level is different in each cultivation product;
(4) determining the amino acid sequence of the protein identified in step (3);
(5) comparing the amino acid sequence determined in step (4) with the amino acid sequence determined in advance based on all or a part of genome sequence information of the bottom fermenting yeast;
(6) identifying the gene encoding the target protein based on the results of comparison; and
(7) analyzing functions of the identified gene to identify characters given to the yeast by the gene.

7. The method according to claim 1, wherein all or a part of the genome sequence information of the bottom fermenting yeast comprises the nucleotide sequences of:
SEQ ID Nos.: 33 to 6236,
SEQ ID Nos.: 75337 to 82784,
SEQ ID Nos.: 166154 to 166181,
SEQ ID Nos.: 166490 to 167042; and
SEQ ID Nos.: 173125 to 174603.

8. The method according to claim 1, wherein all or a part of the genome sequence information of the bottom fermenting yeast comprises two or more nucleotide sequences selected from:
SEQ ID Nos.: 33 to 6236,
SEQ ID Nos.: 75337 to 82784,
SEQ ID Nos.: 166154 to 166181,
SEQ ID Nos.: 166490 to 167042; and
SEQ ID Nos.: 173125 to 174603.

9. The method according to claim 1, wherein all or a part of the genome sequence information of the bottom fermenting yeast comprises the nucleotide sequences of SEQ ID Nos.: 33 to 6236.

10. The method according to claim 1, wherein all or a part of genome sequence information of the bottom fermenting yeast comprises two or more nucleotide sequences selected from SEQ ID Nos.: 33 to 6236.

11. The method according to claim 1, wherein all or a part of genome sequence information of the bottom fermenting yeast comprises nucleotide sequences of SEQ ID Nos.: 166154 to 166181.

12. The method according to claim 1, wherein all or a part of genome sequence information of the bottom fermenting yeast comprises two or more nucleotide sequences selected from SEQ ID Nos.: 166154 to 166181.

The application's sequence listing, which the Patent Office published only in electronic form, follows.

SEQUENCE LISTING (197034 sequences)

SEQ ID NO: 1 - DNA, 1377 bp, Saccharomyces sp.
atggtcgctagttggatgctcactgccacaagggatttcaaccctttcatgtttgtcatggttatgggggtcggtatttcatcgaatattctgtacagcttcccgtatccggcgaggtggctgaggatatgctcgtacatcatgtttgccattacatgtttgattttcatctctgtacaggcgctgcagcttttgcacatggtcatctatatcaaagaaaaaagctttagagattacttcaatgaatatttcagaagtctgaagtacaatttattttggggtacttatcccatgggattagtaacaatcataaattttttgggggcgctgtcacaaaaatttaccacgacaagccctgcgaatgccaagcacttgatcatttttgtttacgtcctgtggtggtatgacctcgcggtttgtttagtaaccgcttgggggatttcattcctcatctggcaaaagtactacttcgtggacggggttggaaatcactcttcatacagttcacgaatggcttccgaccacatgaaaagcgtactgttgctagatatcattccgctggtcgttgtcgcttcgagcggtgggacatttacaatgtcaaaaatattcggtaccacttttgataggaatattcaattgctaacactggtcatctgtgccctggtttggctacacgctcttatatttgtctttattctgattacaatatacttctggaatctttacatcaataagataccaccaatgacgcaggtatttacgttgttcttggtattggggccattgggccaaggaagttttggtattttgttgcttactgacaatataagaaagtatgtagaaaaatactacccaagggaaaacatcaccatggaacaagaaatactaaccattatggttccgtggtgtttcaaggttctgggcatgacatttgctttggcattaatcgctatgggttacttctttacggtaatttcccttatttcgattttatcatactacaatgaaagagttgttgacaatgaaacaggcaaagtgaaaaggatctacactttccataaaggtttctgggggatgactttcccgatgggtaccatgtctttgggaaacgaggagctgtatctgcaatacaaccagtatgttcccttatatgcattcagagtcatagctaccatatatggtggtatttgtgtttgctggtcaatcttatgcctctcgtgcacgttgtatggttacctgaaaacgattctccatgctgcccgtaaaccttcgtttttatcagaggaagggacggagaagactgtcaattctcctttcaacagcatcgaaagtgtggaggaatcaaactcggctatcgatagtacatatttaacataa

SEQ ID NO: 2 - DNA, 609 bp, Saccharomyces sp.
atggctactaatatcacttggcatccaaatcttacctacgacgaacgtaaggaattaagaaagcaagacggctgtaccgtttggttgaccggtctaagtgcgtcaggaaaaagtacaatagcttgtgcactggaacaattactgcttcaaaaaaacttatctgcttataggttagatggtgataacattcgttttggtttgaataaggatttgggcttctcagaaaaggacagaaatgaaaacattcgtagaattagtgaagtatccaagctattcgctgattcgtgtgctgtatccatcacttcatttatttccccatacagagtcgatagagacagagcccgtgatttacataaggaagcaggcttgaagttcattgaaatttttgttgatgttccattagaagtcgctgagcaaagagaccctaagggtttgtataagaaagccagagaaggtgtgattaaagagttcactggtatttcagctccttacgaagctccaaaggccccagagttgcatttaagaactgaccaaaagactgttgaagaatgtgctgctatcatttatgagtacctggtcaatgagaagattatccggaagcatctataa

SEQ ID NO: 3 - protein, 458 aa, Saccharomyces sp.
MVASWMLTATRDFNPFMFVMVMGVGISSNILYSFPYPARWLRICSYIMFAITCLIFISVQALQLLHMVIYIKEKSFRDYFNEYFRSLKYNLFWGTYPMGLVTIINFLGALSQKFTTTSPANAKHLIIFVYVLWWYDLAVCLVTAWGISFLIWQKYYFVDGVGNHSSYSSRMASDHMKSVLLLDIIPLVVVASSGGTFTMSKIFGTTFDRNIQLLTLVICALVWLHALIFVFILITIYFWNLYINKIPPMTQVFTLFLVLGPLGQGSFGILLLTDNIRKYVEKYYPRENITMEQEILTIMVPWCFKVLGMTFALALIAMGYFFTVISLISILSYYNERVVDNETGKVKRIYTFHKGFWGMTFPMGTMSLGNEELYLQYNQYVPLYAFRVIATIYGGICVCWSILCLSCTLYGYLKTILHAARKPSFLSEEGTEKTVNSPFNSIESVEESNSAIDSTYLT

SEQ ID NO: 4 - protein, 202 aa, Saccharomyces sp.
MATNITWHPNLTYDERKELRKQDGCTVWLTGLSASGKSTIACALEQLLLQKNLSAYRLDGDNIRFGLNKDLGFSEKDRNENIRRISEVSKLFADSCAVSITSFISPYRVDRDRARDLHKEAGLKFIEIFVDVPLEVAEQRDPKGLYKKAREGVIKEFTGISAPYEAPKAPELHLRTDQKTVEECAAIIYEYLVNEKIIRKHL

SEQ ID NO: 5 - DNA, 15 bp, Artificial Sequence
  Description of Artificial Sequence: Synthetic oligo M13_for
agtcacgacgttgta

SEQ ID NO: 6 - DNA, 17 bp, Artificial Sequence
  Description of Artificial Sequence: Synthetic oligo M13_rv
caggaaacagctatgac

SEQ ID NO: 7 - DNA, 22 bp, Artificial Sequence
  Description of Artificial Sequence: Synthetic oligo SS-cosF.1
aggcgtatcacgaggccctttc

SEQ ID NO: 8 - DNA, 29 bp, Artificial Sequence
  Description of Artificial Sequence: Synthetic oligo SS-cosR.1
cttatcgatgataagcggtcaaacatgag

SEQ ID NO: 9 - DNA, 36 bp, Artificial Sequence
  Description of Artificial Sequence: Synthetic oligo XVI-1(L)cer-95894
cgcaagctccgtacgttcaacattcttatgaacggc

SEQ ID NO: 10 - DNA, 36 bp, Artificial Sequence
  Description of Artificial Sequence: Synthetic oligo XVI-1(R)nonSc-106302rv
gcatcatcgtcgtgatccttctttggcaaatgcagg

SEQ ID NO: 11 - DNA, 36 bp, Artificial Sequence
  Description of Artificial Sequence: Synthetic oligo XVI-2(L)cer-859737
gcgggtattttgatggtaaatctacaagccctcggc

SEQ ID NO: 12 - DNA, 35 bp, Artificial Sequence
  Description of Artificial Sequence: Synthetic oligo XVI-2(R)nonSc-864595rv
cccagacacagtttccagtatcatcctcgcagaac

SEQ ID NO: 13 - DNA, 26 bp, Artificial Sequence
  Description of Artificial Sequence: Synthetic oligo SacI-nonScSSU1_for1
gagctcatggtcgctagttggatgct

SEQ ID NO: 14 - DNA, 26 bp, Artificial Sequence
  Description of Artificial Sequence: Synthetic oligo BglII-nonScSSU1_rv1460
agatctcagcttcagcccaatccatt

SEQ ID NO: 15 - DNA, 26 bp, Artificial Sequence
  Description of Artificial Sequence: Synthetic oligo SacI-ScSSU1_for1
gagctcatggttgccaattgggtact

SEQ ID NO: 16 - DNA, 26 bp, Artificial Sequence
  Description of Artificial Sequence: Synthetic oligo BglII-ScSSU1_rv1406
agatctctcctacatgaaatgcttgc

SEQ ID NO: 17 - DNA, 120 bp, Artificial Sequence
  Description of Artificial Sequence: Synthetic oligo nonScSSU1_for
atggtcgctagttggatgctcactgccacaagggatttcaaccctttcatatcgaatattctgtacagctgtttgtcatggttatgggggtcggtatttcccttgacagtcttgacgtgc

SEQ ID NO: 18 - DNA, 120 bp, Artificial Sequence
  Description of Artificial Sequence: Synthetic oligo nonScSSU1_rv
tgttaaatatgtactatcgatagccgagtttgattcctccacactttcgaacagtcttctccgtcccttcctctgataaatgctgttgaaaggagaattgcgcacttaacttcgcatctg

SEQ ID NO: 19 - DNA, 120 bp, Artificial Sequence
  Description of Artificial Sequence: Synthetic oligo ScSSU1_for
atggttgccaattgggtacttgctcttacgaggcagtttgaccccttcatgtttatgatggtcatgggtgtcggcatttcatcgaatattctatatagctccttgacagtcttgacgtgc

SEQ ID NO: 20 - DNA, 120 bp, Artificial Sequence
  Description of Artificial Sequence: Synthetic oligo ScSSU1_rv
ttatgctaaacgcgtaaaatctagagccgagtttgattcttccacgctttcaatgctgttatacggagaaactgtcgtcttttccgtacctgactctgaacgcacttaacttcgcatctg

SEQ ID NO: 21 - DNA, 120 bp, Artificial Sequence
  Description of Artificial Sequence: Synthetic oligo nonScSSU1_for
atggtcgctagttggatgctcactgccacaagggatttcaaccctttcatgtttgtcatggttatgggggtcggtatttcatcgaatattctgtacagctccggagcttaccagttctca

SEQ ID NO: 22 - DNA, 120 bp, Artificial Sequence
  Description of Artificial Sequence: Synthetic oligo nonScSSU1_rv?C
tgttaaatatgtactatcgatagccgagtttgattcctccacactttcgatgctgttgaaaggagaattgacagtcttctccgtcccttcctctgataaatcgactctagaggatccaga

SEQ ID NO: 23 - DNA, 20 bp, Artificial Sequence
  Description of Artificial Sequence: Synthetic oligo ScSSU1_for331
tcgaaagcgaacacgacgaa

SEQ ID NO: 24 - DNA, 21 bp, Artificial Sequence
  Description of Artificial Sequence: Synthetic oligo ScSSU1_982rv
cgacagaaatcacggtgaaaa

SEQ ID NO: 25 - DNA, 22 bp, Artificial Sequence
  Description of Artificial Sequence: Synthetic oligo nonScSSU1_329
tgtcacaaaaatttaccacgac

SEQ ID NO: 26 - DNA, 22 bp, Artificial Sequence
  Description of Artificial Sequence: Synthetic oligo nonScSSU1_981rv
aagggaaattaccgtaaagaag

SEQ ID NO: 27 - DNA, 21 bp, Artificial Sequence
  Description of Artificial Sequence: Synthetic oligo PDA1_for1
atgtttgtcgcacctgtatct

SEQ ID NO: 28 - DNA, 18 bp, Artificial Sequence
  Description of Artificial Sequence: Synthetic oligo PDA1_730rv
gattagaggcaccatcac

SEQ ID NO: 29 - DNA, 33 bp, Artificial Sequence
  Description of Artificial Sequence: Synthetic oligo SacI-nonSc-MET14_for-21
ctcgagctctcgtgaaattcattgaaacaaatg

SEQ ID NO: 30 - DNA, 30 bp, Artificial Sequence
  Description of Artificial Sequence: Synthetic oligo BamHI-nonSc-MET14_rv618
ggatccttataagatttatagatgcttccg

SEQ ID NO: 31 - DNA, 33 bp, Artificial Sequence
  Description of Artificial Sequence: Synthetic oligo SacI-ScMET14_for
ctcgagctcagaaaagttggaattatttctcca

SEQ ID NO: 32 - DNA, 30 bp, Artificial Sequence
  Description of Artificial Sequence: Synthetic oligo BamHI-ScMET14_rv
ggatccaatgtacagtaatcggtcaaatta

SEQ ID NO: 33 - DNA, 1254 bp, Saccharomyces pastorianus
atgagagcattggcatacttcggtaagggtgacatcaggttcaccaaccatctggaagagccccggatcgtggctcccgacgagcttgttctcgatatcgcatggtgcggtatttgcggtacggacctgcatgagtacacagacggtcccatcttcttcccagaggacgggcacacgaacgagatcagccacaacccattgcctcaggcaatgggccacgagatggcaggcactgttttaaaagtgggtcccggcgtgacgcagttcaaggtgggcgacaaggtggtcgttgagcccacgggtacgtgcagggaccgctaccgttggcccgactcaccaaacgtggacaaggagtggtgtgccgcgtgcaaaaggggcctctacaacatctgctcgtacttgggcctttgtggtgccggcgtgcagagtggtgggttcgcagagcgggtggtgataaacgagtcgcattgctacaaggtgcctgagttcgtgccattggacgttgctgctttgatccagccgttggccgtgtgctggcatgcgatcagcgtctgcgacttcaaagccgggtccactgctctgatcattggtgccggcccaatcggcctgggtaccattctagcactcaatgcggccggttgcagtgacattgccgtctcagagcctgctaaggtaagaagagagttggctgagaagatgggagctagggtgttcgacccgactgcgcacgccgctaaggacagtatcgaatatttgcggtcggtcgctcctggcggcgacggatacgactacactttcgactgctccgggctggaagttacgttgaatgcttccattcaatgtctgacgtttagaggcaccgccgtgaatctggccatgtggggccaccacaagatacagttctctccaatggacatcacgctgcatgagagaaagtacacggggtccatgtgctacactcaccatgacttcgaggcggtgatccaggctatggaagagcgcaggattgatgttgccaaggccagacacatgatcactggtagagtcagtctcgaagacggtcttaacggtgccatcatgaagctgataaacgaaaagcagtccaccatcaagattattctgactccgaacaatcacggcgaattggaaagagaaccggataacgaaaaggaagatatttccgaactcagcaactgcaaggaccaagaaagactcaaagagtccatgaacgaggccaagctgcgtcacacatga

SEQ ID NO: 34 - DNA, 1149 bp, Saccharomyces pastorianus
atgagagctttggcatattttaagaagggtgatattcatttcaccaatgatattcccaagccggaaatccaggccgacgatgaagtcatcctcgatgtctcctggtgtgggatttgcggttcggacttacacgaatacacggatgggccaatctttatgccgaaagatggggaatgccatcccctgtccagcgctgctttaccactggcaatgggacacgaaatgtccggtattatttcgaaagtggggcctaaagtgacaaaggtcaaagtgggcgaccatgtggtcgtcgaagccggtagttgttgtgccgatttgcattgctggccgcattcgaaacattacaattccaagccttgcgatgcctgcaagaagggctgtgagaacctttgtacacatgcaggtttcattgggctaggtgtgatcagtggtgggtttgctgaacaagtcgttgtcactgagcaccatatcatcccggtccccaaggaaatcccgttggatgtggctgccttagtggaacctttgtctgttacctggcacgcagtcaagctgtcaggcttccaaaaaggtagttcagcttcggttcttggtgcgggccctattgggttgtgtaccatcttggtactaaagggaatgggcgccggccagatagtggtctctgaagttgcagaaagaaggatggaaatggccagacgcctaggtgtcgagatttttgaccctaggaagcacggcgagaaatccgtggaagcactacgtggtttgaccaagagccacgacgggtttgattacagttatgactgttctggtattcaagctactttcgatgcctccttaaaagcattaacgtttaagggaactgccactaacattgcagtttggggcccaaatcctgtaccattccagccaatgaacgtcactcttcaagagaagataatcaccggttcgattggctatgtcgtcgatgattttgaagaggtcgtccaggcgattcacaacggtgacatcaccattgaagactgtaaccatttgattacaggtaagcagaaaatcgaagatggttgggaaaagggatttgaggaactaatgaaccataaggagtccaacgtcaagattctgttgactcccaacaatcacggtgaaatgaagtaa

SEQ ID NO: 35 - DNA, 537 bp, Saccharomyces pastorianus
atgacaccaggatcgagtagaaggctgagcaaatcaaaaacagtgggtgtagtgggtgcaacggtagcaattctagccacatcctattacctataccaaaaattaacaagcgtaaacgacactaacgatgccctgcctcgagaaagtgactcttcggccaaagacaaaacaacaaggaaaagcaaatgtattataatgagtaagtctgtccaagggctgtctatcgactggagcgaatacgttgctgacgaagtggttcttttggtccctacgagtcatactaacgaatcattcaaccgggtcatcaaggatgcgttctataactctgggaatgaacacaaggttatatactgcgatagtatggacggactatggtcttgtgtaagaaggttgcgcaagttccaatgcatactgaactctaaggactttgcgggtgatggtggcgctacgatcgttcctgaagatgtgcagagatttgtcaggttcgtcattgacagtgatgaggaagatgtgctagttgatacgatatgtagttga

SEQ ID NO: 36 - DNA, 2142 bp, Saccharomyces pastorianus
atgtctccctctgcagtacaatcttcgaaagcccaagagcagtcgagcaaaattgacgacttgaaagcacaaatgtccaagtccgccgccaccccagaacagaaaaagaaccacgaatacgaacatctgacatccgtcaagatcgtgccccagcggcccgtttctgataggttgcaacccgagattgcggaccattattctccgcacttgaatgggctgcaagattaccagcgcctgtacaagcagtccattgaagatccgggcaagttcttcggctccaaagccacccagtttttgaactggtccaagcccttcgacagggtgttcatcccggatccagaaactggcaggccctctttccagaacaatgcctggtttttgaacggccaattgaacgcgtgctataactgtgttgacaggcacgcgttcaagacgcccaacaagagggccatcatcttcgaggccgacgagccgggccagggctactccattacctacaagcagctgctcgaggaggtgtgccaagtggcgcaggttctatactactccatgggagtccgcaagggcgacaccgtcgcagtgtacatgcccatggtccccgaggctatcatcaccttgctggccatctcccgtatcggcgccattcattccgtggtctttgctgggttttcctccaactctttgagggaccgcatcaacgatggggactccaaagtcgtcatcaccactgatgagtctaacagaggcggcaaaatcatcgaaaccaagaggattgtcgacgacgcgctgagggaagcccctggtgtgagacacgtcttggtttataaaaagaccaataacccatctgttgccttccaggcccccagagatttggactgggccactgagaagaagaagtacaagacctactatccctgcactcccgtcgattctgaggaccctctattcttgctatatacttctggttccacaggcgcccccaagggtgttcagcactccaccgcaggctacttgctgggcgctctattgaccatgcgttacacttttgacacccaccaagaagatattttcttcactgcgggggacattggctggatcacaggccacacttacgtggtttacggtcccttgttgtacggctgtgccactttggtctttgaaggtactccggcctatcctgactattcccgttactgggatgttattgataaacataaagtcacccagttttacgtagcacctactgctttgcgtttgttgaaaagagccggcgactcgttcattgaaaaccattctttgaagtctttgcgctgtttaggctctgtcggagaaccgattgccgctgaagtttgggaatggtactctgaaaaaattggtaagaatgaaatccccattgtcgacacctactggcaaaccgaatctggctcgcatttggtcaccccactggctggcggtgtaacaccaatgaaacctggttctgcctcgttccccttcttcggtatcgatgcggttgtccttgatccaaccacaggtgaagaagtcaaatcctcccacgcagaaggtgtccttgccgtcaaatctgcatggccatcgtttgcaagaaccatttggaagaaccatgatagatatttagacacttatttgaatccttatcccggttattacttcacaggcgatggtgccgcaaaggacaaggatggttatatctggattttgggccgtgttgatgatgtggtaaatgtatccggacatcgtctatcaaccgctgagatagaagccgccatcatcgaggacccaatcgtggcggaatgtgctgtggtgggattcaatgatgacttgaccggtcaggcggtagccgcatttgtggtcttaaagaataaatctagttggtccacagcaacagaaagtgagctacaagatatcaaaaaacacttggttttcactgtcagaaaggacatcggtccatttgccgcccccaaactaatcatcttggtagacgatttacccaaaacaagatctggtaagattatgagacgtatcttgagaaaaattctagcaggagaaagcgatcaattaggcgacgtttctactttagccaaccctggcattgttagacatttgattgactcagtcaaactgtaa

SEQ ID NO: 37 - DNA, 2361 bp, Saccharomyces pastorianus
atgatccttctgaacacctttgtgaggtgccttttgacgtgtctcatgctctgcagtggcagagcacactccgctgattctgacacgaacgacacgacgccagcgtccgcaaagcatcttcagacaacttctttgctaacgtgcatggataactcgcaattaacagcttctttttttgatgtgaagttttaccctggaaacaacaccatcatctttgatatcgacgctaccacgacactgaacgggaacgtcactgtgaaggcggagctgcttgcctacgggctcaagatcctggacagaacttttgacttgtgttccctgaatgaagtgtcgctgtgccccctaagtgctgggcgtatcgatatcatgtccacgtatgtgatcgatgcctctattaccaagcagtttcccggcattgcgtacacgattccagatctggacgcccaggtccgtgtggtagcgtactcacaaaacgataccagtttcgaaacccctctcgcttgcgtgcaggccattctgagcaacgggaaaacagtgcagaccaagtatgcatcatggcccatcgctgccatctcaggtgttggtgtactcacttccgggttcgtgtctgtgatcggttactcctccaccgccacccatattgcctccaactcgatctcgctgttcatctactttcagaacttagccatcactgccatgatgggtgtttccagggtcccgcccatcgctgccgcatggacgcagaattttcaatggtcgatgggtatcatcaatgccggctttatgcagaagattttccactggtacgtgcaagccactaacggtgtttccaacgtcgtggtggccaacaaggacgtgttgtctatcagcgtgcagaaaaaacgtggtatctccgttgcctcgtctagcgattacaatttcgactccattctggatgactcgaatctgtacactacttccgaaaaggatccaagtgactactcgaccaagatcctcgtgctaagaggtattgaaagagtcgcatatttggcaaacatcgaactgtccaattttttcttgacagggattgttttcttcctgttctttgtcttcgttgttattgtttctttgattttcttcaaagccttactagaagtcctgacaagagccgggattttgaaagagacttccaatttcttccagtaccggaaaaactgggggagcattatcaagggtactcttttcagactgtcaatcatcgcgttccctcaagtctcgctattgaccatttgggaattcacccaagtagactccccggcagtagtcgtcgacgcggtcgtgatcctgttggtcatcactgggctgttagtttacggaaccacaagagttttaattaaggggagggagtcgctcagactatacaagaaccccgcatatttgctttacagtgatacctacttcttaaacaaatttgggttcttgtacgtgcaattcaaagcagacagattttggtggcttttacccctactgagttatgcctttttaagatcgctttttgttgctgttttacaaaaccaaggtaaggcccaggccatgattatttttatcattgaattggtgtatttcgtttgcctgtgctggattaggccatatttggacaagagaaccaacattttcaatattgctatccacttggtcaatatgatcaacgcgtttttctttttattcttcagtaatttgttcaaacagccagcagtggtctcctcggtgatggcggtgattttgtttgttttgaatgcagtgttcgctttgttcttactactattcaccattgtcacctgtactttggcattgcttcacagaaatccggatgttcgttaccaaccaatgaaagacgaccgtgtgtccttcatccccaagattcaaaatgatttcgacgacgaaaacaaaaacgatgccgagctattcgaaatgaggaaggccgtcatggacaccaatgagaatgagcaggaaaaattgttccgtgacgataccttcggcaagaatctcaatacaaccacgaatacgactaggctattcgacgacgaaacgagttcgtcctctttcaaacagacctcgtctccctttgacagctcggatgtaacggagcaacctgtacaacctacatctgccgttatgggcacaggtggtaactttctgtctccacaataccaacgcgcctcatctgtgtcccgcaccaacttggtaccaaataatttgagcacatccagcttgaaaaaacccgaatcaagtctttacgtcgggacttccaatcaatcatattcgcattttaacaataacaacaacaataccaacggccgtaatactaacccatacttgtaa

SEQ ID NO: 38 - DNA, 1977 bp, Saccharomyces pastorianus
atgactaaagaaacaattcgagtggtgatatgcggtgacgaaggcgttggtaaatcaagtctaattgtttccttaacgaaagctgaattcatacccattatacaagacgttttaccaccaattactatcccaagagacttttcgtcatcaccttcatattccccaaagaatacagtacttatagacactacagattcggacctcatggttttggaccatgaattgaaatctgccgatgtcatttggcttgtttattgcgatcacgaatcatacgagcatgtttcccttttttggttacctcatttcagatctttgggactaaatatcccagtcatcctttgcaaaaacaagtgtgactctatatcgagtgccaatgcgaatgcaatgatggcatcagcggatattgatactaaggtagaggacgaagagtttattccaattttaatggaatttaaggaaatcgacacctgtatcaaaacaagcgccaagactcaatttgatctcaatcaagcgttctacctttgtcaaagggctataactcacccaatttctcctctgtttgatgcgatggtgggagaattgaagccattggccgtcatggctttgaaaagaattttccttttgagtgatttgaaccaagactcatatttggatgataacgaggtattaggcctacaaaaaaaatgctttaacaagagtatcgatgtaaatgagctgaacttcattaaggatttgctactcgatatttctaaagataatcaagagtacgctaatcgaaagctatacgtaccaggaaaaggtatcaccaaggatggatttcttgtactaaacaaaatatatgccgaaagaggaagacatgagactacgtgggccatattaaggacctttcattatacagattccctttgtattaatgataaaattcttcatccgagattgtttgtgcctgaaacttctagtgtggagttgagccccaaaggttacagatttcttgtggatattttcttgaaatttgatgccgataatgatggtggtttgaataatcaagaattgcaccatatcttcaagtgtacaccgggattaccaaaatcatggaccttgacaaacttccccttttctacggtagtaaacaacaagagctgcattactttacaaggttggctagcacaatggagtatgacgacgttcctgaactataacacgactacagaatacttagtatattttggctttcaggaagatgcaaagctggctgtacaagtaaccaagcaaagaaaaatgaggcgtcgttccgggaagctgtatagatcgagtgttaacgacaggaaagtctttaactgctttgtcatcgggaagccatgctgtgggaaaagttctttattggaggcttttttgggcagatcgttctcagagttgtattctccaacgatcaagccaaggattgctgtcaacagtttggaactaaaaggtggcaaacagtactatctaattttgcaagaattgggcgaacaagaatacgccatactagagaataaagaaaaattaaaggagtgtgatgtgatctgtctaacgtacgattcgagcgatccggagtcgttctcctatttggtttcgctcctggacaaattcacccacctacaagatctaccattggtatttgtggcctccaaggcagacctagataaacagcaacaaagatgccacatgcaacccgatgaactagcagatgagcttttcgtgaaccacccattgcacatatcatcgaggtggttaagttcactaaatgagctgttcatcagaatcacggaagctgcactggatcctggtaaaaacaccccagggttgccagaagaagccacgacaaaggacgcagactacagacaaacagctctcatcttagggtctaccgtcggttttgtggctctctgctctttcacgctgatgaaactcttcaagccctcgagctttcacaaataa

SEQ ID NO: 39 - DNA, 1248 bp, Saccharomyces pastorianus
atgaagaggtccacgttgctgtcgctggacgcattcgctaagaccgaagaggacgtgcgggtccgcaccaaggccggcgggctgatcacgctgtcatgtatcctgaccacgctattcctgctagtgaacgaatggagacaattcaactctgtagtaactcggccgcagctggtggtagaccgtgatcgtcacgcgaagctggagctgaacgtggacgtgacgttcccgtcgatgccatgcgacctggtgaacctcgacatcatggacgactctggggagctgcaactggacatacttgatgccggattcacgatgaccaggctggaccgtgagggcaattccgtgggtgacgctgctgaactgcatgttggtgggaatggcgaagctgtcacgccggccaacgacgaccccaactactgtgggccctgctacggttccaaggaccagacacaaaacgacaatttggctcaggcagacaaggtgtgctgtcaagactgtgacgcggtgaggtccgcgtatctggagtcaggatgggcgttttttgacgggaagaacatcgagcaatgtgaaagagagggctacgtgaacaggattaacgagcacctacacgagggttgccggatcgaggggtctgcgcagatcaaccgaattcaggggaacatccactttgctcctggcaagccataccagaacatccaaggccacttccacgatacttcgctgtacgacaagacatccgacctgaacttcaaccacatcgtcaatcacctgagcttcggcaagccaatccagtcgcaccacaaactgctggccaacgccaagcgccacggcgacgccgtggcctccacggcccccttggacgggcgccaggtgtttccggacattgccacgcactttcaccagttctcgtactttgccaagatcgtccccaccaggtacgagtacctagacagtgaggtcatcgagaccgctcagttcagtgccacgtaccactcgcgacccctcattggtgggagggataaggaccaccccaacacgatccacaccaggggcggcatcccgggtctgttcgtgttcttcgagatgtctccgcttaaggtcatcaacaaggaacaacacggccagagctggtccggcttcatcctgaactgtatcaccagcattggcggtgtcctggctgtgggcaccgtcatggacaagctgctctacaaggcgcagagatcgatttggggcaagaagagccagtag

SEQ ID NO: 40 - DNA, 1740 bp, Saccharomyces pastorianus
atggccatattgaaagacaccatagttagatacgctaacgcgagctatgcacccgctgctgctgctgctgctgccacgaccacgaccacgaccacagcatatccaaacctgtccctgctcttgcaaaagagacggtctattgccaacgccaagtcgaaaaactccaacctcgtgaaaagagaactgcaatcgcaccattcggccatcagcgagtacaacaatgaccaattgaaccattacttccaactttcgcaaacggaaaaaccgctgtacagcctgaccaacttcacgtctcagccgcaggtcaacccgaaaatgcggttcctgatcttcgacttcatcatgtactgccacacaccactcaatctctcgacgtccactctgttcctcacgttcaccatcctggacaagtactcctcgcgcttcatcatcaagagctacaattaccagctcctgtcgcttaccgcgctgtggatctcatccaagttctgggactccaagaacagaatggccacgttgaaagtcctgcagaacttgtgttgcaaccaatattccataaaacagttcacctccatggaaatgcatctcttcaaatccctcgactggtccatctgccagtccgctacattcgactcgttcatcgatatattcctgttccagtccacgtccccattgctgtctacccccacgctctctgcccccttggaagctttcattcaacagaaactggccttattaaacgatgctgctggtactgctattaataaatcctcgcctcagggccccgcttttaacatcaatgaaataaaactgggcgccatcatgttgtgcgaattggcttccttcaacctcgaactatcatttaagtatgatcgttccttaattgcgctgggtgcaattaacctcatcaagttgtctttaaactactacaattcaaacgtttgggagaatttcgatttggccccggagggacccgcccaggatctcgacatcagcttatccgagatttcaaacttgctattggacatcgccatggaccaagattccttcccctccagcttcaaatcgaaatacctaaaccataataaggcctccccggcaaaatccctcttggacgcattacagaactattgcgttcagttgaaattggaggaattctaccgttcccaagaactggaaaccatgtacagtaacatctttgcccaatccttcgaggacgacccattagcttgcgtctatccgaataccaccaccccaaagagcgccactgcttcttcctccgccgccacagattatttctcagatcatactcatataagaagattaactaaagagaacatctctacgccctttgcattcaccccaacatcatcttcgtcctccccatccccattcacttctccttacaagacttcaagctctatgacaaccccggattctgcatatcatcacgcccattcgaattcgttctcgtccactcaatattctttcaaaagatcgttgagtattccacaaaactcaaacatcttttggccaagcccactaacccccaccacaccgtctcttatgtcaaacagaaagttgctacaaaatttaccgatgcgctcaaaaagattaatgcccatcagacccatagtcagtgcacactcatacgctgcccctacacacttaaagaaaagatcaacttcatccacggattgtgatttcaatgatggtagtaacctcaagaaaactcgctga

SEQ ID NO: 41 - DNA, 1503 bp, Saccharomyces pastorianus
atgtctagattagaaagattgacttcattgaacgttgttgctggttccgacttgagaagaacctccatcattggtaccatcggtccaaagaccaacaacccagaaactttggttgctttgagaaaggctggtttgaacattgttcgtatgaacttctctcacggttcttacgaataccacaagtctgttgttgacaacgccagaaagtccgaagaattgtacccaggtagaccattggctattgctttggacaccaagggtccagaaatcagaactggtaccaccaccaacgatgtcgactacccaatcccaccaaaccacgaaatgatcttctctaccgatgacaagtacgctaaggcttgtgatgacaaggtcatgttcgttgactacaagaacatcaccaaggttatctccgctggtaaaatcatctacgttgatgatggtgttttgtctttcgaagttttggaagtcgttgactctaagactttgaaggtcaaggcaatgaacgccggtaagatctgttcccacaagggtgttaacttgccaggtaccgatgtcgatttgccagctttgtccgaaaaggacaaggaagatttgagattcggtgtcagaaacggtgtccacatggtcttcgcttctttcatcagaaccgccaacgatgttttgaccatcagagaagttttgggtgaagaaggtaaggacgtcaagatcattgtcaagattgaaaaccaacaaggtgttaacaacttcgacgaaatcttgaaggtcactgacggtgttatggttgccagaggtgacttaggtatcgaaatcccagccccagaagtcttggccgttcaaaagaaattgatcgctaagtctaacttggccggtaagccagttatctgtgctacccaaatgttggaatccatgacctacaacccaagaccaaccagagctgaagtctccgatgttggtaacgctatcttggatggtgctgactgtgttatgttatctggtgaaaccgccaagggtaactacccaatcaacgccgttaccaccatggctgaaaccgctgtcattgccgaacaagctattgcttacttgccaaactacgatgacatgagaaactgtactccaaagccaacctctaccaccgaaaccgtcgctgcctctgctgtcgccgctgttttcgaacaaaaggccaaggctatcattgtcttgtccacttccggtaacaccccaagattggtttccaagtacagaccaaactgtccaatcatcttggtcaccagatgcccaagagccgccagattctctcacttgtacagaggtgtcttcccattcgttttcgaaaaggaagctgtctctgactggactgaagatgttgaagcccgtatcaacttcggtattcaaaaggctaaggaattcggtatcttgaaggacaacgacacttacgtctccatccaaggtttcaaggccggtgctggtcactccaacactttgcaagtctctactgtttaa

SEQ ID NO: 42 - DNA, 801 bp, Saccharomyces pastorianus
atgactgtggaggaggaaagcccagagacggatgatttgcgattgcagcagctggacaataatatttttttcgggtcctgtgaagtactagcacagcctattcttttacagtacgagaatatcaaatttattataggtgttaacctaactactgagaagatagcatcgttttatactgtgtatttccagcattcaaattcactaattgtaaattttgattcgtcgtcaacccaagaaacgatagagacgccagtggaattgtataatcgaaataatacgattctattacagaaattcgtcagtcagtacttacaaatgggaaaaacaaacaccccgttatccttaacatggtttggcaaaatccagtcactaccgcaattttgtaattcaaacgttctcaccggcgaaccgttggtgcaataccaggcgttcaatgatctattgacactttttaaatcttttaaacatctcggtaacatcttggtggtatcatcacactcacatgatcctacactcatcaaatttctcgtatctagagtaattgcttgtcacccatcagtgactattcaggagtctttacagtacacgagagcaatcctgaacttacccattaatgcatgcgatgaatttgatattctaaacgacaaaggactacaagagctcgcgcaagccccagaattacaacaacaaaggtcaaagtgttcctctaagagaaggtgtggcaacctacccgagaattacttcgtcgataacaagagtcttacgggccccagcgagcatattaaacgaggtcatttctaa

SEQ ID NO: 43 - DNA, 1110 bp, Saccharomyces pastorianus
atgtctaccactgttgaaaaaattaaagctgtcgaggatgaaatggcccgtacccaaaagaataaggccacatccttccatctgggtcagttgaaggccaaactggccaagctgagaagagaactactaaccagtgcctcctctggtagcggtggtggtgctggtgtggggtttgatgtggccagaactggggtggctagtgtggggtttgtcgggttcccgtcggtgggtaaatccacactattgtccaagttgactggtacggagtctgaagttgccgagtatgagtttaccacgttggtcaccgtgccaggtgttatccgttacaaaggtgccaagatccaaatgctagatttgcctggtatcatcgacggtgctaaagatggtagaggtagaggtaagcaagtcattgccgtggccagaacttgtaacctgttatttatcattctggatgttaacaagcctttgctccataagcaaatcattgagaaagaactggaaggtgtggggatccgtttgaacaagtctccacctgacattttgatcaagaagaaagaaaagggtggtatttctatcacgaacacagttcctttgacccacttggggaccgacgaaatcagagccgtgatgggtgaatacagaataaatagtgcagagattgccatcagatgtgatgcgactgtggatgacttgattgatgtcctggaggcctcgtccagaaggtacatgcctgcagtttatgctttgaacaagatcgattccctatcgttagaagaactggagttgctatacagaatccccaacgcggtccccatctcgtccggtcaagattggaatttggatgagttgttgcaagtcatgtgggataggttgaacctagtccgtatttacactaaaccaaagggccaaatacctgattttaccgatccggtggtcttaagatcggaccactgtagtgtcaaagatttctgtaaccaaatccataaatccttggtggacgatttcagaaatgctttggttttcggtagcagtgtcaagcaccaacctcagtatgtggggttgaaccatgttttggaagacgaagatgtcgttactatcttgaagaaatga

SEQ ID NO: 44 - DNA, 2958 bp, Saccharomyces pastorianus
atggcgaagaagagcaagaaggaccaaaagaactactgggacgaggatttcgaagaggacgctccccagggcgaagaaatcggcgccacaccaaccccagaaccggaaagtagtatggaagtagaagacacttccaaagaggctactgaagccactgaagaggacttcatgtctgctttgaagcagtccaagaagaagcaagaaaagaaggtcaccgaagacaagaaagacggtaagcctgtgctgaaatccaagaaggaaaaggagaaggaaaagaaggaaatggagaagcagaagaagaaagagcaagctgccaagaagaaggcccaacagcaggcccagaaggaaaagaataaggagttgaacaagcaaaatgtcgaaaaggctgctgctgaaaaggcccaaaagtctcagaatggcgacaatgacaagccaagcactagcaccaagaagcccgccaagaaagtgcctgctggtttggctgctttgagacgtcaattggagttaaagaaacagattgaagaacaggaaaagttcgaaagagaggaagaagaaagattggaaaaagaagaagaagaaaggttggccaacgaagaaaaattgcttgaagaatccagatctgccaagaaggagaaggagagggccaagcgtgagaaattaaaggctgaaggtaagctgttgaccagaaagcaaaaggaggaaaagaaattgttggaaagaagacgtgctgcacttttgtcttctagtaacgttaaagttgctggtttgtctaagaaggaaggcgaagaaagtaaaccaaagaaggtcgtctacaacaagaagaagaagagaacaacccaagaagcaacctcagaagccgtcaagtctgattccaagaaggatgccgaagtcatacccgatgacatcaaagaatctgaggatgtcttgattgacgattgggagaatctggatttcggtgaagacgatgaagaggaaaccaacgaggaaacgtctaccgcccaagaatctactacaaatccagaagatcatgaagatgaagatgaaaaccacgaaggtaatgaagaagaagaagaatctagtcaagtggaggaaattgtcagaagcactcctgccagtacaccaaccccatccagttcttccccaaacaagaaagatctacgttctccaatttgttgtatcttgggtcatgttgataccggtaagactaaattgttagataaggttagacaaaccaacgttcaaggtggtgaagctggtggtattacccaacaaattggtgccacctatttcccaattgatgccatcaagtccaagacaaaggtcatgactcattacgaaaagcaaactttcgatgttccaggtcttttggtcattgataccccaggtcacgaatctttctccaatttacgttcgagaggttcctcattgtgtaacattgccattttggttattgatattatgcatggtttggaacaacaaaccatcgagtctatcaaactattaagagatagaaaggctccatttattgttgccttgaataagatcgatagattatacgactggaaacctattccaaacgaatcattcagagcctcctttgcaaagcaagcgagagccgttcaagaagagttccaatctagatattccaaaattcaattagaactatccgagcaaggtttaaattcagaactgtatttccaaaacaaaaacatggctaaatacgtctctattgttccaacatctgccgtcaccggtgaaggtgttccagatttattgtggttactattggaattaacccaaaagagaatgtctaagcaattgatgtacttgtctcatgtggaagccactgttttggaagttaaagttgtggaaggtttcggtaccaccattgatgtcatcttgtctaacggttacttaagagaaggtgatcgtatcgtattatgtggtatgaacggcccaattgtaacgaatatcagagccctactaacaccgcaaccattgcgtgaattacgtttgaagtccgaatatgttcatcacaaggaagtcaaagctgctttaggtgtcaagattgctgctaacgatctagagaaagccgtttctggttctagattattggttgtcggtccagaagatgacgaagatgaactaatggacgatgttatggatgatttaaccgggttgctggattccgttgacactgccggtagaggtgttgttgtgcaagcttccaccttgggttctttggaagccttattggatttcttgaaggatatgaagatccctgtgatgtctatcgggttaggtccagtctacaagcgtgatgttatgaaggcttctacaatgttagaaaaggcaccagaatatgccgtaatgttgtgtttcgatgtcaaagtggataaggaagctgaacaatatgccgaacaagaaggtattagaatctttaatgccgacattatctatcacttattcgattcatttactgcataccaagagaaactattggaagaacgtcgtaaagatttcttagattatgctattttcccatgtgtcttacaaactttacaaatcatcaacaagcgtggtccaatgatcgtgggtgtagatgttttggaaggtactctacgtgtggggactccaatatgtactgttaaaattgatccaatcaccaaggaaaagcaaactttactgttgggtagagtcatttctttggaaatcaaccatcaacctgttccagaagtcaagaagggccaaactgccgccggtgttgctgtccgtctggaagatccttctggccaacaacctatctggggtcgtcatgttgacgaatctgatacattatattccatgatttcaagaagatctctggatactttgaaggacaaagcatttagagaccaagttgctagatctgattggctactgttgaagaagttgaaggtcgtttttggtatcgaatga

SEQ ID NO: 45 - DNA, 867 bp, Saccharomyces pastorianus
atgtcggcaccgacaatgagatcgacgtcaatactgacggagcatttggggtacccacctatctcgctcgttgatgatatcatcaatgctgtgaatgaaattatgtataagtgcacagctgccatggaaaagtatttgttatccaagagtcggattggtgaagaggattatggggaagagatcaaaaacggagtggccaagttggagtcgctattggagaattctgtggataaaaattttgacaaactagaactatatgttttgagaaacgttctccgaattcctgaagaatttttagatgccaatgttttcagactagagaaccaaaaggatctggttattgtggatgataacgagataaaaaggagcgaggaggaactcagagagaaagtgaatgacgttgaattggcattcaaaaaaaatgaaatgttaatgaaaagggttgccaaagtgaaaaaactactcgttagcataagaggtttcaagcagaaactgagtgacttgttgaagtgcaaggatgacgagcagttgcaaaagattttggagtcgttaaaacctatagacgacacaatgacattactgagtagttcattacgaaaattatacgtggatagtgaaagcaccagttcaacagaggaagtggaggcactattacaaaaactgaaggccaatgggaaacacagcaaggattatagaacgcgatatatagacataaggactaacaatatcttacggaggttggggttactaggcgatggcgagacagaaggccagtccgctgaatctagtataggggtgcaagggaaggaagctgtcaaactagatatcgaagaacctcgattggatttactcgatgatgtattataa

SEQ ID NO: 46 - DNA, 2283 bp, Saccharomyces pastorianus
atggtggacgtgcaaaggaggaaaaaaatgcttgccaaggctgctgccggagcgtctattccggcaatcaagggttctgttccgttggactcatttgatatcaaggtgattcagtacaagaacgctctttataagctgaatgagctgagccggctgttgaacgtgctggtgccgcacttgaagaggaagggggacagcgactcgtacacgatcatcccccttgtcaatttcatcttatcgctttgtgagggccctatatttagcgtgaaccccgtattggccaaaagatatcacttactttgccggttccaatcggtgaagctgactgaagtgcagcagaagttatcgacaactttcgtcgacatcgatggttggatgtttcccgaggagatgcctctagagcactataaatcgtgcatttataataacccgttgcagtggaaggttttgaattctctttcctgcattgcgcaaaatgccatcaagatatacgatgcaaaactgagtcaaattctgctggagagagacgcttacaaggcgcgttcgctgccattagacacttcggccattgaggatttgttaaacccgttggaaatgtcactgatactggatcttgccgttttgatcaacgacccgataaaagacaagtcaacctactccttttacaagttgcagtggcaggtcatggacaagttcaattcatgtattcattctaaaatttttcccgttctgagaacatattataaccaattgcagaaattctcggagacaaggccggtttccctattaaacttacaaaacaatctgccacattgggagtggaccttacacaggatgtacaccttccacttgcgtgttttgtctgtgctatgtgtcatcatcagtctttccagacaaattttcctgccgaacaagcagcattttctggatgtcaagacaagattgtccagtcaaaacgcgtacctatatgatatggtgatcaatgagctgatggcgttattgtccccgcaaagtgacgagctttcgactttgggggaactgcaagaagatctaaagatttggactcaaacgactcgtgcggataataatttattgagaacgcctattttccatctccaacccggtttaatcatcgaattgtttaataatcacatcagcaaaattataccgaaattgagatctatcatgacactgctatccaattggatggattgctggaaatacattgagaaaaacttcaaagcttttgacaacgcagatgtcgatttacaagatttattgaacgaaaagctggcgaaagataaaacggcatacatagaacttaggaacacgaaaagcaagctaaagaaaaagccatcaatttcaaaattgtcagcttcctcttctccatctccttcccccatgtcttcggcaagcccatcaagacaaccctctttagaggccgtgagaacaaaagcaagggcgcatgttacctcagcttcatcaagatctccctcactgtcgcccacaagaacaaatagtaacagcaagactgcagaaatgaagaaaagcgtggtgtccccggagagaaggaagataattaacgggagaaggccaagatcttcatctttacaatcgtatacaaacaaacaacaaacaacatatttgagctctactaggcatccgccaataatgccacattcaaaactcaataaccagaggtctaattccttacaagcttccactatgaccctaaaccaaaagatagtgcaagacacagtgcgacacttgatgaacaaaacttcctctacgccttcctcgtccgtatcctcctcgtcggcgccctcaccaaaggtatcgagtataagtaactctccctcagtgaaatcatcgagcgctctgacagcgaatggcggtgaaaccttggctatagaaacattgtacctggattcggaatcaaacgccggcgaaatatcgaccagaagagtaagattcaccggtgtgccaccaatgacggacacagaaaaccccaagccaacgaagatggggtggtacaagaagccggcggtgttacactatccaccaatacctgcctcagcaatgatcaagccattacaacataagtccaagtatagcacgttaagacaagaagaagggttcaccttcagaaaaagtcttcgagatggattagagttggaaaacggtgcaactaatgcagagactaatatgatgccatttgggatcgacatcaaagaatctgcagggcatcgaatagccactaagatcagaaacaaattgaggtag

SEQ ID NO: 47 - DNA, 4416 bp, Saccharomyces pastorianus
atgtcttttgaaataggtactaggtgctggtatccacacaaagaacaaggttggataggcggtgaagtcactcaaaatgagttttgtgacggtgcataccatttggagttgaagttggaggacggtgagactgtgtccattgaaacagacagcttggaagacgatggtcaccatccaacgttgccggtactgcgaaaccctcctgtcttggaatccactaatgacttgaccacgctatcgtatttgaacgaacctgcggtgttgcatgcgataaagaaaaggtacttgaactcgcagatttacacttattctggtattgttcttattgctacgaacccctttgctgaagtcgaccatctgtactctcgcgagactatacagagctattccaccaaacgtaaggacgaattggaaccgcatctgtttgccattgcagaggaggcgtacaggttaatgactaaggaaaatgccaatcagactattgtcgttagtggtgagtctggtgctggtaagaccgtgtctgctaaatacattatgaggtatttcgcctcagtgcaagaaatcaacgatcaagaaggaaaaatggagatgtctgagatcgagagccaaatcctggctacgaaccccattatggaagcctttgggaatgcaaagaccattagaaacgataattcatcgcggttcggtaagtacttgcaaattttattcgatggcgataccactatcagagggtccaagatcaggacataccttttggaaaaatccagattggtttaccaaccggaaacagaaaggaactaccatattttctatcaaatgttggaaggtttaccagaacccttgaaacaagaattgcatttgtcatctgccaaagactaccattatacaaatcagggtggacaaccggatatagtcggcgtagatgatgcagaagaataccggataacaaccgatgccctgtcattggtcggcataaaccacgagactcagtttgagatcttcaaggtccttgcaggtctgttacacattggtaacatcgaaatgaaaatgacaagaaacgatgcatctttgtcatctgatgaaccaaatttacaaatcgcgtgtgaattactaggaatcgattccgtcgagtttgccaaatggattgtcaagaagcaaattgtcaccagatctgaaaaaatcatcactaacctaaattataatcaggcaataattgccaaggactctgtggcaaagttcatctattctacactttttgattggttggtagataatatcaataaaaccttatacgatcctaaactggaccaacaagaccaggttctttcctttattggtatcctagatatttatgggtttgagcattttgaaaaaaactcgtttgaacagttttgtataaactatgctaatgaaaaattacaacaagagttcaatcaacacgttttcaaattagagcaagaagaatacgttagggaagaaatcgaatggtctttcatcgaatttaccgataaccaaccttgcatagatttgattgaaaataagctaggtatactttcccttttagatgaagagagtggattaccatcgggttccgatgaatcatggacctcgaaactatactccactttcaacaagccgccctctaaccaagtcttctctaaacccagatttggacagactaaattcatagtgagccactatgccattgatgtcgcatatgaagtggaaggtttcattgaaaaaaatagggacagtgtttccatgggtcacttatgtgttttcaaagccacaacaaacccaattttcaagcagattttggaaaatagagacaccaaggaaagtaatgcgtctcaagaacaagatgccaaaacaaccacagtagttccaacaagactaagtcaaaagaagccaactttggggtccatgttcaaaaaatccttaagtgaattaatggcaatcatcaattccactaatgtccattatattcgttgcataaaaccaaattctgagagatcatcctgggaattcaataacttaatggtcttatctcagttgagagcatgtggtgtattggaaacaatcagaatttcgtgtgcagggttcccatcgagatggacttttgaagaatttgttcaaagatattacatcttaacaaaccatgaccagtggagtaggatcctttataattcagatgttttaaaagaagaaatcgttgagttttgccaacttatattagatgcttctatcaatgatgtaaccaagtatcaaattggtaacaccaagatttttttcaaagctggaatgcttgcatttttggaaaaaattaggaccaatataatgactaaaatttgcactttaattcaaaaaaagatgagagcaagataccatagaaagcaatatttgcaaattttattatcaattaggagatgccaaaatcaaatcagaagtcatttggttcgtgcaagggtcgatcgtgaactaaagacacgtgcagccatcttaatccaatccaacatcagaggtcattggaaacatcaatacttcaaagacgctgttagccaggtaataaaactgcagtgtacctgtaaaggaaaattgatactcgaatatgtagataaacaatttacacgcatggctacaattatcatccaaaaccatattagatcgtacggacacaagatgcattacagaacaatgaaaaagagctccgtattgatgcagagcgtcataagaaggcagttggcacaaaaaaaatatacagaattgaagagggaagctgaggaacgcaatattaaaacaaattatggaatcgggctattagaagaagctattgaattcagaaactcgttcattttgggtttagaaaccttaaatgactcatatacaagattaacgcaattgctacacggtgatttatccaatgttccttctgaggaaaggcacgaatacgaaatgctagtgagcggttacaatagcaagctcttcgagctaaaaaccttacaaggtgaaattatgagaactttggatgaacaaaacaatctaaaggagaggaagaaaaagcagtctgctatgatccgttcgcatagacaaaattcaactgctagcaaaagtaagaaattcttaagtctaggcgatgaggtcaataagataaagcaagaactatcgtttatcgaaaatgtattaacgcaggattttactgctacttattccactagcaagaatgataaaatgaaaggtctaggaatcacaggacagcagaaaagatcaaagttggtcaatgtgatccgtagagaatcagggaatcccgatttactagaattattgatggatttgaatggatacacattagaaattacagaaagtttcttgaaaaaaattaatgtttctgaattagatgaaaacagcgccttgggtcctgtacaagccatcagtactattgtgaacagtctagtgagacacgggttactgatccaaaccagcaagttcatgtcaaaggtgttgttgacctttgaaagcattgttatgactttaccaagggacaaaaccatggtgggcggtatcttttggttaagtaatctttcgcgattcccgccgtttgttgcaaatcagaaaacactgtacgatgggaatggcaaggatgagaaagatagactgactttagtatatctgaatgagctggagaatgaatcggtcagggtatttgacaagatttactcgatttggctagtaaagttgatgaaacaagtttcagtgaacatgaaaatcagtgaactggtgttgaacgaaggcacgtttgcaacccctagtggtgaaaagtttgctgagatacgggcatttttaaatgatttcgatgcagctatgcttcaattcaaattccacggtacagtgcgtacgaagatttacaatgacatctcaaagtatttcaacgtaatgctattcaacgacctaataaccaaatgtcccacattaaactggaaatacgggtacgaggtggacaagaacatcagacagttaatggcatggtttgagccaaaaaccgacgatgcgcgttctaaccttattcaaactgttcaaagtgtcaagctcctacagttcaaaatgagcaacctaaaggaattcaaactgctattcgatttctggtatgctttgaaccctgcacaaatacaagcgatcctgttgaagtacaaacccaccagcaagaacgaagccggcgtaccgaacgaaatcttgaactatttagccaacttggtcaagagagaaaactcgttattacctggaaagatggagatcatgctcaccaacgatttcgactctattaagaagcatctgcacgatggggccgatgagatccctcgtggcttcgacgcacaaggcttagccatcgtcaataaaattatagaattaagtttaaaatag

SEQ ID NO: 48 - DNA, 4068 bp, Saccharomyces pastorianus
atgagtgacgataaaaaaacgcctctacagaggaaacctggggaagatgacacgcttttcgatatcgatttcttggacgagagcacctctccctcggggtcccattcaaagactacaagctcacatgctaatgcgaattatgtgccaccggtccatgcatttcccgaggaaacgatcgatttagatgctgacgatgataatattgagaacgatatgcgcgaaaatccatttatgagtaacaacgatgatgaccaaacgtcttggaatgccaataggtttgactcgaatgcataccagccgcaatctttgaggggcggtaagcctcccggtgtctttgctaggttcggtaatggtctcaaaaacgccttcacattcaaaagaaagaaagggcctgaaagcttcgaaatgaatccttacaatgcagtaaccaacaatgaagtcgatgatagctatttgaactcgaggaacaagttcgacatcaagattcttttcaaccgatacatcttaagaaaaaatgttggtgatgcagatggcaacggcgaaccacgacttattcatgtcaacgactctctggccaactcatcgtttggttatagcgataatcatatatctactaccaagtataactttgctacatttttgcccaagtttctgttccaagaattctcaaaatatgccaatctattttttttatgcacatctgccattcaacaagtgccccacgtctcaccaaccaatagatacaccaccatcggtactttacttgtggtgctcattgtctctgccatgaaagaatgtatcgaagatatcaagagagccaattctgataaagaattaaataattcgaccgcagaaatcttctcggaagcacaagatgacttcgttgagaaaagatggattgacattcgtgttggtgacgtaattagggtaaaatcagaagaacctattcctgctgacactatagtcctgtcatcctcggaacccgaaggtctctgctatatcgaaactgccaacttggatggtgaaacgaatctaaagatcaaacagtcaagagaggaaacagccaaattcatcgattctagaactttaaaaaatatgaaagggaaggttgtttccgaacaaccaaactccagcttatatacgtatgaaggtactatgacgttaaatgatcgccaaataccgttatcgccagaacaaatgattctgagaggtgcaactttgagaaacactgcttggatatttggcctagttatatttactggtcatgaaaccaaactgatgcgtaatgctactgcaacccccatcaagagaaccgcggttgaaaagattatcaacaggcaaatcattgcattattcacagtcttgatcgtgctgattttgatttcttctattggtaacgtaattatgtccactgctgatgccaaacatctttcttatctttacctggagggaaccaacaaagctgggttattttttagagatttcctaacgttttggattttattttccaatttggtccccatttctttatttgttaccgttgaactgataaaatattaccaagcgtttatgataggttcggatttagatttatactacgaagaaaccgatactcccactgtggttcgtacatcctctttggtcgaagagcttggtcaaattgaatatattttcagtgacaagacgggaactttgactagaaatattatggaattcaagtcttgctctatcgcaggacgttgttatattgataaaataccagaggacaaaatagctaccatagaagacgggattgaagttggttttagaaaatttgaagatttgagaaaaaaactaaatgatccttctgacgaggattcacctattatcaatgatttcttgacattattggctacatgccataccgttattccagaattccaaagcgatggttctattaaatatcaagcagcttctccagacgaaggtgcgcttgttcaaggtggtgcggatttgggatataagtttattattcgtaagccaaactctgtaaccgtactaattgaagaaactggtgaagaaaaagaatatcaactattgaacatttgcgaattcaattctactagaaaaagaatgagcgcaatattcagatttccggatggctcgattaaattattctgtaaaggtgcagatactgtcattttggaaagactaaacgatgaagctaacgaatatgtggaagctacaatgagacatttggaagattacgcatcggaaggtctaagaaccttatgtctggccgtaagggatatacctgaaggagaatatgaagaatggaataatatttacaatgaggctgccacgacattagataacagagctcaaaaattagatgatgcagcaaatctaattgaaaaaaatctgttattaattggtgcaactgctattgaagataagttacaagatggtgttccagagaccattcacacattacaagaagcgggtatcaaaatctgggtgttaactggtgataaacaagagactgctgtcaatattggtatgagttgtcgattactgagtgaagatatgaatctactgatcatcaatgaagaaagtaaagaggacactgaaaggaatttgttagaaaagattgatgctcttaacgagcatcaactatcaacgcacgacatgaacactttggcacttgttattgatggtaagtcattaagctttgccctggaatcagaattggaagattacttactaactgtagccaagctttgcaaagcagttatatgttgtcgtgtgtctccgctacaaaaggctttggttgtaaaaatggttaaaagaaagacatcctcgctattactagccattggtgatggtgctaacgatgttagtatgattcaagccgctcatgtcggtgttggtataagtggtatggaaggtatgcaagctgcccgctctgctgatatagctgttggtcagttcagatacttgaagaaattgttactggtccatggttcctggtcttatcaaagaatctctgtggcaatcttgtattcattttacaaaaatacagctttatacatgacacaattttggtacgttttcgcaaatgctttttcgggtcaatcaattatggaatcatggacgatgagtttctacaatttgttttttactgtttggcccccttttgttattggagtttttgaccaatttgttagtagtagattacttgagcgttatccacaaatatacaaattgggacaaaagggccaattcttctcggtctacatcttttggggatggattatcaatggatttttccattctgcaatagttttcattgggaccattttgatttacagatacgggtttgccttaaacatgcacggcgagctggcagatcattggtcttggggtatagctgtttacactacaagtgttattattgttctggggaaagccgctttagttactaaccagtggaccaagtttactctagttgccatccctggatccttcttattttggttagtatttttcccaatttacgcttccattttcccacacgctaacgtttcaagagaatattacggtgtggttaaacatacgtatgggtccggtgtgttttggttgactttaattgtcttaccgatttttgccttagtcagagacttcttatggaaatattataaaagaatgtacgaaccggaaacataccatgttatccaagaaatgcaaaagtataatataaccgattcaaggccgcatgtccagcaatttcagaatgctatcaggaaagtgagacaagtacaaagaatgaaaaaacaaagagggtttgccttttcccaggctgaagaaggtggtcaagaaaagatcatcagaatgtacgatactacccaaaagagaggtaagtacggtgagttgcaagatgcttctgcgaacccctttagtgataataatggatttgaaaatgacggctttggaaacacagaaccgtttattgaaaacccattcgccgatgatactaggaacgctcataaagccaattcctcaagagacgactttacatttgatttgtga

SEQ ID NO: 49 - DNA, 912 bp, Saccharomyces pastorianus
atgtctgacgaaattgtttggcaagtgatcaaccagagcttctgctcccatagaatcaagacacctagtggtcaaactttctgtagaaatgagtataacgtcaccgggttgtgtaccagacagtcatgcccgttagccaactccaagtatgcaacagtaaagaatgataacgggaagttgtacctgtatatgaagacgccagagagagcacatacccctgccaaattgtgggaaagaatcaaactatccaagaattattccaaggccttacaacagatcgacgaacatctactgcattggagtaagtttttccgtcacaagtgtaagcaaagatttaccaagttgacgcaggtcatgataacggagagacgtttggcgctaagggaagatgaaaggcattacgttggtgtggcaccaaaggtcaagagaagagaagagaacagagaaagaaaggcattggtggctgccaagatcgaaaaggcaattgaaaaggaattgatggacagattgaagagtggtgcttacggtgacaagccattgaacgtggacgaaaaggtctggaaaaagataatgggtcaaatggaagaagaaaacgaccaagacgaggaagaagactgggacgaagaagaagaagagagcgatgacggtgaggtcgaatacgtggaagacgacggtgaaggtgaatacgtcgacgtgaacgatctagaaaaatggttagccgattctgataaagaagcatcaagtgccagtgaaagcgaaagcgatagcgatagcgacagtgacgatgaagacaaggatagctccaagagacgtaagaagaccgctagcactaaggctaaacgtccaaaggtcgaaatcgaatacgaagaggagcacgaacttcaaaatgctgaacaagaaatggcccaataa

SEQ ID NO: 50 - DNA, 4323 bp, Saccharomyces pastorianus
atggaaatattcagccagagagattactacccgaccccatcgtccaatgttattagttatgagtgtggtaccgtgccaagatctgcaaacgagccagtgaatagtgcggatttgcccgctctaattgtacatctttcttctcctttggaaggggtagattacagcgcatttgcagatttcttcctcatttatagaaatttcataacacctcaagacttacacgatttgctcatctacaggtttcgatggtgcattcgggagatcactacaaatgaggcaaaggccaagagaaggcaggttggtgaggtggctttagtgagaacgtttgtgttattgaggcattccatactgaattattttgttcaagattttttaccaaacatcacattgaggctccggttgatcgaatttttgaacgatagacatatttcgcattatcccaaaataatctccagttgtttgatcaacctgaaaaaaaactgggtacactgttccaagttggtttgggagaacataaaattaaacgaacctgataaaaaagattttgaagcgtggttacactactctttgagggattttacgcaactggaaagtttgcacagaagagtaagccgactgagtatttacgcaagacagagtgctgctagccctgatttccgtaatcaaagcgttttatcactatataaaacttcagatattttcaaactacccgataaccagcagtccttgaaatcttccaaaagccaacggaccccctcaatgctcttatttcctgataatacatcaaacgtttattctaggcaccgaacagtgaaagaaccgtccattgatatggaaagtgacaaaataccagagaacaaccgaaagataagtcgtttatccaaggtgactcttgtttccacacttatgaaaggtgtagactatccatcatcatatgcagtgaataagataatgcctcccacaccggccaaaaacgttgagttcatcataaattctctatatcttcccgaggaactaaatgaacaaaatggaacactacaaggggtgtcaacggtgtcatctatagataacaatagcaacagcaacagcaggtctaacacatcttcaatgtcattgctacaccgcagtgcccttgggcttttagccaagtggatgaaaaaccataaccgcaatgatagcagcaatgataaaaaatttatgaacactattaaccaaactaatcaaaaaccagaaatggatgcatttgtcaaatacgttgtgtcaatatcgtctcttaataggaaattttccaaagaagaagaagaagaagaactttccaattctgactcttccagatttgatatcttgagcgcgagaactatagacgaagtggaatccttgctaactttacagaatcaactaatagaaaaaatccaaacacacacagatgggaacgaatatcttacagaggagatggatggcacacaccaagaacgtataaatgatattaagcttctaaaacgaaatagctttaaaccaagcaacgataattttagcgccatggacaatttggatttataccaaactgtgagctcgattgctcaatccgtcatttctctaaccaacaccttaaacaagaaactacagaacaatgattctaacacactaccgtccccttcgtatgatgcgctgcaacgaagaaaagttaaaagtgtcaccgcagcttatttcaataaagcaaatggcaattactcaacagaaagtatgagactttttgataaagatacaggtacttcacacgtggacgagaatggacctcaaaggttactcttccatgaaactaaaaataataactcagaaacgacttcaagtatgacgccaagaaggaaaaacaattcacaatctcaaaaaagcattccatcttcacctttgaaaaatgttctacctgatcttaaagaatcgtcacccctaaatgacagcagggatgataacgaatcagccacatattcgtacgattctgagctgtcatccagttctcctcccagagatattgtagtaaaaaaattaagaaatgtcaaccataccatggatactccgtcattgaagaccaaaactgggtttctaaatttaagagagtttacatttgaagataccaagtccttaggcaacaagaaaatttgtgacgaaaaagaaagcaatacaagcgaggaagctgaaaattgtaataacgaacgtaatgaaacatcacgcaaaaaagaaaaagaaatcgaagatttcgtcaatgcgtcattaaactcagataattgtgattcaaccaaaatcaacaaacgatccccatccatccgtgggatcaaacaagcagccgttagacccgctagtggaagaattagtattgctagagtccaaagtatagccataactccaacaaaacagttaaccattgtagatcctgtacgaagcagttcgaagtccattatagaggaaataagtgaggtcgaacctctcaatttagaacataataaggatgtcaccatatattctgatacatcatccaccgttatcagtgtgtctacgagtaagctttttgaatcttcgaacaatagcccaataaaacaaactagaagcccgcagagagaattggcaaacggtaccgtgatgagtgaatccaatagaatcagattgtccatggcacctacaatacaatctgttgtaagtgatttagactcgattaccactggcagtacaatggaaacatttgaaacatctagagatacaccaatgcaatatgaaaggatagatttgagagaggaatatcaaagagggaaccaggacctgatttcaaatatatcatctttgcatgaaatgaaaacaattgacctcagtgattctaataatgatcttgatagcccaagtcaccatgctaaaaacaacaagtacttcttctcaccagatgatggtagcattgatgttgcttcgccagcgaaaaatgttgaagaattaaaaagtaaatttttgaagaatgaaaatgataccaatagtcacgtggcagaaagcatattaacaatggatgatcttgggatcaatgatacatcaagcggtcggaacacacaaacggccgatcctgaaccagccttggcgggtgccctagataagaaagatttgaacgacattgccaatatgcccgatgattcaattaatgatgaccccatcacagtggccttgatgaaattggaaggaacatatgcgaaaacatctggaaagccagaaaagagtaagagtagtgatgctcttcgattaaaaacaaacagattggcggatgaagtggacatgctagacattaaattgccgtcattcccaaatagtcccgcagaaaaacggaaatcgttattaatcgagagaaggagacaaacgataatgaacattccatttactcccaaccaaccagagaaggacgattttgcttcctcttcacccgaaaagaacagcactcccaatgctgatgatatcgctgtccaagcagcgcaaatccaagaactgatcagccagtataagatccaagatccgaggctgatggtgtctaacaatgaaaatcatatccccttcatattaatgtatgattcactgtctgtggcgcaacaaatgacgttgatagaaaaggagattttgggtgaaatagattggaaagacttgttggacttgaagatgagacacgaaggcccacaagtcataagctggttacaactactggtgagaaatgagactttatccgggattgatttggcaatttcaaggttcaacctgactgtggactggattatttcagagattcttcttaccaaaagctccaaaatgaaaagaaatgtcattcagcgatttattcatgttgcggaccattgtaaaaaatttcaaaacttcaacacactgatggaaataatcttggctttaagttcatcggttgttcaaaggtttaccgacgcttggcgtttgatcgagccaggcgatcttttaacttgggaagaactaaagaagattccgtcattagacaggaactattctgcgataagaaatctgctaaactcagtaaacccactggtaggctgcgtccccttcatcgtcgtgtacctttcggacttgtcagcaaactctgaaaagaaggactggatcttggaagataaagtcgtgaactacaacaaatttgacaccaacgttcaaatagtaaagaatttcattcagagagttcaatggtcgaagttttacgctttcgaagttaaccacgaactactgagtaaatgcgtttacattagcacactatcacaagaggaaatcaaggaactatccacatga

SEQ ID NO: 51 - DNA, 2280 bp, Saccharomyces pastorianus
atgtccacgtcttcgtctaccgggtacagcaacaagaatgccgcccatattaagcaagagaacatactgagacaaagagagacgtcctccgtcaacgccagtgacgagctgctaggtacagatgagcaaaacatggaagatttctcgaaggcgaagatcgctgcgaaagactcgttgtttcgtctcgaagccatcctgatgcccgtggtgtttaccgcgttggctttgttcaccaggatgtacaagatcggcatcaacaaccgtgttgtttgggatgaagcgcattttggtaagttcgggtcgtactacttaagacacgaattttaccatgatgtccatccccccctggggaagatgcttgtcgggttgtccggttacttagcagggtacaatggctcctgggacttcccctccggtgagctctacccagactacttagactacgtcaagatgagactgtttaacgcgtcattttctgcgctttgtgttcccttggcttacttcaccgccaaggctattggattctcgctgcccactgtttggttgatgactgttttggttctgttcgaaaactcgtacagtactttgggtaggttcattcttttggactccatgctgctgtttttcactgtagcatccttctttagtttcgtcatgttccacaaccaaagatccaagcccttctccagaaaatggtggaaatggctattgatcacgggtatttccctgggttgtacgatctccgtcaagatggttggtctacttatcatcactatggtcggtatctatactgtgattgacttgtggaccttcttggcggacaaaaccatgtcgtggaaaacctacatcaaccattggttggcaagaatcttcgggctcattatcgttccctccctcattttcctactgtgtttcaagatccattttgacctactatcccactctggtactggggatgctaacatgccatcgcttttccaagcaagattaatcgggtccgatgttggacaaggtcctcgtgatattgccctcggctcatccgtcgtttcgatcaaaaaccaggctcttggaggctccctattgcactcgcatatacaaggttacccagaaggttccaaccaacaacaggttaccggttatggttacaaagatgcaaacaacgcgtggttcttcaacagagaaagaggcctaccatcctggtcggaaaacgaaaccgatattgaattcctgaaagccggtgccagttatagattggtacacaaaagtacaggtagaaatctgcacactcatccagtcgccgcaccagtgtccaagtcacagtgggaagtctccggttacggtgacgactttgttggtgacaacaaggacaattgggtcatcgaaatcatggaccaaagaggggatgaagacccagagaagttgcataccttgaccacttctttccgtatcaaaaacacggaaatgaactgttacttggctcaaaccggtaacagtttgccagaatgggggtttagacagcaggaaattgtttgtatgaaaaatccctttagaagggataaaagaacatggtggaacatcgaaactcatgaaaacgaaaacttaccaccaagacctgaagacttcacatatccaaagaccaatttcttcaaagattttattcatttgaacctagccatgatggccactaataacgccctattaccagatccagacaaattcgactatttggcttcttccgcttggcaatggccaactttgaacactggtttgagactatgtggctggggagacgataatccaaagtacttcctactaggtaccccggtctccacatgggcttctagtgttgctgtcatagcattcatggccactgtagtcatcctactgataagatggcaaagacaatacgttgacttgaccaatccatccagctggaacgttttcctaatgggtgggttctacccgctactagcctggggtctacatttcgttccatttgtcatcatgtctagagtcacgtatgttcaccactacttgccggcattgtatttcgcattgatcattttggcttactgtttcgacgccggtttgcaaaaatggtccaggtccaaatgcggccgtattatgcgtttcgtcttatacgctggtttcatcgcccttgtaatcggctgctaccagtacttctcccccatttcattcggaatggagggctcgagccaaaacttccgttatttgaactggctatccacctgggatattgttgacaaacaagaagcatga

SEQ ID NO: 52 - DNA, 2505 bp, Saccharomyces pastorianus
atgaacgatccctctttactaggctataccaacctgggcccacagcagcagcaacagccgcagcagcagcagcagcacgccgggctactgggaaagggtacaccgaacactctgcagcagcagctgcacatgaaccagctctccggcatgcctcctcccgggctgatgggcagcaacgacgtgcacactcctgctaacaacaactcgcgccagttactcgaccaattggccaacgggaacacaaacatgctcaatttgagcatggacaacaacaacaacaacaacaacagcaacagcaacaacaacaatagcagcggaatggtgatgaacgctcccacggccaccgccacggccaaccctctagggatgattccgacagtgggcacccccgttaacctcaacgtgaacgccagcaaccctttactacacccgcacttggatgacccttcgctactgaacaatcctatctggaagcttcaattgcatctggctgcggtgtccgcacagtccctggggcagcccaacatttacgctaggcaaaacgcaatgaagaagtacctagccacgcaacaggcgcaacagcaagcacaacaacaggcgcaacaacaagccccgggccaaatcggccccccacctcaaatcccaccaccggccttgcagcccaccgatttccagcagtctcacatcgcagaggcctcgaagtcactggtcgactgcactaagcaggccctgatggagatggccgacactctcatcgacggtaagacagcaaagaaacagcagcctacgggggacagcacaccctctggcactgcagccaacagcaccgtgtccacgccgttgaccccgaagatagagctgtttgccaacggcaaggatgaggccaacctggcgctcttacagcacaaaaaactgtcccagtacagcatcgatgaagacgacgacattgaaaacagaatggtcatgccaaaggactccaaatacgacgaccagttgtggcacgcgctggacctgtccaacctgcaaatcttcagcatcagcccaaacatcttcaagtatgatttcctcacaagactgtacttgaacggtaacggcctcacggaactgccaccggagattaagcgtttggacaacctgcgtgtcttggacttgtcccataataggttgaccgcgctaccagcggaactgggctcctgcttccagttgaagtacctgtatttcttcgataacatggtcaccacgctaccatgggaattcggcaatctgtacaacttgcagtttctcggtgtagagggcaatcccttggagaggcagcttttgaagatcctcacagaaaaatctgtcacgggactgatcttctacctaagagacaacagaccggagatcaccttacctcacgagcgcaggttcatcgagatcaatactgatggggaaccacaaagagaatatgactccttgcaacaatcgacggaacacttgaccgcggatctggccaagagatcgttcaccgtgctatcgtacaatactctgtgccaacactacgccactcccaaaatgtaccgttacacaccatcatgggcattgagttgggattacagacgtaacaagctaaaggaacagattttgtcatacagtagtgacgtgttgtgtttacaagaagtcgaatccaagacgtttgaagactactgggtgcccctgttagaaaaacacggttataccggtattttccatgcaaaggcaagagcaaagaccatgcactccaaggactccaagaaagtcgatgggtgttgtattttctttaaaagagaccaattcaaactggtcaacaaagactccatggatttcagcggtgcttggatgaagcacaagaagtttcaaagaacagaagactatttgaaccgcgctatgaacaaggacaacgtcgcgctgtttttgaaacttcagcacgtctccagcggcgataccatttgggtggtcaccacacatttacactgggatcccaaattcaacgacgtgaagacgttccaagtgggtgtcttactagaccatctagaaacgttgttgaaagaggacacaacgctcaattccagacaggacatcaagaaatcccccgtgctcatttgcggtgacttcaattcgtacatcaactccgccgtatacgaattgataagtacaggccgcgttcaagtacaccaagagggcagcagcagagatttcggctacatgtcagagaaaaacttctcgcacaatttggccctaaaatcaagctacaactgtatcggagagttgccattcaccaatttcacaccttcattcacagacgtcattgactacatatggttctccacgcacgcgctaagagtgcgtgggctattgggcgaagtggaccctgagtacgtggataagtttatcgggttccccaatgacaaattccccagtgaccatataccattgctagcaaggtttgagttcatgaagacgaatacaggcagcaggaaagtgtaa

SEQ ID NO: 53 - DNA, 4053 bp, Saccharomyces pastorianus
atgccctacattggagcttccaacatatcagagcattcctttgttaatttgaaggaaaagcacgcgatcacacataaaggtgctgttaactctgcaacgtctttgcaaacacccccaagcccggatcaggagaaccaggtcgataacgaattaggagactacgacacttctttgagtgatgtttccactccgaataaaaatgaagaagacgggtttgaccgaagcataaaggacacgttggccaggtttggtaagaccaaatcaccgcctgctcttgattttgaacaaccgagacttctgtcaacagtgtcttcatctgcggactccacggcgtcttcaccgttaactgatgaagacataaaagaactagagtttcttccgaatgaatctactcattcctactcctacaatcctctctcgccaaactctctagcggtcagattaaggattttgaaaagatctctagaaatcataatacagaacccaagtatgctgttggaacccactccggacgagttgcctcctttgaaggattttcccggtcgtagaagaagtatgccaagggcatccgcttccgcgaacaatctgatgaatagaaacaagagccaaatctggaacacgacttccgccactttaaacgcatttgtaaataatacctcttcttcttcggcagtatcatctgcttcgtctgacaaacagcagggcaccccagttttccctaatttagacccaactcattcccagacattccatagagctaactctttagcttatttgccttccattttacccaagcaagacccgctgcttagacatagcagctcattattccgtggcaactatggaaacagcataagctctgaaaggccgaattttagacaaccgtttacagaccaaaccaacaccaaccacactagcagcttgttgaatgagaaatcttatccagaagaagaaacatttccgtcccatcacaaaccttctatagattcactaaatgagcaaagggcgaacttgaagagccttttggatttactcaacgaaacgctggaaaagaacacttccgagagagcttccgatctgcacatgatatcactgttcaatctgaacaaactaatgcttggagaccccaagaagaataattccgaatccgataaaaggacagacaacttgaaaagaaccttgctagatagtctggcagaaccattttttgaacactataattttatggaaggcaattcaaccgaagattcagatgaattgaaggaggaaatcgatgaattcacaggttccggagataccactgcgataacggatatgcggccccaacaggactatggtcgtattttaaggactttcacatctacaaagaattctgccccacaggcgatttttacatgtagtcaagtagatccttggcaatttagagccgcgaatgatctagcatgtttagtatttggtatttcgcaaaatgccattcgcgcgttaaccctaatggatttgattcatacagatagtagaaattttgtcttacacaagctattgaccaccgaaggccaagaaatggtcttcacgggtgaaattattggtatcgttcaaccagaaacatcgagcttatctaaaacagtatgggcatcgttttgggcgaaaagaaagaacgacttattagtttgcgtttttgaaaaggtcccttgtgactatgtcgatgtgcttctaaatctggatgattttggtgtggaaaatattgtagacaaatgtgagttactatcagatggacatttattgtccccttcctcctctacaacaccttcgtctgcctcgctatccaagatggcctcatctccaattgctaataaacttgaatattccttggagagacaggttcttgaaaacagctctttgaagcctaatctagccagtcgcaatgaaactcaacttggtgactcacggtcaacaaagaaaagtgtaaagttcgctaatgatattcaagacgttaagaatataagtcagtcattagccaaattgatcgaggacgtaaggagtggcgtggtatttgatcgtgatgatgacctcttgcctatgcccattagagtttccagtcatattaacgaaacaagatattttactttaaaccatttgtcttgtaatattccgtgtgcggtctcctctactatcctggaaaatgagctaaaactgaagattcacagcttaccttaccaagctggtttgttcattgtggattctcatactttagatctgatcagttctaataaatccattatgaaaaatatgtttggttatcactttgcagagttggtcggaaaatccattactgaaatcatcccatcattcccaaaaattttacagttcatcaatgacaagtatcctgcattggatatcacacttcacaaaaacaaaggtttggtattaacggagcattttttcaggaaaatccaggcagagatgatgggtgatcgtaaacgcttttacacctcggtaggtatcgatgggcttcatagagatggttgtgaaatcaaaattgatttccagctacgtgtcatgaattctaaagtaactttactttgggtgacacattccagggatgtcgtatttgaagagtacaatacgaacccatcacaactgaagatgctaaaggagagtgaactaagtttgatgagcagtgcgagtagttctgccagttcctccaaaaaatcctcatctagaatatctacgggaacgctaaaggatttgagcaatatgtcaacctatgaggatttggaccaccgaactaataaactgaaatacgaaattgggggcgactccgcaaaccaatctgaatccactttatcggaacaggataaaggacccttggatgaggacaaggacagcagttcaataattgttggtgatcctgagattgaacacaaattagaactggccaaaatttactcaagagataaatcacaatttgtgaaagagggaaatttcaaagtcgatgaacttttgataataagtaaaatttcactatccccaagtgtagaatccttaacagctgagacagattctaaaggttctgtaaaaggactattgccgctcaaggagaacacgttggttgagaaaaatgccactgcaaacagtatcggagaattaggtacagatgaagacggtatcataatgactaggaaaaaatcagaactgcctataagtgtatttttgcatacccctgagaagaatattggtgctgagaagcatgtcaagaaatttacagatttcgtaagtttgcagaaaatgggtgaaggtgcgtacggtaaggtcgatctgtgtatccataagaaagaaaggtatattgtggtgattaaaatgattttcaaagaaagaattcttgtcgatacatgggtcagagacaggaagttaggtactataccttctgagatccagatcatggccacgttgaataaaaacccgcacgagaatattttgcggttactggatttctttgaagacgatgattattattatatcgaaacgcccgtgcatggtgaaacaggatgcatagatcttttcgatctgattgagttcaaaacaaacatgacagaatgcgaagccaagctaatagtcaaacaagttgtggcggggataaagcacttgcacgaccaaggcattgtccatagagatatcaaggacgaaaacgtgattgtggactctaaaggcttcgtcaagattatcgatttcgggtctgctgcatatgtcaagagtgggccgtttgatgtgtttgtgggtactatagattatgctgcacctgaagtcctgggggggaacccctacgagggcaagccacaggatatttgggctatcggcattctattgtataccgtggtcttcaaagaaaaccccttctataacatagatgaaatactggagggtgacttgaaatttaataacacggaggaagtcagtgaagattgtattgaattgatcaagagcattttgaatcgttgtgtaccgaagaggcccaccattgacgatataaacaatggtaagtggctggtgatttaa

SEQ ID NO: 54 - DNA, 1896 bp, Saccharomyces pastorianus
atgtctggagcaaaatcaacaacggtagctgcactgcccgcagcaacaacagcaacaacggcaagttctaaagaatctggcacagacgagggactgtaccccttggctatgcttatggacgagttaaagcatgacgatattgcgaacagagtggaggcaatgaagaagctagacactattgcgttggcgcttggtcctgaaagaacaagaaacgagctagttccctttttaactgaagtcgcccaggatgacgaagatgaggtgtttgctgtcctagctgaacaactcggcaagtttgttccctatattggtgggcctcaatacgccacggtcctattgccagtattagaaattttggcgtctgctgaagaaaccttggtcagagaaaaggccgtagactctttgaacaatgtggcccaagaactatctcaagagcagctattcaatgagtttgttcctttgattgagcatttggccactgcagattggttctcttcgaaagtttctgcatgtggacttttcaaatccgtcattgtccgcatcaaagacgattcattgaggaaaaacatcctggctttatatttacaactggcccaggatgacactccaatggtgaaaagagccgtcggtaaaaatttacccatcttaatcgatctgttgactcagaatttggggctatccacagatgaagattgggattatatctccaatatcttccaaaaaatcattaacgatactcaagattccgtcaagtttttggctgtggattgtttgatttcgatcttgaagtttttcaacgctaaaggtgacgagtcccatactcaagatttattaaattctgctgtaaaattaatcggtgatgaagcgtggagagtacgttacatggctgccgatagattctctgaactagcctcacaattcacttccaaccaagcatatattgacgaattaatacaaccatttttgaatctttgtgaagacaatgaaggcgatgtgagagaggccgtagccaaacaagtctctggcttcgccaaatttctaaatgatccttccgttattttgagtaagatcttacctgctgtacaaaatttaagtatggacgaaagcgaaacagtgagatctgcgttggcttccaagattacagacatcgtattgttgttaaataaagatcaagtgattaacagtttccttccgattttactaaatatgctaagagacgagttccccgatgttcgtctgaatatcattgccagcttgaaagttgtcaatgatgtaataggcatcgagctattatcagattctttgctacctgccataaccgagctagctaaagatgtgaactggagagttagaatggccataatcgaatatatccctatcctagcagaacaattgggtgtacaattctttgatcaacaactgagcgacttgtgtctttcatggttatgggataccgtttactccatcagagaggctgcagtgaataacttgaaaagattaacggaaatattcggatcagattggtgccgcgacgaaatcatttcaagactacttaaatttgatttacaattattggaaaattttgtctccaggttcacagtactatccgccttaaccactttggtgcccgtggtgtcattagatgtcgttaccgaacaattattaccctttatttcccacttggccgacgacggtgttccaaacatcagattcaatgtagctaagtcctacgctgtgatagttaaggccttgagtaaggatcaggccaaatatgatgcattaattaagaacacaattttaccctctttggaagcactatgtcaagatgaagatgttgatgtaaaatactttgctagtaaaagtttggcggagtgtcaagaaattttgaaaaactga

SEQ ID NO: 55 - DNA, 1191 bp, Saccharomyces pastorianus
atgcaaaaggtctgcccccccccatctatgactattttgaggaagagaccgctagtgaagacggaatcgaagtgttcccacaccaccagtgcgaaaaagaccaagatcaagcaggaagaggtcgtgccccaacccgtggatatcgactgggtcaaatcgttgccgaataagcaattcttcgaatggatcgtggccaggaacgggaatgtgcctaacaggtgggccaaaccactggatgcttcaatcctcttcacccccgccttgacaaaggtcccagacaagtttccggaaacgtacgctaggatgcgagtgttgaggtcccgaattctagcacctgttgatatcgtcggtggctcgtccatcccagtaaccgttgccttgaaatgcggtatctcgaaagaccagatatcacccagggattataggctgcaagtgctgctttgcgtgatgctatcgtcgcagacaaaggatgaagtcgccgctatggcaatgtataacatcgcacaatattgcatggacgaactgcattgcagacagggtatcacattagaggccattctgcgaactgaggagaccaaactagacgagctgattcattctgtcgggttccacacaagaaaggccaagtatatcttgtccacgtgccaaatcctgcaagaccagcatctgggtgatgtgccggctacgatagacgaactgttggtcctgcccggtgtggggcccaaaatggcttatttgacgttacaaaaggcatggggcaaaattgaaggtatatgcgttgacgtacatgtagatagattgaccaagatttggaaatgggtggacccacaaaaatgcaagaccccggaccaaacaagaattcaattgcaaaactggctacctagaggactctggacagaaatcaatgggttgcttgttgggtttggacaaataatcaccaagtcgagaaacgtgagagatttgttgaaattcctgccaccagaggaccctagaaattccctagattgggacttacagtctcagttatataaggagatccagcataacatcatgagttatcctaaatgggtcaaattcttagaggagagccccgaattaaacgcagatgctgcttctttggacgaagttgatgttaaacaagaggacaacccaagtgaacaagatgatattcgtgttaaagtagaagactga

SEQ ID NO: 56 - DNA, 756 bp, Saccharomyces pastorianus
atggacgtgttgaagctcggttacgaactggaccagctttctgatctggtcgaagaaagaacaaggcttgtgtccgtgctgggccttgcccccacggcgaacgacaatgttgccttgaaacggcaattgggctccatcctggagtcgatgcaggagtgtgcggctactgatgcgctggtgtcccggtacaataccatcctggacaagatccccgatccggggttggacagggagctgtacaggttccacaggccggtggttgccggtgctgaggaggtgtccaaagactctttaaagaaagtgcgattcaagaacgatgacgagcttacggttacctacagagacgacgacgacgatgacgacgagcaagatgaggagccgtttccctcgaagcatgctccttacaaggatgaaccctcgcagccgcagccgcagctgcaacccatggtttccaaccaggaacttttcatcgatcagcagcaacagctcctagagcaggactcccacttgggcacgttgtcccagtccatcgggaggacccatgacatttccatggacttgaatgacgagatcgtctcgcagaacgatacgctgctagtggatttggagaacctcatcgataataacggccggaacctgaatagggcttcccgctccatgcatggctttaacacctcccggttcaaggacaacgggaattgcgtcatcatcctcgtactgatactggtgctcctcttgcttctgctggtactataa

SEQ ID NO: 57 - DNA, 1185 bp, Saccharomyces pastorianus
atgactctacaagaaactgataaatttgctaccaaggccattcacgccggtgaacacgtcgacgttcacgggtccgtcatcgagcccatctcgttgtcgaccactttcaaacagtcgtctccagccaacccaatcggcacttacgaatactcgagatcccagaaccccaacagagagaacctggaaagagccgttgctgctttggaaaacgcgcaatacgggttggcattctcttctgggtctgccaccaccgctactatcctacaatcgctgccacagggctcacacgcggtgtccatcggtgacgtgtacggtggtacccacagatacttcaccaaggtcgccaacgcccacggcgtggagacctcgttcaccaacgacctgttgaaagacctacctcagttgcttaaggacaacaccaagttagtctggatcgaaaccccaaccaacccaactttgaaggtcaccgacatccagaaggtcgccgacgccatcaagaagcacgccgccagccaggacgtcatcctggtcgtcgacaacaccttcttgtcgccatacatctccaacccattgaacttcggtgccgacgtcgtcgtccactccgccaccaagtacatcaacggtcactccgacgtcgtgctaggtgtcctggccaccaacagcaagccgctatacgagcgtctgcaattcttgcagaacgccattggtgccatcccatctcctttcgacgcatggttgacccacagaggtttgaagaccctacatctgcgtgttagacaagctgccctcagcgccatcaaaattgctgagttcttggctgccgataaggaaaacatcgtcgccgtcaactacccaggtttgaaaacacaccccaactacgacgtcgttgtcaagcaacaccgtgacgcccttggtggtggtatgatctccttcagaatcaaaggtggtgccgaagccgcctccaagttcgcctcctccacaagactattcacattggccgagtcccttggtggtatcgagtctctattggaagtgcctgccgtgatgacccacggtggtattccaaaggaagccagagaggcctccggtgtctttgacgacctggtcagaatctccgttggtatcgaagacaccgacgatcttttggacgacatcaaacaagctttgaagcaggcaagcaactag

SEQ ID NO: 58 - DNA, 1482 bp, Saccharomyces pastorianus
atgctgccctatatggaacaggtgttacgggcattctatcagagtaccaattggaatacacaaaatagttacgaagatattacggctacttcgagaacattattggacttccaaattccttctgcaattcacttgcagatctccaacaagtctactcctaacacattcaactctttagatttctccacgaggtcaaggataaatggttccttgagttatttatattcagatgcacaggatttagagaagtttatgcgtagctctgccgatatcccattacaagatgccactgaaacatatagacatttacaaccgaatttgcacttcggcagcaatggtagcaacaccacgaagattggcgaagatgtaatcgaggttaataaaaaagcgttgcatgattcgaaatttgttaagaaatctctttattacggtagaatgtactatccaagctcagatttggaggcaatgataacaaaacgactcacccagcaaactcaattcatgcttaagggagtcagtagtttcagagagaacttaaacgttttaacatgctatttccaaagagattctcatcggaatctacaagagtggattttttctaccagtgatttattatgcggatatagagtattgcacaatttccttacaacgccgtccaaatttaacacttcattgtacaacaattcctcgttgtctcttggagctgaattttggttggggttggtcagtttaagtcccggttgttccacaactttaagatattatacacactctaccaatacgggacggcccttaactttgacagtttcttggaacccattattcggacacatatcttccacgtattcagccaagacaggaacaaactctacattttgtgctaaatacgacttcaatctctattccattgaatcaaatctttcatttggttgcgagttttggcaaaggaaacatcttttacctaagagcaaccacaataaaaagctcaatgacgtaccagagccgatggcccgtgactcagtggctgagagagggaataagagaacggcggcgctactacatgaaaatgtaccgaacctgaactcggttgacaacaaaaatgtatcttcatcggatataccagatcataagcaaaagttattgaatgacttgacttatgcattttcgtcatctttgagaaaaatagacgaagaaagatccactattgaaaaattcgataacaagataaacaattccatctttaccggtgtttggaaactaagtacgtcattacgcgataggactttaaagctattatgggaaggtaaatggaggggttttttgatatctgctgggacagaactagtatttactaaaggttctggaggggctttgcccaacggtgagaagaatggtggtgatgcagtagcgatacttgatacagaaaacaatattccgattcttcccgccaaatttggtatacaattccaatactccacatga

SEQ ID NO: 59 - DNA, 780 bp, Saccharomyces pastorianus
atggagccagagagcataggcgtcgtggggaacttcatccaggatgataatgatagtgcgatatccgggcctcgcaaacgttctggcagtaagacatctagtgcaaagaatacacggaactctagtaacatctccccagcatcaatgatcttcagaaacttgctgataatggaggacgatctaagacggcaagctcatgaacaaaaggtattgaaatggcagttcactttgtttctagcatctatggccggcgtgggtgcgttcaccttttacgaattgtacttcactacagattatatcaagggattccacagagttattttgcaattcactctagctttcatttccattaccgtagttctttttcacatcagtgggcaatataaaagaaccattgtaattccaagaaggtttttcacgtctactaataaggggattaggcaattcaatgtaaagctggttaaagtacagtctacatgggacgagaaatatacagattccgtgaggtttgtgagtcgaaccattgcgtatggcaacatttactgtttaaaaagatttgtgtggcttaaagacgataacaccatcgtgaaattttggaaaagtgtcacaatacaatcccaaccgagaattggagctgtggacgtaaaacttgtacttaatcccagagcattcagtgcagagattcgagaaggctgggaaatatatagagacgagttctgggccagagaaggagcaagaagacgcaaacaagcggatgaactccgacccaaatcagagtaa

SEQ ID NO: 60 - DNA, 606 bp, Saccharomyces pastorianus
atgagttcagcctttaatatgcataaactggtgtttcgtaatttgaatgctggaaagttcatgtttaagaacctccccttatggaggtctaaaactagtattaagctgggagtgccctttacccgctctattggactagccactgttggtgtcgctgctagtgggctgctattgatgaattaccaaccttcaaggttgatattcaatgattctttgagtggggctgcgaagcaagatagcattctagaaccctgggagcccaaggtagccaatgatgtggctatgacagaggagagaaggaacaaaataagtagcaacaagcagatgtttttaggatcattgtttggtgtagttttaggtgtcacagtggctaagatatctattttgtttatgtatgtgggtatcacaagtatgctactttgtgaatggttaaggtataaggggtggattcgaatcaatttgaaaaatatcaaatccgttattgttttaaaggacgtagatttgaagaaattgcttattgatgggttattaggtacagaatatttgggctttaaagttttctttacattgagttttgtactgtcaagcttaaacgccaataaataa

SEQ ID NO: 61 - DNA, 648 bp, Saccharomyces pastorianus
atgattaaatcttcaattgctctacctactttcttcgttgttttgattttggcgttggtcaattcggtgcatgcatcttccggttatgctccagttgctatcactttgcctgcattcagcaaggaatgcctgtactacgatatggcttccgaagacgactctctggccgtgggttaccaagtcctgactggtggtaatttcgagatcgattttgacatcactgctcctgacggatctgtgattactagcgaaaggcaaaagaaatattccgatttcctagtaaaatcatttggcgtgggccagtacagcttttgcttctccaataactacggtacagctttgaaaaaagtcgaaattacgttagagatggagaaatcactgactgatgcatccgcacctgaaatgaacaatgatgatattattgccaacaatgctgtagaggaaatcgacagaaacttgaacaggataaccaaggccctaaattatttgagagctagagaatggagaaacatgtctaccgtcaactcgaccgaatcgagattgacatggttgtctatactgattatgatcgtcgtcgtcgttataagtgttgctcaagtcctactcatccaatttctcttcactggtcgtcaaaaaaattacgtctaa

SEQ ID NO: 62 - DNA, 1938 bp, Saccharomyces pastorianus
atgtcaaaagctgtcggtattgatttaggtactacatattcgtgtgttgctcatttttcgaatgatcgtgttgatattattgccaacgaccaaggtaacagaactaccccatcttttgttgcgttcacagacactgaaagactgatcggtgatgccgccaagaaccaagctgctatgaacccttcgaacactgtgttcgatgccaagcgtttgatcggtagaaacttcaacgacccggaagtgcagggtgatatgaagcatttcccattcaagctgatcgatgttgatggtaagccacaagtccaggtggaattcaagggtgaaaccaagaagttcaccccagaacaaatctcttctatgattctaactaagatgaaggaaaccgcagaatcttacttgggtgctaaggtcaatgacgccgttgtcactgtcccagcttacttcaacgattctcaaagacaagctaccaaggatgctggtaccattgctggtttgaacgtcttgcgtatcattaacgaaccaactgccgctgccattgcctacggtttggacaagaagggtaaggaagaacacgtcttgattttcgatctaggtggtggtactttcgatgtctctttgttgtccattgaagacggtatcttcgaagttaaggccaccgctggtgacactcatttgggtggtgaagatttcgacaacagattggtcaaccatttcatccaagaattcaagagaaagaacaagaaggacttgtctaccaaccaaagagctttgagaagattgagaaccgcttgtgaaagagctaagagaactttgtcttcttctgctcaaacttccgttgaaatcgactccttgttcgaaggtgttgacttctacacctccattaccagagccagattcgaagaattgtgtgctgacttattcagatctactttggacccagtcgaaaaagtcttgagagatgctaagttggacaaatcacaagtcgatgaaatcgtcttggttggtggttccactagaattccaaaggtccaaaagttggtcaccgattactttaacggtaaggaaccaaacagatctatcaacccagatgaagccgttgcttacggtgctgctgtccaagctgctatcttgactggtgatcaatcctctaagactcaagatctattgttgttggatgttgctccattatccttgggtattgaaaccgctggtggtgtcatgaccaagttgattccaagaaactccactattccaaccaagaaatcagaaacattctctacttacgctgacaaccaaccaggtgtcttgattcaagtctttgaaggtgaaagagccaagacgaaggacaacaacttgttgggtaagttcgaattgagtggtattccaccagctccaagaggtgtcccacaaatcgaagttactttcgatgtcgactctaacggtatcctaaacgtctctgctgttgaaaagggtactggtaagtctagtaagattaccatcaccaacgacaagggtagattatccaaggaagatatcgaaagaatggtttctgaagctgaaaagttcaaggaagaagatgaaaaggaaactgaaagaatcgcttccaagaaccaattggaatccattgcttactctttgaagaacaccatttctgaatccggtgacaaattggaacaagctgacaaggacgccgtctccaagaaggccgaagaaaccattgcttggttagacagcaacaccactgctaccaaggaagaattcgatgaccaattgaaggaattgcaagacattgctaacccaatcatgtctaagttgtaccaagccggcggtgctccaggtgctgatgctggcgcaggtgctgctccaggtggcttcccaggtggtgcccctccaccagctgcaggtgctgaaggtccaactgttgaagaagttgattaa

SEQ ID NO: 63 - DNA, 1629 bp, Saccharomyces pastorianus
atgcatcgaaaatcatccagaagaaccagttcaaatatacgtatggctccgtaccgaaaacaaattatcagcaatgcacgtaataaaccagggcttctatccaaaataaaaacttttttcactcaaatcgatccaataaaagtaaattcagaaagtaaagttactaatgaaagagtcggcaataagctttctggaagaagagtcaccagtataccaggaggatattttcaaccagacgcattatcagattctagtttccaccgttctgaggcagccactactctgcaagagggtagaagttgccttggaaataaggaggaactctgtgatgaaaccgatgaatccaacgtctctaacgccaaactcgcaaatttctttagtagaaaaggtaatgaacctttatcagagattgaaatggaaggtgtgatgtcattgttacaaagatcaaacaaatcaatgattgcccccgaaagagaacagaaattatcggaaaatagtaatgtcggtcaatcgctagttttgaaagaatcaggaagtacgccaatcaacatatctaatacaccgactttcaatccaaaatatgattcttcagccgtttcgaatgcctcaatgaatacaactttaggaagcattggctcaagaaaatatagctttaactattctagtctcccttcaccatacaaaaccaccgtttatcggtacagcgcagcaaaaaagatgcccgatacatgcacagcaaatacatctgttcaaagcatagcatcggtaagatcagccagagctggcgtctcaaagccagctcctaccaagaaaataagtaacactgcagcagcattggtttctctactagacgaaaaagatatcaagaagaacaaccctgcttcacaacttgccaatccatactcatcatacgtaagccaaatacgcaaacataagaaggggtcctcaaattttgtaacaggccaagaaaagaatcaagaatcctcagttaaaactttaccatctgaaaaggctcttgaacaaagtgaagaattagtaaaccaatctaacaataccaaaatcgcaccacctgcaccaaataaggacacatttactaaatataagcctgcgagatcttcgtccttacgctcaaacgttgtagtagccgaaacatctcccgaaaagaaagaggctgccgctaaagctccatcttccacatttagcttttctttcaatggtgcaaaaaaagaggaaccttctaatggtgagcaaaaaagtgagaatgccccacctccgctagccaaagagttcgtttttaccaagttacagacaaacccattatttgaaaagccaaaagctgaaatggccaaggtagactcttctccgatagaaccaaacttttcagtaacacctcaaaaaaatgtatcgaatagctccgctttcaacagcgttcaaaagatgccaccattaaattttccacaacaaaaaggcggcgagcttgaaactactcagagcacaatagggaaagacattttaatgaaagaactgcaggaatttgatttcaacgttcctgtgacgtctaaatcactaggaaatggttcagttgatgaaaataaagttgaggcctttaaatctctttatactttttga

SEQ ID NO: 64 - DNA, 660 bp, Saccharomyces pastorianus
atgcttttaactgccctattgcagatttttgcctgctgcctagtcttgccagctcaagtttctgcgttctatttttataccactggtgctgagcgtaaatgtttccataaggaattatcgagaggtaccttgtttcaaggaacatataaagcacaaatatatgacgacgacttaaagggatacagagatgctggtgcgcaagatttcggtgtcgtaatcgatattgaagaaacatttgacgacgaccatttagttgttcatcaaaagggttcggcaagtggtgattacactttcattgcactagaatcaggtgaacataaggtttgcatccagcccgaagctggcggttggttgattaaggctaaaaccaagattgaagttaatttccaagttggtacagatgaaaaattagactctaaggggaaaaccactattgacatcttgcatgccaaagttaacgttttgaactccaagatcagtgaagtcagaagagagcagcaattgatgagagatcgtgaagctaccttcagagatgcgtcagaatccgtaaattctcgtgctatgtggtggattgtaattcaattgattgtccttacagttacctgcggctggcaaatgaaacacttgggtaaatttttcgttaaacaaaagattttatga

SEQ ID NO: 65 - DNA, 1866 bp, Saccharomyces pastorianus
atgagcagcattcaactttcgaagggagacttccacagcatcttcaccaacaagcagaggtacgataatcctaccggtggcgtttaccaggtttacaataccaggaagtcagatggtgccaatagcaacagaaagaacctgatcatgatttcagacggtgtctaccacatgaaggctcttttgagaaaccaggccgcgtccaaattccagtcgatggagctacaaaggggcgatatgattcgcgtgatagttgctgaacctgctattgtcagagaaaggaaaaagtacgttcttttggttgatgattttgagctaatccaatcccgtgcagaaatggtcaaccaggccagtacatttttagataattacttctcggagcactcaaatgagacattaaaggatgaagatataaccgataacggcaatgccgctaaccaagcaaacgccggcaatgccggagttccagatatgctccattcaaactcaaacctaaatgctaacgacaaaaagttctccaacgaaagctctggctctcaaaaatccaaaccgatttttgccattgaacaattgtctccataccaaaacgtttggacgatcaaggcaagagtttcctacaagggagaaatcaagacctggcacaatcaaagaggtgatgggaaattgttcaatgtcaattttttagacacctctggggaaatcagagccactgctttcaacgacttcgctaccaagtttaacgaaattttgcaagagggcaaagtatactacgtttcaaaggcaaagctgcaaccagctaagcctcagtttaccaacttgactcatccttatgagctcaatttggatagagacaccgtcgttgaagaatgttttgacgaaagcaatgttccaaagacccatttcaacttcatcaaattagatgctatccaaaaccaagaggtaaactccaacgtggatgttctgggcattatccaaactatcaacccacatttcgaactaacttccagagctggaaaaaaatttgatcgtcgcgatatcacaattgtcgacgattctgggttttctatctcagtcggtctgtggaatcagcaagcccttgacttcaacctccccgaaggttctgttgccgccatcaaaggtgttcgagtaacagattttggcggaaagtctttatctatggggttttcaagtactttaattcccaatccagaaattcctgaagcgtatgctctaaaggggtggtacgattctaagggacgtaatgccaacttcatcactttaaagcaagaacccgggatgggcggtcaatcagctgctggcttaacgaaatttattgctcaacgtataaacattgctagggctcaagccgaaaacttgggaagaagtgaaaaaggtgattttttcagtgttaaggctgctattagtttcttgaaggtcgacaattttgcatatcctgcctgttccaatgaaaactgtaacaagaaagtcttggaacaacctgatggtacttggagatgtgagaaatgtgataccaacaatgcaagccctaattggaggtacatattgacaatctcaatcattgacgaaactaaccaactatggctaactttgttcgatgaccaagctaaacaattgcttggagttgacgctaatggtttaatgtctttgaaggaggaggatcccaatgaatttacgaaaattacccaaagcatccaaatgaacgaatatgactttaggatcagagcacgcgaagatacatacaacgatcaaagcagaatcagatatactgttgccaacctacacagtttgaatcacaaggctgaagctgattatttggcagacgagttatccaaggctttgttggcttaa

SEQ ID NO: 66 - DNA, 921 bp, Saccharomyces pastorianus
atgtcaattacaaagactgatttggacggaatactgccattggtggccagaggtaaagttagagacatatacgaggtggacgctggtacgttgctgtttgtcgctacggaccgtatttctgcatacgatgttatcatggaaaacagcattccagaaaaggggattttgctgaccaagttatcggagttctggtttaagctgctctccaacgacgtacgcaaccatttggtggatatcgctccaggaaagaccattttcgactacttgcctaaacaattgagtgagcccaagtacaaaacccaactggaaggccgttctttgttggttcacaaacacaagctaattccattggaagtcattgtcagaggctacatcaccggatctgcttggaaggaatacgtaaaaactggcaccgtgcacagcttgaagcagcctcaggggctcaaggaatctcaagagttcccagaaccaattttcactccttcgaccaaagctgaacaaggtgagcatgacgaaaacatttctcccgcccaagctgctgaactggtgggtgaagatctgtcccacagggtggcagagctggccgtaagactatattccaagtgcaaagagtacgcaaaggaaaagggcattatcattgctgacaccaaatttgaattcggtattgacgaagagaccaacgaaatcatcctagtggacgaagtgttaaccccagactcttccagattctggaacggtgcctcctacaagctaggcgaatcccaagattcttacgacaaacaatttttaagagactggcttactgccaataagttgaacggtgttaacggtgtggaaatgcctcaagacatcgtcgacagaaccagggccaagtacatagaagcttacgaggcattgacgggctccaaatgggctcattaa

SEQ ID NO: 67 - DNA, 1317 bp, Saccharomyces pastorianus
atgcatagacgacagtttctccaagaatatcatagcccgcaacagcagcagcagcagcaagggaatccacctagatcggattatcaagttctcgaagaaatcgggagaggttcatttggatccgtacgaaaagtcatacacatacccaccaagaagcttttggttagaaaggacattaaatatggtcatatgaatagcaaagagagacagcaattgattgcggaatgtagcattttgtcacagctaaagcacgagaatattgtggagttctataattgggacttcgatgaacagagagaagtgttgtacctgtatatggagtactgttctagaggtgacctgtctcaaatgattaaacattacaaacaggaacacaaatacataccagagaagatcgtgtggggtatcttggcgcagctattgagcgcgctctataaatgtcattacggtatcgaattgccaaccttaaccacaatatatgatcggatgaaaccaccagtaaaggggaaaaacatcgtcatccatcgtgacttgaaaccgggcaatatattcctcagttatgatgacagtgataacagtcttaatgaggaagtcgatggccacggtgaagtgaacaataactactacagagaccgtagagtaaattcacgcaaaaaggggagtgctatggactacagccaagttgtggtgaaactaggtgactttgggctagccaagtccctcgaaaccagtatccagttcgcaactacatatgtgggcacgccgtactatatgtcacctgaagtgctgatggaccaaccgtactctccgctatccgatatttggtcattgggttgcgtaatattcgagatgtgttcgttacatcccccattccaagccaaaaattacctggagttacaaactaagatcaaaaatgggaaatgtgagactatccccgagtattactctaaagggcttaatgctataatccattcaatgatagaagtgaacctgagaaccaggccttccactttcgagctgctacaggatatccaaatacggaccgcaaggaaatctttacaacttgagagatttgaaagaaaactattggattacgaaaatgaactgacaaacatagagaaaattttagagaagcaagccatggaatacgaaagagaactgagccagttgaaggaacagtttacacacgccgtggaggaaagagccagagaagtagtgaacggtaaaaaaattggcaaagtcccagaatctattaacggatattacggtaaaaaattcaccaaacctgcataccactggcaaacgaggtaccgttga

SEQ ID NO: 68 - DNA, 2925 bp, Saccharomyces pastorianus
atgaacagcatggctgacactgatagagtcaacctgacgccaatccagagggcgtctgagaagtctgtgcagtaccatctcaagcaggtcattgggaggggctcgtacggcgtggtttacaaagccatcaacaaacacacggatcaggtcgtagccatcaaggagatcgtgtacgagaatgacgaggagctcaacgatataatggcggaaatcagccttttgaaaaacctgaacaataacaatattgtcaagtaccacggtttcatacgaaaaagctacgagctctatattctcctcgagtactgtgctaacggctcattaagaagactcgtctctagaagtcccactggcctgagcgaaaacgagtccaagacctacgtcacacagaccctttgggggctcaagtatctgcacggcgaaggtgtcatccacagagacatcaaggcagccaacatcctgctgagcgcagataacaccgtcaagctcgcagactttggtgtctccaccatcgtgaactccagtgcgttgaccctggcgggtacgctcaactggatggccccggaaattctgggcaatagaggcgcctccacgctcagcgatatatggtccctgggagccaccgtcgtcgagctgctcaccaagaacccgccataccataacctcacagacgctaacatctactacgcggtcgagaatgacacctactacccgcccactgcattctctgaatcgctgaaggactttttgtccaagtgcttcataaagaacatgtacaagagacccacagctgaccaactgctcaagcatgcgtggattacctccacggaaaatgtaaaggttgataagctcaacaagttcaaagaagacttttctgacgataactaccattgggattctgactttcaagaagaaaaactagacatatctccgtcaaaattcagttcggcggcggcccccgctgcctggacagaaaataatcaagaaatggagttagtcccccagactgagatccatttgttgggccaattgaagagcccgtccaagcctttgacggacttgcacgggcttttcagtgtttgctccctcgaaaacatcgcaaatacagtcatcgagtgtttatcccgtacgactgtcactgcacactcaataaccacatttggctccatcttcgcatatgacacagaaaataaccactctcgcttgcgactgaaattcatcgccatgggcggaatcccctcgataattaagtttgagtatctagtcaagtattttgtcaacgaccaccctcagaccctaattgaatgcggaataatgcatccggtaaattttgcatcgttgaaaacccctaaatgcgtcttggaactcgtttacaggtattatgacttgacttctactgccttttggtgttgctggtgttctcaacacctcagcttatcgctccttcttaataacatgcacgaaagaagagcacaatcaataattctaaaactatcatcgtacgcaccgtggtctttcgaaaaaatcctgccctctctgatcaactacaggctgaaaaaaaaaattctatccaaccctcaaaccacttacatagtcttcaagtcaataaattatatgataaccacaaacgacgataaaatccacaggtccaccgccccctcttcgtcctcgttaccattgtcctcttcgcccacaaaaaacacaccattgaactcggtaccgtctccctcgaggtctcccgttcactctttgatggcaacacgcccatcgtctccaactcgacacaggagcgtttcgaacttcccgcatttgaccatctcttcaaaatcaagacttcttatcgacttaccggagggctttttcacctggctaacttcattttttgttgacatgcttcaaatcaaagacgtttctgtttggaagtactttatcaaactttgctacctaacagtacatttaaacaaaacgctgttgaacgacctgctcgataacgatgcgtttttcgttttcattcagaacattgacaccatcaccacgtccgacgatggcaacaagaattcatccttcatttggaaacaaattacggccatatgcgttgatattagtttagacatggaccaaatgaacctctccttgttttcaacggcaatgggtttcattaaaagaagaaactacacatctattagcgggttggagatcgtattgaattgtttgcatttcacattacgcaatgcgtctaatgaagacacccctacggcgatcacagaaggctctcaaaattgtcttctcatcaaggttaaagataattctgccattgaactgccgattgatcaatttgttgccctattttatgaattaaatgacggtgatgttaatctcagtaaactaattagcattttcaccaagatatgttcactccccggttttgaaactcttgcaattgacatcatattacatccgaatttctatgacaagattgttctgttttttggtacttatttcaacagtctacttattcaaatcgatttattaaaattcgtgaaattgatatttacaaaatcgttgttgaagatgtatgattacacggggttgccagatccgataaagcaaacgaaatcgactcatcacagtaaagccactattttcaagcttcgttcaatactagtacaaataactgagtttttgaatagaaactgggacaagaaccatccaaaaaggaacgccaaccaggttggtggtgactcggttctgatctgccaactatgtgaagacattcgttcattatcaaaaaagggaagcttgcaaaaggtacccagcgtcacggcagcaattggcagttcgccaacaaaagacgaccacgcaaatccgcgatcttctagaccaaacagtgatggatattccgcaccttctatcacatcccaaacttaa

SEQ ID NO: 69 - DNA, 591 bp, Saccharomyces pastorianus
atggcggaaaacgaacgtacgtttactgcacctcagagcttactcgattccaaccttacctttctgaacgatgaaccgacacctactacaatcactctcacacgagaacgatgcgttgatccaagtttaataaactcatttctaaggattttaaggcatggtagtgatgatgtaataagacagaaattgaacaattacagaaaaccttcctctatcagcgaaaaaaagtgtgacgcatttttaaagcaggaactatatccaaattggcaaatacggagcagtataatttcattctgtgatcaagaagcaacgcaaatgaaagctgagacagaccgaaaattcagcaacactggatcgagtgccacaggaaccattactgatgctagaattgacccttacgcagcgagggaaaaactagaggatcaagaggctcgatatagggattggacaagagtaaaggaatgggtggcgaataacgaaaaaatagaacaaatcttaacttctacaacagataggattttaagacaaaattgcgagcaaaacaaaaattacttggaacagtttgcacagttctgtaaagacaacacctga

SEQ ID NO: 70 - DNA, 3033 bp, Saccharomyces pastorianus
atgtttagaaaaagcagacgtttaaaacatgtgtcaaatgcaatcaaatccgcaagagttcatgatgtctcaaatggtatcgactctaaagtttttgatgctaaaaggataactacgtatggtattaatggacggataattatgactacgtttgactatacccaaagtcttctggctgttgctactaccgcaggcgaaatacacatctatggccaaaaacaaatcgaagtggtattcacgctaaaaaatagggctcaaattaaggacatgaggtttgttaagggaatatatttgatagctgtagatgataaaaacaacgtattgattctttcagtatattccaaacaagttttgaccactgttttttgcccaaacaaaatcacctgtatcgaaacggatccatcgctagactggctgctgatcggtcttgaaactgggtcagtaatgatatatgatgtgaatagaaaccaaatgtccaaactgagaattgagaacttccaaaaaagtatgtttttaccaaaagagagactatcacccattgtgtctattcagtggaatcccagagatataggaacagtgttgatatcatatgagcatgtcaccgtcatatattcatttgtagatgctactattaaacaacatttctactatcaactagaaccatacgcaccaggcggtgacctatctacaaatatagaaaagagaaggacgccgaaggtcattcaatcactttaccacccaaattcgttacatattttaaccgtccatgaggataattctttagtgttttgggatgtcagcagtggtaaattggttcaagcgagaagtatattcgaaacacatgtgaatttcccaaattccacttcaaaagatgactccttgagagaaagtctagccattctcaaagttgcatggctttgccagcgtaatcctgaatatacatcattactgattgcaacaaaggctacaaacaatctcggctccccacaggggctaataatgatcgacttgggcggcacacctatgtattctattacatcgttcgatgcaatgagcaagtactatgctaaaccggtacagcaaaagctattctcatttgtcggcaaggcgccccttataaacttcctgcctttgcctaagggttcgccatattttggtggcggccatgatacaaatcttattctattgcttttggaagacggtgaacttgaaacattaatatatccaacaggatctttcagttctagggcctcgatatttccccgaagtttagcttgggtcagaccaacagttaccacctctgtagctgagtcagtcccaaagaaattgtggctaggaatgatgacaagcgcacaaagtgattcgtttctcaaaggcgggattcctgcgatgagacatatcagaaaccatgaaaccagatctgctttactgactggccatgttaatgggtcagttagaatatgggacgcttcacatagtgaagtaactgacaatgccgtgtttgaagtgagtactgctaaagtgctcaatagaggtgccactctggctatagagaatatttcattcgcaccagaaactttggaactagcggtagcatccgaagttggtgatgtgattcttttcaaattcgaaacaaatagattttacggacattcacacaggagtgacgccttggaattgaaattcagcagattttcactagatgattcgaacactattcttgtcgatgtcagagatagaggtccctcaaacgttaaacaagggtttatgccgagtacagtgattcatgctaaaaaaggcgtagtgtcaacggtcatgaatagtaacattggattcgttgctatcggttataatgaggggacttttatattactggacagaagaggccctgctattatatttaatgagaacattaggttaatatctaaagctggtagctcctacgtttctgcggttcacttctgtgtcatggaatatggaaacgatggctactctagtatcttgatgctttgcgggaccaatatcggagaaattttgactttcaagatactacctgcagttggtggtagattcgaggttcaatatattgatgcaatgaaaaccaataatcaaggcagaattgcgaagatcgactcttttgcgaaagaaactggatacagttgttgtgctaccattaagaagatgcaagatttaagtaagggggtcccaatacctggttttgccacatccagtggtgcagctgatattcgcctgatatcaccaggtaaatctaaagatactcatgtactgttcaagtgtcccattgcggccagtggattgtcgtttattcctattttaaatagtaagggagagagcaagctcgcaactattatgattgccttactagttaatggagatataaaaattttgacggtacctgagcttaaggaagtcaaaaacgcacactgcccaatccccgtaactgcccaatatattgaaaattcttctgtactgcaaaatggtgatatagtgattcgcaacggtaaattccaagcatctttaatttcagtaattgacgaaagcgccaccggaacaaactccaatattgatacttcacaatctacccctattgatactttatacaaccctgatctgaaaattagttacagaccccaagttaactctttacaatgggcaagaggaactgtttattgcactccatatcaacttgatgaactacttggcggtatcgaaaggcccgaatcaaaatatgaggagagtgctattgctcaaggaaccatatctgacggcagaaatagcaaaaccgaaaaatcgtttgtcgggaacggtgaacacatgtacgccaaacctgtgagaaataaggccaaaagcggtggatatggtgttcttaagagtgtaactagagcagttgaaacacgtctagacacagtggaaaccaccatcaatgattacgcaaccacgatgggccaaactatgaatgacgctatggaagaaacgggaagagacctcatgaagaatgccgtgggtttttag

SEQ ID NO: 71 - DNA, 3420 bp, Saccharomyces pastorianus
atgagtttttcacaactggagcaaaatatccagagaaagatagcagtcgaagagaatattattcggggagcttccgccctcaagaagaaaactgacaatgttatggtcattcaaaagtgtaacactaatattagagaggcacgtcaaaatcttgaatacttggaggataatttgaagaaattacgaatgaagactacccaagaacatcaaggtcaaaatgccgatgaaaataatgatcaaagaaattctaaagaatacggattccttgctaccatatctctggaagaacatatcttttctcgtttggatttagtgaagtatgattgtccttcgttagcgcaaaagattcagtatatgttacaacaattagaattcaagctgcaagtggaaaagcaataccaagaggctaacaccaagctgacaaaactgtaccaaattgatggtgatcagcgtagcagttctgcagcagaagggggtgccatggagtctaaatacagaatccaaatgttgaataaaattttaaaaaaatatcaagctattaatgttgatgttggccaatttaaacatcaaggcaacgacatgatcgataaccagcagccaaagtttagaagaaaacaattaacaggcgtcctgactatcggaataactgcaattagagacgttgatcatatacagtcgcctatgtttgccagaaaaccggaaagttatgttactgtaaagatcgacgatacaatcaaggccaggacaaagccttccagaaatgacagatggagtgaagacttccaaatttcagttgaaaaggggaatgaaattgaaatcaccgtttatgataaggtgaacgattcgttgattccagtcgcagtgatgtggttactgctttcagatattgctgaagaaattcgtaagaaaaaggctggacaaacaaatgggcaacagggctgggttaacgcatcaaatattaacagcagttcatctttaactaatgaggaggggagtactttaacgtccactaactccaactcggccattcagtcatccttgaccaaaaatgtacaggaagacaatgcactaactggccaaattagtacgaactcgtggtttgttttagagccatctggccaaatattattaacgttagggttccacaagtcttctcaaattgaaaaaaagcacttagtgggtggcctgcatcgtcatggtgctatcatcaacaggaaagaggagatatttgagcagcatggccatcatttcgtacaaaagtccttttacaacattatgtgctgcgcatattgcggggattttctacggtatactgggtttcaatgccaagactgtaaatttttatgtcataaaaaatgttacaccaatgttgtcactaagtgtattgctaaaacttctactgatacagatccagatgaagcaaaattaaatcatcgtattccacatagatttgtgccaacttcaaatcgtggtacgaagtggtgctgccactgtgggtatattttaccctggggtagacataaagtacgcaaatgttctgagtgtggtataatgtgccacgctcaatgtgctcacctagttcccgatttctgcggtatgtccatggaaatggccaataaaattttgaaaacaattcagaacacaaagcatagccaaaaaaaaaagaagaaaacagttccatcccataccggatcatcaccttctactgctactggaagcgatcgatctccaactaaatttatagatagaacaaacgctcccttaccgccccaaaaagcggaaagagactctccgacgagggagcgtgaacctattattgatgaacgaattccattaaaaacaggcggacatgataaattgaatagatttattgatgagaacgaggcttatttgaattttacagagggtgcccaacagtccgctgaacttttaccagaagaacaaactttagatccaacattgaacaaccgttttaccgaactcactgacttgtctatcgaacaaagccaaacgtgggaatccaaagatgaatcaatgagggatgaactcgaacagtggaaggcccaacgtgacgaaatggatcgcgaaataaataaagacaacagggacataccagaggacacggaagtcgatcatatagatctagaaactaaacagcaacttgattgggaggatagaaacgagtttcgcgatgcggacttgacaattgattcttcacacacaaatcctttccgcgatatgaatagcgagacttttcaaatcgaacaagaccatgtctctaaagaagtaatacaagaaactgtgtctttagctcctacaagtacccatgcctccagaactactgatcaccaatctcctcagaaatcacaagccagctctggcggcaaactgaaaaagaaagccgctaagcgccgtaaggtgtcattggataattttgtattattaaaagttttaggtaaaggtaattttggtaaggttatcttgtctaaatcaaaaaatactgacagaatatgtgctataaaagttttgaaaaaggacaacattattcaaaatcatgatatcgaaagtgccagagcggaaaaaaaggtgttcttattagctaccaagactaagcatccatttttgactaatctattctgttcctttcaaaccgagaaccgtatttattttgccatggaatttattgggggtggggatttgatgtggcacgttcaaaaccaaaggctttctgttagaagagccaagttttacgctgctgaagtgttattagctctgaaatattttcacgacaacggtgtgatatatcgtgatttgaaattggagaatattttgttgactccagaaggtcatataaagattgccgattatgggctatgtaaagatgaaatgtggtatggtaataagacttccacattttgtggtacaccggaattcatggcacctgaaatcttaaaggagcaggaatataccaaagctgtagattggtgggcatttggagtattactatatcaaatgctattgtgccaatcaccattttcaggcgatgatgaggatgaggttttcaatgccatcctaaccgatgaaccactatatccaatagatatggcaggtgagatagtacaaatatttcagggcctcttaactaaggatcctgaaaaaagactaggggctgggccaagagatgccgctgaagttatggaagaaccattcttccgcaacatcaattttgaagacatcttaaatcttcgtgtcaagccaccatacatcccggaaatcaaatcacccgaagacacatcatattttgaacaagagttcacctcggcaccgccaacacttacacccttgccatctgttttaaccactggccaacaagaggagtttagaggattttcctttatgccagatgatttggatttatga

SEQ ID NO: 72 - DNA, 648 bp, Saccharomyces pastorianus
atgagtgaagaacaaccttcaagccaggttaacggtctgcgtgactcgttgaatagatggaaccaaacaagacaacaaaattcgcaaggtttcaatgagtctgccaagacactgttttcgagctgggcggactccctgaacactaaggcccaggatatataccagacattgcctgtgtctagacaggatctggtgcaagatcaggagccgtcgtggttccagttgtcaagaacggaaagaatggtgctcttcgtgtgtttcctgctgggttcaactgcatgcttcactctttgcatctttctcttccccgttttagctaccaagccaagaaagtttggtctattgtggacgatgggttccttattgtttgtatttgcatttggggtgctgatggggccactggcttactttaagcatctgacttccaaggaaagattgccgtttgccgttttcttttttgccacttgctttatgacgatttattttgcagcctttgccaaaagcaccgcgctcactataacgtgtgccgttctggagctaattgctgtcatatattatgcaatttcttatttcccgtttggtgcaacaggtttgaggatgttgagctccgttggtgtcaactccgcgagaggtgtcctacgcatataa

SEQ ID NO: 73 - DNA, 3399 bp, Saccharomyces pastorianus
atgccttttatatcatcgagatcagtggcgaaaaattcctcgcactctttatcagaaacagatctgaaccattccaaaggacaactctctcaagcctcccccacagagaaatcagggtccatgcagcaacgaagaagatcctccaccatcaagcatgcgctgtcgtcgtttctcggtggtgcagccgctaatgccacctcaaattccatcttgcccaaaagtgtgaaaaacggcactaccaacttcaacatcagaagcagccatacagacgcccaactctcgggtaaaaagcagaacaaacagctaccccaagaagctagacgacatagcactaccgccgttacaggccctaacaatgataacggcaccacctctccgaggtcctcgacctcggacactaaccgccggtccctgggacggtcgtcggtagatcaggaccctcggaccgcaggcgttcgctattcgcagattgaagaggatagcgaggtcctggattccgacgatgaccacaattcatcggccgtggtgtcgagcgacctatcgtcggcttcctatacaagactgactagctcgaaaaaaaaattcaataagcaatttttgtcagaatatctaaccgctagaggtctattgagccccaaagcagttctttcgaatgacgacttgaaaatttccatctccacgagcggcgaaagcgttttcttaccaacgatatccacgaacgacgacgagtatttgactaggctcaacgggctcaatgacggagcagacgatgctgaagctgattttttcctggatggtcaggaccagccagacagcaatggttctgttcccacaaacaatgacctgcccgcgacgacggcggcacaggtcgcaggaagtggcgcggcaaatgccaatagggacacacttctgagagagaatacttcggaggagcgtccaaacttgacttctgattccacttcaaggtccgttgaaatcgacagctccatggtgtcgtatagcatagccgttataatatctgtcaagaaacaaaccagatttgccgacatacaactggaactatgttcgagggttaaggtgttttggaatacaggcgtgcccccaacaaagacatttaacgaagaattttataacgctgcatcgatgaaatggaacttgaacagcgaaaatttcaatttgtttgtaccgttaagcatctctccagatgaccagatgatcgaaaataacaccaacgatcgtcaaatgagacttttcaaaaacaaacccgtacaagaaagaacctacttggacaagacgaaaacgaaacaagacctcctaggcactatcgacaccaaaaaaaactacctgtaccaacctggtgattacgtgttcttggtaccggtcgtattctccaaccatgtcccggaaacgatttacttgccctctgcacgtgttgggtacagactgagacttgctacaaaggtagttaataaaaaaggcttctacaatcaagatcctaatccccctcaattagccgcatcgcctgattcttcttcgtcgctaagctctacttcctcttccttaaaactcaccgaaacggaatctgcccaagcacacaagaagatcggaaatgccctattccataaggtaaagaatcatttgcatatgagttcacatcaacttaaaagcgaaggagctggcgaggaggacgtttttgcagagtacccattcaaaatcatcagaacgccaccacccgttgcagtgtccactgcgaataaaccgatatatatcaatagggtctggacagattctttgtcatacgaaatctcctttgctcagaaatacgtgtcattagatagcgatgttcccataaagatcaaattggcaccaatttgcaaaaatgtttatgttaaacgtattcatgtcagtgtcactgaaaaagttacctttgtcagtaaaggttatgagtatgaatacgatcagacagatcctgtcgccaaagacccgtacaacccttattatttggattttgcctccaagagaaggaaggaaagaagtctatccttgtttgaaatcagaaccaaggaaaagggtggaagggcgctacgagaagaaattgtggagaatgcgttcaatgataatcttttatcttacagtcccatagatgacgacggcgatactaaaggcaaccaaagggaaagaattggcattacggagccaataattattgaaacaaatttgaagttccccaaatatgaagatttagataaaagaaccgctaagataataccaccttatggaattgatgcatatgcaagtattcccaatctcgaacatgctccaactaacggaccatctcatcgtcgtccaagcgtgataggatttttgtcaggtcataaaaactcaaagactcatgacgaaaatgcaaaaactgtttatgattcaaaattccacgaaacaagaatcaagaccaattccggcctgcctgtgaaatcacatacacggttaaacaagcccaaaagaggtttatatctggacagtttacatttcagtaacatctattgtagacacaagttagagatcatgctaaggataagtaagcctgaccctgaaaatccatccaaattaaggcactacgaagtactgatcgacacccctatattcctcgtatctgagctatgtaacagtggtaatatggaactacccacttatgacatggctacaatggacggccaaaataaccacactcctgctagtgtgaataatgatttttttggaaacacatgtccacctccaccaactttcgaagaagccatatctgttccagcttcccccatcgtttctccaatgggatcgcctaatatcatggcatcatatgaccctgatttactatccattcagcagttgaacttatcaagaactacgtctattagtgggccatcaggatccaatgacgagagtagtttaatgaacactaaccgtaacagtatttcgaacggtaatgcaatgaacggaaatattacaaattccgcgtttgcttctaacaacagcggccagggtgtcgccagggcaagagccacatcagtcaacgataggtcaagattcaacaacctcgatagattattgagcacaccatcacctatcaatgtgtcgaatgtctcttcaccagtaaacggctcatcacaagggtatggggatgccaccatacgaaattcaaactctttctctgaagagaaagctgacagttcgaacgcttttttcaaaaagggttacaccctatcaagtgtaaaagacgacgaagaaaaagatggaatagttagttcgagttcggcagaatcattaatttctcgtggtaacgagttattgaacgagccaccacgttatgaggagatagtgcctttgatgagcgacgaggagtag

SEQ ID NO: 74 - DNA, 669 bp, Saccharomyces pastorianus
atggcctcaagcgtagacgaaagcacgattccctcataccactattacgtggatccagaaacaacgtacacgtatcaacagccaaaccctctacaggacttgatatcggtgtacggcctggacgacatctccagacaagtggcaagaacgaacgtggacggcacgaaagccgtgaaactgagaaagtcttacaagaaccaaatagccgatctttcaggaaaattctccaccataccgaccagagaaaatggcaagggtggccaaatagcacatattcttttccaaaataaccctgacatgatgatacaaccatcccagcaggggccgggtcaaaacatgtcagaacagcagtggagcgagcagctgcgcaatagggacatcgcattattccagcctccaaatttcgattgggacctttgctcttcggtgctgtcgcagtttgagagatcatatccaagcgagtttgcgaaccaggctcagggtggcgctcaagcgcctttcgacatagatgacttggcattcgatctggacggtacgggcaaaagtcaatcgggttcaactgcgaacgccaataacaagaaaaggaaaaacaaatctagcggtagctcgatggctacaccaacacatagcgatagtcacgacgacatgaaaagaagaaggctggagtag

SEQ ID NO: 75 - DNA, 1269 bp, Saccharomyces pastorianus
atgtcagatggcaaagtagaaaatgctactgtatcagaattgaaggaattacatttagaaaatgaggctatcgagccgcaaggcgaaaccatagttgacgaatcaggcccaacggaaaataagaagaagaagaacaagaaaaagaagaagaagaagaagagcaatgtgaagaaaattgaattgctgttcccagatgggaagtatccagaaggtgagtggatggactaccaccaggatttcaatctagaaagaaccactgacgaagaatcccgttatttgaaaagagacttggaaagggccgaacattggaatgatgttagaaaaggtgctgaaatccatcgccgtgtgagaagagtcatcaaggacaagatagtcccagggatgaagttaatggatatcgccgatatgattgaaaattccaccagaaagtttaccggtgcagaagacttattagcgatggataatccaaaatctcaaggtatcgggttccctacaggcctttcccttaaccactgtgctgcacatttcacaccaaatgcaggcgacaagaccgtcttgaaatacgaagacgtgatgaaagtggactatggtgtacagataaacggtaacatcattgactccgcatttaccgttgcgtttgacccgcaatacgacaacttgctggctgccgtcaaggatgccacttacacgggtatcaaagaagccggtatcgatgtcagactgactgacattggtgaagctatccaagaagtcatggaatcctacgaagtggagatcaatggcgaaactttccaagtaaaaccctgtcgtaacctttgcgggcacaatatcggaccgtatagtatccatggtggtaagtccgtcccaattgtcaagaatggggacaccacaaagatggaggaaggtgaacatttcgccatcgaaacttttggctctactggtagaggttatgtcacttccggcggggaagtttcccactatgccagatctcgcgacgagcaacaagtaatgcccacattggacagtgccaaaaacttattgaaagtcatagaccgtaactttggaactttacccttctgccgtcgatatctggacagactgggccaagagaaatacttatttgcattgaataacttggtcagacacggtttagtgcaggactatcctccattaaacgatattccaggctcctacaccgcgcaattcgaacacactattctgttgcatgcgaacaagaaggaagtcgtctctaaaggtgatgactactaa

SEQ ID NO: 76 - DNA, 534 bp, Saccharomyces pastorianus
atgttgaggagctcgtgtaggctttcaaggtcctctttaagaagaaattttacaaccgcaggttttttgcgtcagcaaaactctgacatcgacagaattatattaaatccaatcaaactggctcaagggaacaagaacaatgatggccaagcttctaaactcaatagtaacagcgcagatatactatcgatggaaattccaatagatatgatgcagtcagcaggacgaatcaacaggagggagcttctatctgaggcagagattgctaggggtagtgtggaaaacgctcaaatgagattcaattcagggaaatcaataatcgtaaacaagaacaaccctgctgaatcattcaagaggttaaacagagttatgtttgaaaataacattcctggagataagaaaagtcaacgattttacatgaaaccaggaaaagtggctgagttgaagaagtctcaaagacatagaaaagagttcatgatggggttcaaaagattaattgatattgtgaaagacgccaagaggaaaggatactga

SEQ ID NO: 77 - DNA, 8370 bp, Saccharomyces pastorianus
atgaatgatcaccgaatcatggatgcattatacttgttatcctcgaccaaaataaaagaaagaaacaatgctttagacgagctaacaaccgttttgaaagaagatcctgaaaggataccgactaaagttttgccaactacagcggatgctctggtagagctacttgcatctgaacacacaaaatactgtgaaatccttcgaaacttgacggatctaacaaagaacaagttatcactaagtgaaagcagattatccacagtatcatatgttttaagattatttgtggagaagacatgcacacgatttaaagtgaaaacaattaagctgcttttgtcagtagtacctgaattgatggtcaaagagaactccaaaagtttattagatggtgtttcagtccacttgtcgtttgccctggataccttgatcaaaagtgaccctttcaaactaaaattcatggtacaccaatgggtgtctttggtggacaaagtttgtgaatatttcagccaccaaatgcaaatatctatagtcgataagacacttactaattttatatcgattcttctaaacttattaacattagatacagtcggcatttatcaggtgacaaagacaatcatttggagcgttatagactttctaaggctcaataaaaaggaaaatggtaatacaaggttgataatgtccttaatcaaccaattagttttgaggtgccactgcttaagtattattgatatactgatgctcattaaggaaacatggaattacaatctcacaatcggacatacttccaatgaatcagtacaagaccagttatcactgttcgatgttacttcgagtgaactaatgaaccaaaaactgccctatatgattggccaagagagctacaaagaagagcttcgttccgaatcatttctgtctctataccgcgaatacattcttttacgtttgagtgattacaaacctcaatcatttacattagactacattgaatgttcaagttttcgagattcagacgataaaaagtcgtggtttgaactgtgtgatttcaggcttaaggatagtaatggtacatctgtttggctaaaaatactaggaataacaaaatcactgttgacatattttgcactgaacagcaaacatgaaaatacatctttgttatttaaaaagaggagatgtgattcggatataacttctattctacgggtctcagacgatatggacacatttcttatccaccttttgcgggaagaaaactcacacaaattggaattgattgggctacagttgtgctcattttatggagcactaaaagatttcactcaaagttttactatgcagttgaaagaacttctcttttctaaattcgagaaagttcaatcatttaatttggtatgttttacattcatccctttgctatcccaacaaaaatgtaaaatcagtaatgatgatatgacgcgcttattcaaaatttgcttaccattagtgaaatcaaaagaatcatgccagattagctgtcttttgctagttaacgcaataaaattttcgaaacaacttttattagacgagaaaaccgttaatcaaatttatgatctttatgaattatctgacatttcaggacctatattaatctctaatgaatcgttcatgctatgggggtatcttcagcattttgggaaagattttcaatctataaatggttcgtcctcctctgatagaatctttgtgtggctaaaatcaaagtggaaccaattgcatgaaattgatgataggcaggatctgttccccaatttcatatcttggttaggcaacaaatatgatacaaaagatccatttaacgatagaaagtgcaggagaaaaaagccaattttaccattttgggatgaaagctgtcatatttggcagcactttcagaaacagcgggaatttcttcttggtataaaatctggtgaaaaactgaaaagttatgatacacccttctttaatataccaaaagtagccttgaaccttaccaggtacaacgaaattatttacaggctactggaaaatatcgaaaacgaaacatcgctgtcacctctacaaaggtttagatgggcggcaaaaatgctacaaattgtagacaatctctgtggagactctactttttctgagtttatatcagcgtataaaagaacaatttcattaactcttccacatctcactttcgataatcttgcctcttatggattattctttgaggaggttttgtcaatacacacggcaaatgtcaaccacttggtatttgataaaattgatatgaagggcattgttatcgatttcattagaatgcaaaaaagcaaatccaggacaggaacttctatcgttaatcattttcaagcctcctctgaagacggcacttgggatcttagcccggatgcgagaggacgtaagttccaaggacgttaccactcagatatggataaagcatttcaagcttatctttgggcttcagaggggagaaacgtttcggagcgtttggttgctatattggaattctctgactgtattacgaccgatatattcatgtcttgccttggcgctttttgccaatggctaaagcaacagattgcggatcattctccgtataataaagttttagaggaattcacagaagctctgggagaaaagttgctttgcaatcattatagttcttccaatcaggctatgtatttgcttacctcatatatcgacggaattagacagcagtggctatcataccctgacaaatccttgaattccgattgtaatgatattctcgactggataatatcaaggttcgaagataattcgttcactggtattgcacctacgattaacctgtccaaactactactcaacctacttcaataccacgatctttcccacggatcagtcagaggggggaagcaaagagtatttgctacatttaccaagtgcttacaaagggtagattcatgcgcaattattaacgaattggacatcatttcaaactacatggcccaggtgagctacaaaaatcaaagtataatattttctgaagtcaaaaacttgtttggttcccctcagcagagtcttgaaaaatcagccttttactcacttacaatgtctaaattatcattagtttcttacccaagcttggtattttctttggaagatatgatgacatattcaaactttaaccacacgcgcacgtttatcaaacaagcattgaaacaaatagcaagtgatttaaaccatcaagatcttatgcagctctttgagttctgcaagtttgatctaatcatgtactggtttaacaaaatcaaagttcctaatgccaaacttgaaacagaatgggatatatctctgtttgaatttgatgatatgcatcaatttttggcaaaatatcttgttgagatttctgcaatatatttttctcacggttttaatgaaagaaaagtcctgaaattattacatgaaatttccgaacatgacgatgcctacctggttgaaaatagctattatctatgcataccacttgcctttatcggtggcggtataaatgaactagtattcgatataatacctcaaatatcaggtaaaacaacggcaaaaaattaccaaaaataccgtttgttaatgctaaaatggatcataaggtttacagacctaggctcgctaacagaggttcggtcaatcattgaaaaactatatccagattcctaccttgccaaatatttgtttgagaattctactgcgtctatgaggtaccaatacccacttcatatacctttaattgccggaacaaacttaatccaaaaacacttttctaatgaagaaaattccgctcaagaattcaaactgttgtttctttcagttgtcaccgaccttgaagaagcgtcgactcatacaggaaaattacgaagtgtcagggaattgaagtatctctttgtgatatatgaaaatatacttttaaactcaacaatctcgaactttatcatagttcgactttcaaagtttttggttgatatacaaatccatgatgaaattatcacaattttcaactcaatttttaacctcgttgacaaaaatatgcttatggtagaacggtcgttgtccatcttcttttgcaaagttttcatatatttgagagagaacaataaagaactcaatccgtcctttaaaaaaactataaggcttatagagcactggaacctcatgaaaaaaaagacttggaaacactgccttgatgcgatactcggaaatatgattcaagatgacatatatgaaaacactgaggtattggaagcgagtgattgtgctacaaacgacgttatattactttctttacttttctcacacgctaggaaaccagtaacgtcaaagatagattatttcgtttctagtacatttgcgtgtaacattctaaaacatcatgttccgaaggaatatctcagtctaaacttcaaattgtggttcgcaaatctcgcgaataaattttcacaggaagaagtaaaagtaaatacttcatcagctctcagcagtgatagtcatctgaaaaattttgaggtcgtatttggtcatcctggtttaccgtacacaatatacggacgtctttcagcgtttaataaacaagccgaattatatagttctaccagaacattctttctttcggagtgtattatgacgtacttggtgggttattcaattgataatacaggaagcgagtttggcgttactggggaaattttagatgaaaacaaggacaaaattgctccattggataaggacgtgttgaacgctatgcacccattaactagtggagctcaaatggatacatttctacacaattgctatgcctcaccaaacgaaccatatggcagttggatagccaagtttgcttgtggtttagttcatcacatctcatttaatataccccacatagtgtgtttgtatcctttgtgcaaagaatcaagcactttttgtgaatcagtgcttcaagatttatttttcctttcgatgacatttgatccaaagagctgtttaaagtggattaaccagatattttcccaattatcaatactgctaaatgctaaagatttcaaaataaagttgaggttgctttttagtgtagtaaaaatgataagaatgggttcaagatataaagaaagaaactgtttgcgtgcttattcctgcttggatttagaaaatatttgtcaaatctctcttcaaatagaagaatttgaattcggttatttattatttgaggaaatgaacatgccaaagaccgaagagatgaatataaacacgcttcaaagaatttacgaatccataaatgataatgattttatagcaggtttgcccgttccacattcaatcaatggagttttaaactccattaatagaattgaatcaaatacatggaagcgttttctcttcaataacgctgactttgatgcaaactataccggttcatctaaagaagaaaaagggtcattaattaaggctacagaagagagcggtttctacggactaacaagtttattagaaagcagaaactcaggatccagtgatgtttataaatggagtttggaattaggagattggaaattgttgactccaaaactgattgattccaaagcaaaaggtttatacaacgccataaaaaacataccgcgagatattgactatgctgtaaagagtttagaggactccttattaacagtttttgactgtcgacaggacttccccaaccttgaggaatggatagatactttaaccgcaattattgaattcatgaaaatagcgtcaacttctcaacttggcacttctttcccacatacattgaaatctatcatgaatgctgacgaggcaaaactaaaaattacagatttccgtgatcacaaaataacattgaagagtagatacactttaatgaacgtgctttctaaaaataccctagagcagaacgcaaaactttcgaactacttacagcttggctctgttattcagcttgctaattacattcagatggcaatttctaacgatgcgtctcaagatgcgctacgaaacgctactttaatgaacaatatagtcaaaaatgctatacactcgtatgaagactcttctgtatcatcccaagtcgaaaggttggcaagttacgtgtctgctaatgccctttgggaatctcgcgagtataaaacacccgttatgataatgagagaccttttagattatgataagatggacattagtggaagcgaacaatacaacaattttaaatcacttctcgacatttcaatggatcaagttaaagctcacttagtcaagtggagttctgaatccagacttgaatcagctgccacgatatatgaagaaaatattgtgaattgggatataaacgtggacgaccatgaatcaagctccgatgtcttttatacacttggcagctttcttgatgaacaagcccaaaagttacgatcaaacggagagattgaagaaaaagaacgcagatcacatactgggaaggccaacctgaaagctttggaactaatatacaaaaacacgaaattaccagaaaatgaaagaaaagatgccaaaagacattaccatcgtgttgcaatacaatataatagagattctgagatattaaaaactttgcttcttcaaaaagagaagttcttatggcatgcgcttcacttttatctcaacaccttagttttcagtaataagtacgataatgacattattgataagttttgtggtttatggtttgaaaatgacgacaatagtaagatcaatcagttgctatataaagaaattggtacgataccaagttggaagtttttaccttgggtaaatcagattgcatcaaagatttcaatggaggataacgaatttcaaaagccattgcagctaactatgaaacgccttctctataaactaccatatgattctctctattcagtcatgagtatattactatatgacaaacaatctaataaagataccggcatatctcaaaaaatccaagctgtcaggaagattcttttagagctacagggatacgataaaggtgcttttgcaaaggagtatttacttcctgtacaagagttttgtgaaatgtctgtagaattagcaaattttaaatttgtgcagaatacaaagaagctacatttagctaatttgaaaattggacaatattggctgaatgagctgaaattagggaagtttcccttaccaactagtgaatttggtatcaggagttccgttgatggaaggaaagctcgcccttatatcgtatccgtcaatgaaaccgttaacatcactagtactggattatccttgccaaaaataatcaccttcaatatttctgatggaacaacacaaaaggtgttaatgaagggcagtaacgacgatttgcgacaagatgccattatggaacaagtattccaacaggttaacaaaattttaagaaatgacaaagtgctaagaaagttggacttaggtattagaacatacaaagtgattccgttagggccaaaggcgggaataattgaatttgtagcaaactctacatcattacatcagattttgagtacactacataaagatgataagataacattcgatcaagcaaggaaagctatgaaagcagtccaaacaaaatcgaacaaagagagactgaaaacttacttgaaagttactagcgagacaaaacctcaactaagaaatttcttttttgactcttttcctgatccaaatgactggtttgaagctaagaaaaagtacacaagaggtgttgccgcaagttctattgtcggatatatattgggtctaggtgatagacatttgaacaatattttactcgattgttcaacaggtgagcctattcatatagatctgggcatcgctttcgaccagggtagactgctacccattccagaattggttcccttcagattaaccagggatattatagacggatttggagtcacaggtgtagatggattatttagacggagttgtgaaagagtctatgccttactaagaaaggattacattaaggtgatgtgcgttttgaatatcttgaaatgggatccgctttattcatgggtaatgtcgccagtcaaaaagcatgaacacctattcgaagaagagagtgagattatttctacttttgataatgtcagtaaatttattaacatcagtgacaaaaacgaaaaccaagaatcttatagagctctgaaaggtgtggaggaaaaactaatgggtaatgggttaagcgtcgagtctagtgtacaggacttaattcagcaagcaacagatccgtcgaatttaagtgttatatacatgggatggtcaccattttattaa

SEQ ID NO: 78 - DNA, 2268 bp, Saccharomyces pastorianus
  modified_base (733)..(796): a, c, g, t, unknown, or other
atggcggtaaatccagaattagcaccgtttacactctcgagaggtattcccagttcggatgatcaagccttaaacaccatcatacagctgcaggactgtatacagcaggccatccagcagctgaactatagctctgcggagtttttagccgagttgctatacgctgaatgctctatattggacagatcaaatgtttactggtcagaggcagtttatctgtacgtgctttccctgtatttaaataaaaactatcatactgcatttcagatatccaaggaatttaaagagtaccatctcggtaccgctttcatattcggtcgttgcgctttacagctttcgcaaggactgaacgaagctatacttgcgattctatcgataacgaacgcattttcttcgaacactggtagcaataataacgcgcatgtaaatgctgtgctgaattctaatctcatcaatattcctgatttggccactttgaactgcttgctgggcaatctttacatgaaattagaccattccaaagaaagtgcgttttatcattctgaggcattagggataaacccttatctctgggagtcttatgaagctatctgtaagatgagagctaccatcgatctcaaaagagtgtttttcgacatcacaaagcaaagaaacaatagtcatagcaataacgctgcttcatcgttaccaaccacatcattatcgcattttgaacctcgttcacaaccaagcnnnnnnnnnnnnnnnnnnnnnnnnnnnnnnnnnnnnnnnnnnnnnnnnnnnnnnnnnnnnnnnnacaacactaataataacaataataatacaccatttcaatcttcaaattctcccccttctacatcagcatcttctttttcatcaattcagcatttctcaaggtcgcagcaacagcaacagcagttgaacccatcaataaggtcgtaccaaaacaaaaatattcagacgcctaaaaacccaacgaataataataaagcgtcctatgcgttaccaaataatatgtccatgaatttagcatctccctcctctaaacaacccactataagctcactggctaaagtttataacagaaataaacttttaacaactcctccatccaaattattgagtaacgacagaaactatcaaaataacaacaatataatgaacaaaacgactttcaaaacaccaagaaacttgtattcttcaactggcagattaaccgctacgaagaaaaattcaagatctttaataattagtaactcgattttgacaaatgattatccaattacgctgcctgaaattatgtataactttgccttgatattaagatcatcttcacaatataattcgtttaaagcaattagattgtttgagtcccagatcccttctcacattaaagacactatgccatggtgtttagtccaattagggaaactgcatttcgaaatcattaactatgacatgtctttaaaatatttcaacagattaaaagatctacaacctgcaagagtgagagatatggagatttattccacgttattatggcacttacacgataaagtaaagtcctccaatttggcaaacggcctgatggatacgatgcctaataaacctgagacttggtgttgtataggcaatttgctatccctacaaaaggaccatgatgctgcaataaaagctttcgaaaaagctactcaattagatccaaattttgcgtatgcttatactttgcaaggccatgagcattcttccaatgattcttcagattctgccaagacatgttatagaaaggcgctagcatgcgatcctcaacattataatgcttattatgggttgggtacaagttctatgaaattaggtcaatacgaagaagctttattatattttgaaaaagcaagatcaatcaatcctgtcaacgtagttttgatctgttgctgtggtggttctttagaaaaactaggttataaggaaaaggcattacagtattatgaactagcatgccagttacaaccgacctcctcgttatctaaatacaaaatgggtcagttgttatattccatgacgagatacaacgttgcattacaaacatttgaagaattggtgaaattagtccctgatgatgccactgctcattatttattggggcaaacatatagaatagttggtaggaaaaaagatgctgtaaaagaactaaccgtggctatgaatttggatccaaagggtaatcaagttgtcattgatgaattacaaaaatgtcacatgcaagaataa

SEQ ID NO: 79 - DNA, 3219 bp, Saccharomyces pastorianus
atgtcagagaataacactcatttctcatttccaaaggaggaagaaaaagttttagccctttgggatgaaattgatgctttccacacttcgttggagctaacaaaggataaaccagaattttctttttttgatggacccccatttgccactggtactccacattacggtcatattttggcctccactattaaagatatcgttccaagatatgctactatgactggtcaccatgtggaaagaagatttggttgggacactcacggtgttccaatcgaacatatcattgacaaaaaattaggaatcaagggtaaggatgatgtctttaagtatggtcttgagaactataacaacgaatgtagatctattgttatgacttatgctagtgactggagaaaaaccattggtcgtttgggtcgttggattgatttcgacaatgactacaagactatgtacccatcctttatggaatctacatggtgggctttcaagaaacttcacgaaaagggccaagtgtaccgtgggttcaaagttatgccttattctaccgggttgacgactccattgagtaacttcgaagctcagcaaaattataaagatgacaacgatccagccgtcactattgggtttaatgtggttggccaagaaaaaactcaattggtagcctggaccactacaccatggactttgccttctaacttatcattatgtgttaacgttgacttcgaatatgtcaagatttatgatgaaaccagagattgttatttcattttaatggagcctttgatcaaaactttatataagaagccaaagaacgaaaaatacaagatcgttgaaaaaattaagggttctgatttagtcggtttgaagtatgaaccattgttcccatattttgccgaggaattcgctgaaagagcctttaaagttatcgctgatgattacgtttccaatgattccggtaccggtattgttcacaatgctccagctttcggtgaagaggattacaatgcttgtttaaagaacggtatcatatctgaagattcaaagttaccaaaccctatcgatgaccttggtagattcaccgaggaagtcaccgattttgccggtatttacgttaaggatgctgataaactggtcatcaaatacctaactgcttctggcaatttgttaatggctactcaagttcgccattcatatcctttctgctggagatctgacaccccattactataccgttccgttccagcttggttcgttcgtgtcaagaacatcgttccaaagatgttggagtctgtcatggaatctcactgggttccaaacactatcaaggaaaaaagattcgccaactggattgcaaatgctcgtgactggaacatctccagaaacagatattggggtactccaatcccattatgggtttccgacgatttcgaagaaatcgtttgtgttggctctatcaaagaattggaagaattgactggtatctccgatattacagacttgcatcgtgatgtcattgataagatgactattccatctaaacaaggcaagggtgacttgaagagagtcgaagaagtctttgattgttggttcgaatctggttccatgccttacgcttctcaacattatccatttgagaatgttgaaaaatttgaacagagagttccagccaacttcatttctgagggtttagatcaaacaagaggttggttttacaccttaagtgtcttgggtacccatctgtttggcactgtcccttacaagaacgttatcgtttcaggtattgttttagcttccgatggtagaaaaatgtccaaatccttgaagaattaccccgatccactcattgttttagacaaatacggtgctgatgctctgagattgtatttaattaactcacctgtcttgaaagccgagagtttgaaattcaaggaagaaggtgttaaagaagttgtatctaaagtcctattaccatggtggaactctttcaaattcttggacggtcaaatttccttattgaaaaagacatatgacattgatttcaagtatgatccttctgtaaaaagtgacaacgttatggacagatggatcttggcttctatgcaatccctagttcaattcattcatgaagaaatgggccaatataaattatacactgttgttccaaaattattgaatttcattgatgagttgaccaactggtacattagattcaaccgtcgtcgtttgaagggtgaaaatggtgttgatgactgtctgaaggctttgaattctttgtttgatgctctcttcacatttgtccgtgccatggctccattcactccattcttatcagacagtatctatttgaaattaaaggagtacatcccagaatccgttttatcaaagtacggtaaagatggaagatcagtccatttcttgtcttacccagaagttagaaaagaatactttgatgaagccattgaaaccgctgtttccagaatgcaatctgttatcgacctgggtagaaacattcgtgaaaagaaaaccatttctttgaagaccccattaaagactttggtcatcttacacagtgatgaatcatacctgaaggatgttgaagctttgaagaactatatcatcgaagaattaaatgttcgtgatgttgttataacctcggatgaagccaaatatggtgttgagtacaaagcagtcgctgactggcctattttgggtaagaaattgaaaaaggacgctaagaaggtcaaggacgctttaccatcagtcacttccgatgaagtacgggaatacttggaaacaggtaagttagaagttgccggtattaaattagttaaaggtgacttaaacgccattagaggcttaccagaatctgcagttcaatctggtcaagaaaccagaaccgaccaaaaagttctaattatattggacaccaagatctattctgagttgaagactgaaggtctcgcaagagaactggtcaatagaatccaaaagttaagaaagaagtgtgggttggaagccactgacgacgttctagtggaatatgaactagttaaagacaccattgactttgaggccatcgtcaaggagcatttcgatatgctaagcaagacttgtagatccgatattgctaaatacgacggatccaagacggacccaattggtgatgaagaacaatcgattaacgacaccattttcaagctgaaggtgttcaaattatga

SEQ ID NO: 80 - DNA, 603 bp, Saccharomyces pastorianus
atgggtatttctcgtgattctcgtcacaaaagatccgctaccggtgccaagcgtgctcaattcagaaagaagagaaagtttgaattgggtcgtcaaccagccaacaccaagatcggtgctaagagaattcactctgttagaactagaggtggtaacaagaaatacagagctttgagaatcgaaaccggtaacttctcttgggcttccgaaggtatctccaagaagaccagaatcgctggtgtcgtttaccatccatcgaacaatgaattggtcagaaccaacactttgaccaaggctgccgttgttcaaattgatgctactccattcaagcaatggttcgaagcacattacggccaaacgttgggtaagaagaagaactccaaggaagaagaaactgttgtcaagaccaagaacgctgaaagaaagtgggctgctagagctgcttctgccaagatcgaatcttctgttgaatctcaattcagtgctggtagattatacgcttgtatctcttcaagaccaggccaatccggtagatgtgatggttacatcttggaaggtgaagaattagctttctacctaagaagattgactgctaagaaatag

SEQ ID NO: 81 - DNA, 249 bp, Saccharomyces pastorianus
atgtcgacgtatgacgagatcgaaattgaggatatgacctttgagccggaaaatcaaatgttcacgtacccctgtccctgtggagacaggttccaaatatacctggacgacctgtttgatggtgaaaaaatagctgtttgccctagttgctcgctgatgattgacgtcgtttttgaaaaggaagacctggctgagtactacgaagaagctggtatacaaccccctgaacccattgctgttgccgcttaa

SEQ ID NO: 82 - DNA, 1290 bp, Saccharomyces pastorianus
atggccaaaaatattctagcgaaccaggaccctaagctgcaggcgatgattgtggaacacacagcgcctgctcccaaggaaatacccatagacgtgccagttttgaaaagagttgctagaccgctgagacatgtcaagttcattccagtcaagtcgcttgctttccattccaaaacaggtcctatggagttttcatatgaaaagaagatcaaaactcctatccctaaaaacaaaattgtagttcgagtcagtaacgtgggcttgaaccctgtagacatgaaaatccgaaacggttacacatctgccctctacggtgagattggtttggggcgcgaatacagcggtgtcgtcactgaagtgggggagaacttgaattatgcttggcatgtgggcgatgaggtgtatggtatatactatcacccacatttagccgtgggctgtttgcagagttccatcttggtcgatccgaaagtggatccggtcttgttgagacccgattccatcactgccgaagaagccgctggatcgctatactgtctggcaaccgcgtacaacatcctaaacaaactgtccaagaacaagtatctgaaaccagagtcgaacatcctaatcaatggtgggacttcgtcagtcgggatgtttgccattcaattactgaaacatcattacaaagtgcagaaaaaactggttattgtaacatcggccaatggacctcaggtcttgaagaagaattttcctaatttggctgatgaaatgatttttatcgattacttaacctgcagaggtaaagccagtaaaccattaagaaaaatgcttgaagaaaagaagatctcccagttcgattcagtgacagatgcagaaaccatactcacatataatgagagtaagttcgatatcgtacttgacttcatcggcggttacgatattttgagtcattccagctcgctgattcatggtggcggtgcatacgttaccaccgtaggcgactacgttgccaattacaaagaagacatttttgattcatgggacaatccaagtgccaatgctagaaaaatgtttggttctatcatctggtcatacaattactcacactactatttttatccaaatgcaaagacttcttcccccggcaacgattggattgaacaatgtggcgattttttaaagaatggtactgtcaaatgtgtcatcgataaaacgttcgattggaaagaccataaagaagcattttcctacatggccacccagcgtgctcaaggaaagttgattatgaacgtcgaaaagttttag

SEQ ID NO: 83 - DNA, 786 bp, Saccharomyces pastorianus
atgttcggtagaatttgtaatgctcaattgaagaggaccgcgtggagcgtccccagacaggctcacttgcaatgtcagactatcaagacatttgccacagcacctattctgtgcaagcagtttaagcaaggtgatcagccaagattgagaataaactcggaggcccctaacttcgacgccgacacgacggctggcaaaatcaacttccatgactacctgggcgattcatggggggtcttgttctcgcaccccgcagatttcacacctgtatgcaccactgaagttggtgcttttgccaaattgaagccggagtttgacaagagaaatgtcaagttgattggtctttccgtggaagacgttgagtcccaccaaaagtggattcaagacgtcaaggaaatcgcaaaggtgaaaaacgtggggttccccattattggggacactttcaggaacgtggccttcttgtatgacatggtggacgccgatgggttcaagaacatcaacgacggctctttgaaaacagtaaggtccgtctttgtcatcgaccccaaaaagaagattagactgatctttacttacccctccacagtcgggagaaacacttctgaagtgttgagagtcattgacgctttgcaattgaccgataaggaaggtgtagtcacccccatcaattggcagccttcagatgatgtcatcatccctccctctgtctccaatgatgaagccaagactaaattcggtgatttcaatgaaatcaaaccttacttgagattcaccaagtcgaagtaa

SEQ ID NO: 84 - DNA, 3330 bp, Saccharomyces pastorianus
atggcccgctcttctttacccaaccgccgctccatgcttttcgaagcgaacaagagaaagactatagcgcatgccccatctcccactccttcgaatggaaagcatcctgttccgccgcccatctgtaacaatagtaatagtgatgccatttcagaatcgaacatccacgtatacgtaagatgcagatcgcgcaaccgaagagaaatagaagaaaaaagcagtgtagtactttctacgctgggaccccagggaaaggaaatcattctctctaacggctctcatcaatcatactcatcctccaagaagacttaccagttcgatcaggtattcggcgcggaatctgatcaggaaatggtgtttcatgcaacggcaaaaaactacatcagagaaatgctgcacggctacaattgtacgatattcgcatatggtcaaacggggactggtaaaacatataccatgtccggcgacataaacattctcggcgacgtacaatctactgagaatctgctactgggggaacatgcaggcatcataccgcgtgttctggtggaccttttcaaagaattgagctcgctaaacaaagaatattctgtcaaagtatcctttttagagttgtacaacgaaaatttgaaagatttgttgtctgacaatgaggacgatgattcagcggcaaacgactccaagaagcagattcgcattttcgataataataacaacaattcgtccatcatggtcaagggaatgcaagaaatcttcataaactcagcccatgaaggcttgaatctattaatgcagggctctttaaaaaggaaagtggccgctactaaatgtaatgatctctcttcaagatctcacacggtcttcaccatcaccacaaatataatagaacaggacagcaaggaacacgggcagaataaaaatttcgttaaaatcggtaagttgaatttggtggatttggctggcagtgagaacattaacagatcaggtgcggaaaacaaaagagctcaagaagctggactgattaacaaatcactgttgactttaggtcgtgtgattaacgcactcgtagatcattctaaccatatcccctatagggagtctaagctaacaagactgttacaggactctctaggtggtatgaccaaaacgtgcattattgccactgtatcgcctgccaaaatatccatggaagagaccgcaagcacgctggaatatgcaacaagagccaaatcaatcaaaaattctccgcaggtaaatcagtctttatcaaaggacacatgtctcaaagactatattcaagagattgaaaaattgagaaacgacttgaaaaattcaagaaacaaacagggcatattcatcactcaagaccaattggatctttacgaaagtaattccatactgattgatgaacagaatttgaaaatccacaatttacgggagcagattaaaaaatttaaagaaaaatacctaaatcagctggatattaataattttttacactcagaaaaggaaaaattggtaaatataatacgaaacttccatgtcgatttttccaatttcaatctggaaatccggaaaatccaccgttccaaccttgaagtaatgactgaaattacccaacaaagagatttatcacaggacaactctcaaaggcagtatactaccaaccaaaatttgcaactggaaatatccaaccaagtattacagactttaggcactttacaagattctttgatgaactataactcaaaattttcacaagttattagtggcgtcactaaagaattatccctgaacgtaaactctcataaagtgaaacatgattctacagtcgaatcattgttcaataccaccgctaacttattgacagtaaaaatgaacgatctagttaacagtgtttcacattcattggaaagtattcgaaatgattctttatcacactataataaagacttgaatgagatatatcaatcgcaccaacggtttttaagtaagttacaaaatgacatcaaaagctgtctggattcaataggcagctcaatcctaaatgccataaacgaaatatcagaaacttgcaccacaaacttgaatagtatgaacgacttaacaaaccaccatcaatcagtagcaacagagctgattgaaaagcagcatttacaaatcgaaaaattaaagaatgaattactcaatgagcgtaaaatttcgaaccactttaacaaacagtcaaccagattaaaggagtattttaaaaatcatgtatccaggacccgtactgaacttcatgatgaatttaacgaatttataagcagcttaaaggagaaacaatccaaattagatcaaaacatctggcaaaaggcagaatccattttcaatgaaaccggtgaagaagtcaatgcaattcattccagttcaataaacactttaacagaaaatgccgaaaccatcttacaaacggtctctcacaacagtacaattttcacgaagtatttaacttgtctatcagaagaaatgaacataaatatatcttccaaactgaagagcttacccattggtaaatttttaaataagatatctcaaactatttgcgaaagttgtggtaataattcgtcaacagccgacccgatactaatttctatcaaaaattttcaaaatgtaatactttcagatattgaactaacaaacgaaaagacgttatcgttgattaatgaaatattgtcgcaaacaaaaatcatatccgataaaaacaacgtcgatctagccatagtaaatgagaattttaattctttatgcagttttattttaaatgattacaaagagaacataatgcaaatctctaagacacaagacgatgtactttttggtcattgcgaaaatctgagatcggtaaacagacagggaatgaaaaccattactactcacaacatagaaaaacctgttaatatacatctacagcctgaatcaacagtgatcaaagttttgcctgtactggaatatccaaaacagtttcaaatttacagagacgctgaaggcaacaacagggacgatacaatgaagtcgcatttgaacgaaccaaactcttatgcaggagaagacctcgttgcatcacaggctagtccgaagactccagtccccgtgcctgaccaaactttaccaaaggtgctcgtaccaaaaagcataaactctacgaaatccaaaagatcaaaaactttatcaacttcagttgatactgaacaggagtcacggaataacttaaaaagaagattcaccatggaaccgatagtaaaagataaagaaattaaaaatgatggcactaagaaaatccatcaataa

SEQ ID NO: 85 - DNA, 1404 bp, Saccharomyces pastorianus
atgggtcaaatattgtccaatccaattatcgataaagagcatcattcgggcacagactgtttgacagcatttgggttgtgtgctatgcaagggtggcgtatgtcaatggaagacgctcacattgttgaacccaatcttttcgccgaatctgacgaagatcatttggcgttttatggtatattcgacggtcatggtggctcttctgtagctgaattttgtggttctaaattgatatctatactgaaggaacaagaaagtttcaagaagggtatattagaccagtgtttaatcgatacgtttttggctaccgatgttgagctgttgaaagatgaaaaaatgaaagacgatcatagtggttgcactgccacagtgattttgatatcccaattaaaaaagcttttggtctgtgctaattctggtgacagcaggactgttttgtctaccagcgggaacagcaaagcaatgtcttttgaccataaaccaacgttgataagtgaaaaatctcgtattatggctgctgatggttttgttgagatggatcgtgttaacggtaatttggccttatcaagagccatcggtgattttgaattcaaatcgaacactaagttaggacctcatgaacaagtggttacatgtgttcccgatatcatcaaacacaatttgaactatgatgaagacgaattcgttatcttagcctgtgatggtatctgggattgtttaacctctcaagagtgtgttgatttagttcattatggtataagccaaggtgatatgactttaagtgatatttcatccagaatcgtggatgtttgttgttcacccaccaccgagggctcaggtatcggttgtgataatatgagtatctccattgttgcgctactaaaggaagacgaatcagagactcaatggtttgaacgtataagatccaagaattacaatattcatacatcatttgttcaaagaaggaaaaacatcttcgatttccatgacttttcggataatgatgaggaggtatttgcggtcaccaccaagaaattgcaagaccgtctaaaccatcacagagataatgatgatatggagatcgacgatcttgataccgagttaggcagtagcgccgctccatcaaaattaactggtaaagataggtctggtcccattgatttattttcattagaagctctactagaagccgggatccaaataagacaaaggccaagctctgatagcgatggtaatgcttcatatttccatggtgcttctttatcagacatgttagcctccttgagcaatgctgctgctggagaaacaggtcctgaagacgctgatgaaaacgacgataacgacagcgaagacaataaaaatggaaatggaaagaagaattccaaatttgaagaaattgaatga

SEQ ID NO: 86 - DNA, 1602 bp, Saccharomyces pastorianus
atgactttaccaaaactcagtagtgtttctgtgtcgtcaggacacgtcagcgctagctcacacggtttctcaatactaagcaagcatcctcatcccaataatctcattcattctcattcgctttcccacccaaatgcaaagagtcacttgtccacagtgaacacgtgcaacaaagaaaacggtacgaacagcgacgaggcagagtcgctcaagaagaacaacccatcttcgtgggaccctaacgacgacatcaagcttcgtcacttgaaagagatcaagaacttgggttggaaggaaattgctcatcatttccccaacagaactcccaacgcttgccaattcagatggagaagattaaaatcgggaaacctgaaatcaaataagactgcagtgattgatattaacaagctgtttggtgtgtataccacgagtgttgccgccgtagctgcaggcgccactgctaccgcagcagcagcagcagcgcctgctgaagaggcgctcaaagaagaagctattgaggacgaagatatcacttcggggtctagcgccatcgatgacttcccaccagatttcaaaccaatagttaaggctaaatacatggacagaaaactagtggcgcaaaaatctgcatcaccgtttttggaccacgagtcacagcctgtcaaaccgagagaattgtttattaagccgaggtcgttctcccattccatgaccacaaatacgcccaatgtgaaggctactcaacagcctaacccaaatacttacaataccccttctactaagcctaacaggaacgttaatttcaacgactatgaaaatattggactcgtacccaagattatcattaggtctagaagaaactcgtttattccttccactcagattcctcatcctaccaccaagtccaggaagagctcacattctgtgatttcttctagaagatcatctttcaacatgatgcactcaaggagatcatcctttaattctcatgctcccacggaacctatttctaggcgtccatctttggtcgtcagcccgtatatgactcccagaagactgtcaacttcacaatctatccaacaccacccacaacagcagcaatatcacctaaatcctataacctctccgaactgcaagatagatcaatctactgataaaataacgcatacgagaactttcttagatatgcaaaaattcgcaaacaagcatccgtggtctagggaagatgatgaggttttactcaacaacacaatagacaaaaaaaaccatttatcaacactagaaatttccattgtcctacctaacaatagatccgaattggaaattcaacaaaggatcgattatttacagagaaggggacacactagtggcattcacagaactcaaggaaacagtgacgatgaagaggaagacatcgacccactacacaaggaagttgatgccaatgaaacgacgcagcgaacataccagtacaatggattagagcctggaaatggtaattcaaaggcaaggattctctcttccttgtcgaatgggaacgatgtacgcaaagagcaagatgaattgccgggtataaattcgatcttcaaaaatattttctaa

SEQ ID NO: 87 - DNA, 2538 bp, Saccharomyces pastorianus
atgtcaataacaataaatgacaaatcgccaaaacctaaaaaaaatgcattgttaaaaaatttagagattgacgacttagtacattcccaatttgttacaaggaatacaaatggacacagaactacaagacaacgatctaatcctaacaccaatggaactaatcgaataagaatctgctctctaccccataagaacaataatacaaagaagaaaaaagggtctgaaatttcccggcgcccagaagtccctgccaagaatatcatagattgggataatgacatgggtgcaataaattttcctataatgaagccaaatattgaagtgaatgaaaagttacagattaggattaagtacgaaccaattaacttcttcaattttgaacggttaatactaaaatcttcagctatagaaccactcgtaagcaaaaaaatcaacacgcctaacgtatccacgggatttcaaggaagaataaataggcttaggcagaaatggggtatagaaaccgacaatatatcacattcatcgccctctgatagtataccactggaagatagtgactcgtggcaatggcatgtaccatatggtggagcaataaaaaagccgaaagatttcagtacaaaaagaactttgccaacctgggaagataaggtaaggtttcttactcttctagaaagatccaaatcagcgacatttattaatagtaacgtaccgctttgtaatcattccgaatttgatcaagagaaagataacaagaaacgaaggaaaggtaaaaatctaaaaaaccaaaatagagtcggatcttcattgatagagtatattgttttccgagattacgaaatcaaaccctggtacacgtctccctttcccgaacaaataaaccagaataaaatggtttatatatgcgaatactgcttgaaatacatgacttcccggtatacttgtcttagacaccaactgaagtgtctaaccttcaggcccccaggaaatgaaatttaccgcgatggcaagctgtccgtttgggaaatcgatggacgagagaacgtcatatattgtcaaaatctctgcctactggccaagtgttttatcaattctaagactttgtattatgatgttgagccattcatattttatgtcttaacagagagggaggaaaaggaaaacaataactatcagacctcacctaaattccattttgtgggttatttttccaaggaaaaattcaattccaatgattacaatttaagctgtattttaactttgcccatatatcaaaggaaggggtacggtcagtttttaatggagttctcgtatttattatctagaaaagagtcaaagttaggaactcccgaaaaaccgttgtcggatttaggtttattaacttatagaacctattggaagattaagtgtgctgaagtactgttaacattaagagacaatgctaaaagcgaatcaagtcatgaagacaaaggcgccttccaacagttaacattgaacgatatagctaaattaacgggaatgatacctacagatgtagtgtttggattggaacagcttcaagttctctaccgccataaaacgcgttcgttgtcttctctgaatgatttcaattatattcttaaagttggttcctggaatgaaatcgaaaatgtctatagaagttggagttcaaaaaagtatcctgtagtcaaatacaataagctgctttgggaacctataatactcggaccttcatttggcataaacgggatgatgaacttagaacccaccgcattagcagatgaggctattgcagatgaagccatggctcctgtgatttcaaacaacgcccaaatagaaaactataacaacagtaggagtcaaagtcaaaggagccacggaaggagaaggggtggtcgcaagacacccaaacttaatgcgaacaataccatacaaccagaaatttctgtgagtgatttctttcaaaataccgtttcttctttaacagaatacatgtgcgaatataactccacaggcagtgatagactagctgatggtatagataaaagtgtgttgcaaaaaatccgtaaccgtgaaaagcttcttaggtcaaaatttgcttctgaatcatattgggaactctgtttcacactcaagaattcagaagtcccaccagaaagccacacaacgaagaacaataatattggaacagccagtatagaacaggaagaagtggaggacgaagcaccggagctaagtttaagcgcagatgttgaagaagacgaagattttacacttgatgatgtcgggggtgaaaaagagtccgaatataacgcatcaaataagacatctatcagtgaagacgacggggaaagtacatatggcgaggaggaaagcacatatgaagatggtgatgacgatgacagtgacggagaagacgaagacgaagacgaagacgaagacgaaggagaagacgacgacgacgatacagatagccatgaaaatcaaggaagggccagaacgaggcgaaaaattacattgatagaggatgatgaagaataa

SEQ ID NO: 88 - DNA, 2091 bp, Saccharomyces pastorianus
atggagaccggttcttttgaggattctccctctgcagtgatcagcaacattcaggacaacaatctgaatacggaggccaatgaacaggaaacgaatatgccagtttttgaaactagagacgtcattgacagagtgaatggtgaacaagaggaatttggtgaaaatgctgtcagaaatatggataatggaaatacttctaccgatttagttaattcctcgaacaatgctgctttggacgacgatgtcatcccaaacgccattgttatcaagaacatcccgttcgccatcaagaaagaacaactgttagatattatcgaagacatggatcttcccttgccatacgccttcaattaccattttgataatggcatcttcagagggttggcttttgcaaattttaccactcccgaagaaaccactcaagtgataacctctttgaatggcaaggaaattagtggaagaaagctaaaagtagaatataaaaaaatgctacctcaagctgaaagagaaagaattgaaagagaaaagagagagaaaagaggtcaattggaagaacagcacagatcctcatcgaacctttcactacattcattgtccaaaatgagcgcaaacacaaataataacgcttccaacaatcaattattttcgactttaatgaacggtattaatactaataccattataaacagcccaatcagtaacaccattaacaataacaccaacggcagcgcaagcaacagtaacatcaacaaaagtaacatcaataacaacaacaacaactccaacagtaacaatagcggtggtaatgccaacatgaaccaatcctcaatttctgctcagcatactacttcatcattgtaccaagcaatgaatgctaacaatcaaaaccagatatctaccgaaaggttttatgctcctttaccatcaacttcgactctgccactaccacctcaacagttagattttaatgatcctgatactttggagatctattcccaattgttattgttcaaagacagagaaaagtattattacgaattggcctaccctatgggtatatctgctgcacacaagagaatcatcaatgttttgtgctcatatttaggtctagtggaggtgtatgacccaagattcattataatcagaagaaaaattttggatcatgccaatctacaatcccatttgcaacaacaaggtcaaatgacatcggcacatccattacaaccaaactctaccggtgggtccatgaataggtcccaatcttatacaagtttgctgcaagctcatgctgctgccgcggcaaatagcgttagcaatcaatccgtcaacaactcatccaacaataacggcaacagcaccggcaacggcaacaacaacggtaataacacaagtaacaacaataacaatagcgctaacttaacaccaataatttcttcacaaggtcaattttcaatgcaagcggcactgagttcacccaaattgaatgttcaccataactctttatacaatcccgcagatcaacctcaacaacctcaaccacaggtacaacaaaatgcacaaacagctgcgcaacaacaacaatcatttttaagacaacaagctactctaacaccttcgtcaagaattccttctggttattcagccaatcattatcaaatgaattccgttaacccattgctaagaaattcacaaatctctccaccaaactcacaaactcaaatcaataaccaatctttatctcaagcacagccatcatcccaaactcaaacccaaacccagcaacgcgttccggtagcataccagaacggttcgttgtcttcacagcagttgtgtaaccttaatggttcatcctcgacaggaaatacacagtctcaactactaccacaacacacaaatgggtctgttcattcgaacttttcctaccaatcttaccacgacgaatcgatgttgtctgcgcacaatttgaatagcgcagatcttatctataaatcactaagccattccggactagatgatggtctagaacaaggcttaaaccgttctttaagtggtttggatttacaaaatcaaaacaagaagaatttgtggtag

SEQ ID NO: 89 - DNA, 417 bp, Saccharomyces pastorianus
atggggctgcgttattcgatatacattgaaaacccgctatcctccccatcatcctcatacaaatcaataagcgacccgttattccattcacagcatcgagcacaaagaaacacatgcttcatcacttacggttgtagacattgtaagacgcatctttctagctccttccaaatcatttccagagattatagaggcaggactggcactgcctacttaatgaacaaagttgtcaacgttgttgaaggaaaggtcgaacaacgaaaaatgctaactggcgactatttggtttgcgatatcctctgccattggtgtaaaaggaacgtcgggtggaagtacttgcaaagtagcaacgacgatcaacaatataaagaaggtaagttcattttagagttgaagaacatctgcaaatgtacttga

SEQ ID NO: 90 - DNA, 1920 bp, Saccharomyces pastorianus
atgccgctgtcagattctgaatttgataccgcatcaatgacaataaaaaacggcattgtgagcgccgaggacgacaagcaaacaaccaaggaattcgaagttgaggaagaactcaagacttcttccaagtccgtcgccagcatcatcgaaaagaaggaaaccgattcagaaaatgatacaaccgttatccaggacggcgaaaaagcctcctggttccaaaaaaccatcgagtttttggaagttaaacaagtttccaccgatcctgctgcacacaaggtggaaaaacctatcaagacattaaaggatttgcgcaaatccttactatccacatatctatacaacacagacttgaggcccgtggaggccaagagaagaacatggacttggaaacagtacattttcttttggatttccgggtccttcaatgttaacacatggcaaatctcagccaccggtcttcaactagggttgacctggtggcagacttggatatgtatttgggcaggatacacgtttgttgcatttttcttgattctgggatctaaagtcgggaacaactaccacatttctttccccatctcatcaagagtgtcctttggtatttatttctccatctggatcgtcatcaatcgtgtcgtgatggcgtgtgtctggaactccacgctggcttatatcgggagtcagtgtgtccaattgatgctgaaggccatcttcggtaccgatttaaacaccagaataaaagacaccataaaaagccctaacctgacgaacttcgagttcatgtgtttcatggtcttttgggtcgtatgtctgccattcttatggttcccgcctgataaattgcgtcacatttttgcactcaaatccgcaattaccccgttcgcggcatttggatttctaatttggaccctctgtaagtctaaaggtcatttggccttgggttcattaaacgacaacggtggtgccatcagtaagtccgtcttagcatggtctgtaatcagatccatcatgagtgccctagataatttttccactctgattttgaacgctcctgacttcaccagattcggtaagacttacaaatcatctatttactcacaattagtcgccctacccgtctgttttgccgtcatttccttgatcggtatcctatctgtctcggcagcttacacgttatacggggtgaactattggagtcctttagaaattctaaacagatacttagacaactacacctctgggaacagagccggtgttttcctcatctcgttcatttttgcatttgatcaattgggtgctaacttgtctggtaactccattcctgcaggtaccgatatgaccgcattgttgcccaagttcatcaacattagacgtggttcgtatatttgtgccttaatatcgttggccatttgcccctgggatttattatcatcatcatcgaagtttaccacggcgctagcagcatatgcagttttcctaagtgccatcgcaggtgtcatttctgctgattacttcatagtcagaaaaggctacgtcaacattttccactgttacaccaacaagccggactcctactacatgtataataaatacggcactaactggagagcagtagtagcataccttactggtattgctcctaattttgccggattcttgggttcagtgggcatttccgtacctattagcgctatgagagtgtactacctaaactatttcgtcggataccttgttgcagcattgagttactgtattttagtgcatttctacccaattagtggtgttccagggaacgcgaagttgaccgaccgtaaatggctcgaagaatgggtcgaggtcgaagaattcgaatccgaaagagaagtctttgaagaatacggtagtgtctccactggctatgaaaagatacggtatgtctaa

SEQ ID NO: 91 - DNA, 726 bp, Saccharomyces pastorianus
atgaccactatagcgtcggaatactcttcagaggtgtcgaacacccccgttgaacatcaattcaacccctacggtgataatggtggtaccattctaggtattgcaggcgaagatttcgcggtgttggcgggtgatacaagaaacatcactgattactcgatcaactctcgttatgagcccaaggtctttgactgtggtgacaaaatagtgatgtcggccaacgggtttgccgctgacggtgacgccttggtgaaaagattcaagaatagcgtgaaatggtaccatttcgaccacaacgataaaaagctatccataaactcagctgccaggaatatccaacatcttctatacgggaaaaggttcttcccctactacgttcacaccattattgctggtcttgacgaaaacggtaaaggtgccgtgtactcgttcgacccagtcggctcctacgagagagaacagtgcagagctggtggcgctgcagcttctttgatcatgccttttttggacaaccaagtcaatttcaaaaaccagtatgagccaggtaccgacggtagagtcaagaagcctttgaagtacctgtccgtggaagaagttatcaaattggtgagagactcattcacatctgctacagaaagacatattcaggttggtgacgggctggaaatcctcatcgtcaccaaggatggtgtaaggaaagaattttatgaactgaaaagagattaa

SEQ ID NO: 92 - DNA, 180 bp, Saccharomyces pastorianus
atgggattcttctatgataatccggtgatcgagttttttcacagaataacaagaaagccaagtactattgcaatgtgggtatttgccagtgtgatttgttcgagtacattttatttaatgtttatgtcatcgcctacaattgatttcaacccaaaatctgagggagataaggacaagtaa

SEQ ID NO: 93 - DNA, 1740 bp, Saccharomyces pastorianus
atgaagtacgttgttgtttcaggtggtgtcatttccggtatcggtaaaggtgttcttgcatcttcaactggtatgctattgaagacactcggcttaaaagtcacctcgattaaaattgatccttacatgaacatcgatgctggtactatgtctcctttagaacatggtgagtgtttcgtacttgatgatggtggtgaaaccgatttagatttgggtaattacgaaagataccttggtgtaacattgactaaagaccataacattaccaccggtaagatatactcgcatgttattgctagggaaaggaagggtgattatttgggtaagaccgtgcaaatcgttcctcacttaaccaatgctattcaagattggattgaacgtgtggccaagattcctgtcgatgatacaggaatggaaccagacgtctgtatcatcgaattgggtggcaccgttggtgacattgagagtgcgccttttgtagaagcactaagacaatttcaattcaaggttggtaaggaaaatttcgcattgattcacgtctctctagtgcccgtcatccatggcgaacaaaagactaagccaactcaagccgccatcaaaggtttgagatctcttggtttgatcccagacatgattgcctgcagatgctctgaaacattggacaagccaacaattgacaagattgcaatgttttgtcatgttgggcctgaacaagtggttaatgttcatgatgttaactctacttaccacgttccattattgctactcgaacaaagaatgatagactatttacacgccaggctaaagttagaagaaatcaccctaactgaagaagacaaacaaagaggtttagaattattgtccaaatggaaggctaccacaggtaactttgacgaatccatggacaccgttaagattgccttggttggtaaatacaccaacttgaaagactcttatttgtctgtcataaaagctttggaacattcatctatgaaatgtcgccgtaagttggaaattaaatgggtggaagctactgatttggaacctgaaacacaagatagcaataagcctaaattccacgaagactggaacatggttagtaccgcggacggtattttgattcctggtggtttcggtgttagaggtacagaaggtatgattttggctgctagatgggcccgtgaaaaccacattccatacttgggtgtttgtttgggtttacaaattgccactattgaatttgcacgtagtgtacttggaatgaaagacagtcactcagcagaattctacccagacatcgacgaaaagaatcatgtcgttgtcttcatgccggaaattgacaaggaaaccatgggtggttcgatgagactaggtttaagaccaacttatttccaaaacgacaccgagtggagtcaaatcaaaaagctatacggcgatgcttctgaaatccgcgaaagacaccgtcaccgttacgaaatcaaccctaatattgttgataaattggaaggcaatgggttgatctttgttggtaaggatgaaaccagcaaacgttgtgagattttggaattgaagaatcatccctactatatcgccactcagtaccacccagaatatacgtcaaaagtcttggaaccatccaaacctttcttgggtttggtggctgcctccgctggtatcctacaagatgtcattgacggtaagtatgatcttgaagctagcgaaaacaaattcaacttttaa

SEQ ID NO: 94 - DNA, 699 bp, Saccharomyces pastorianus
atgttaccgggcttaatgagaatgaatctctccgtaaggatgagcgatcttactgtcaagggtgcgtcaaactctctcttaaaaaatattaaccctattgctaagagattcaagcacgagtatgcgccaaggtttaaaatccaacaaaagaagcagaagggcagagtacccgttcgtaccggtggttctattaaaggatctactatacaattcggtaagtacgggctacgtttgaaaagtgaaggtatcaggataactgcacagcaactgaaagaagcagataacgctattatgagatacgtcagacctttgaccaatggtcatttgtggagacgtttatgtacaaacgttgccgtctgtgttaaaggtaacgaaacaagaatgggtaaaggtaaaggtggattcgatcattggatggtgagagtacccacagggaaagttctttttgagataaacggtgacgatttgcacgaaaaagtcgcacgtgaagcctttagaaaagctggtaccaaattgcctggggtatacgaatttatatctttggattcactggtaagagtcggattgcgtagctttaagaatcttaaagacgatcccgtgaagaatttctacgaagagaatgcaaagaaaccgtccaagaaatacttgaatgttttgaaatctcaagaaccacaatataaactcttcagaggacgttaa

SEQ ID NO: 95 - DNA, 3078 bp, Saccharomyces pastorianus
atggaacgcaagaagacgcttataaactcaagtgtttctaataataatagtgccattaagggtctgcagttattcatagctgatcttcgttcttcacaacaagcacaggagcaggaaaagagaatacattctgaaatcgttaaaattaagcagcatttcgatattgcaaagaaaaaacaaggcaatcacgacagattaggtggttatcaaaggaaaaagtatgttgccaaattggcgtacatttatatcacttccaatacgacaaagttgaatgaaattctattcgggctagaccagacggtagagctgttgaaatccaactcgttttccgagaaattcattggttacatgacccttgaattgctttatgaacataatgaaattgtaaaaagaattaatgatagggttaattaccaattgatcaaagacctctcttctcccgatgataattttgttgcactggctctaaattttgtcggtgtagtagggaaggtcacgaaccgcttggcgtacaacgatgacatcacaacgggtgtattcaaaatattaagatccccaacttcctccctttacgtaaagaaaaaatccgctttatcatttctagcactattaaaaagcaaccattccatattaaccgaggatttacagcgtaaacaattatggatacaaagaatattgagtttactggatgatacagaaaactatagactaactttggccactgtcccgctaatcgaatttattgcaaaatacattgatcctagttattgtacaagactattacctcaattgactgagattttgtacaactgtgtggttgttggtacctccaattctaatgacaatcagttcccgctggaatacaagtttgcgaatatgcctaacccttggttgataactaaggtggtatctttgttaagcattttaattgcttctccaacggaaagagattttggtgcgttattacaaaccaataatatagatgacgaaatcctaaataagcttcgaaaatgtgtctctgttgccatcgaattaggcactagacaaggtcaagatccaatggaacgtattgtccaaaacacagtgttgttttcattgataaattttgcctctaagttagaaccatcggatgaggccatcgggaattcagtgtcagcattatgctccctgctggcatcgaaagagatcaatattcggtatttaacattggactcattggttaaactatgctcttcaagcggtaagccagcaatcgatgcagttcgttataaaaatctggatatgattttccacctattgaacactgaaagagattcgtctattgttagaaaagtcgtcgacttgctatataccttcaccgatgcggaaaatgtcaaaattattgttgatggattgttgcagtatattttatctccaaaaaatcttgctgaaccacaaataaaatccgatattgctgttaagattgccatcctaaccgaaaaatatgctactgacattaattggtttgtaattatttcgttgaaattgttatcgttaacatcgaataccactattaatgatgacgagatctggcaacggttatgtcaaatcgtagtcaacaatccatctttgcacaagttgacatgcgagcaacttgtggattatttatgtaaaaagcaagcatcagaagctattatcaaagccgcagcattcctgttgggtgaatattccagcctcattattgataggatttcgggtgtaaatttatttagtttgtttgctgaaaagtattttagcgtgccaaacgtagctaaagcaatgatattaaccacaatgatcaagttgtacaaaacctctcccgaaataggctctaatgttataaaatttttccagttagagttgaattctctagatattgaactgcaaacaagatctttcgaataccttaatattatacaactggctaaagtaagcgggaatgccaacatgttacaaatcctgtttgagccaatgccaccattcaatagcaaatcaaacccattattgaagagattgggaacactacctacatcagcaggaagtgcgactttgataaacacttcttctgcagcctcttcttcaactcctgatttagtacccaagagagcaagctcaactcaatcgatcggggttccaatgcctcccccatcacgtagaaacacagtcatcgatggtaattctaaaattgatttatctgaagactcatcagggagggactcttattactcaagacagatcttggccccaaattggagagagggctttacgagaatgatttcacataaacagggtgtgctctatacatcctctttaatcaaggttttctatcgaatcacaacgcccgatccacaggaaccatatgcgtttcaagtatctcttgcctacattaacttgactgaatgggaaatcacaggactatccactcaagttatagcttcaaagacacaagataatcccgagtatgtgatcatgaacgtcaacgtgccctcggctgctacgatcaagccccataaaagggtggaacaaagttacgaagtttccgtaaggaaatcgtttgacgtggaagacagtccaattttggcaattcattttaagtgtggtggtagtacgaatactatcaatctgaaaacagctatcggtgtgaccacaacattagttagtagcgaaataaacccaagtatgcacttgaccttagcacaattcattggccgttggagaacattgagcgacgctctcggaaaagacggagaataccaaatatatggcataaagcttaacaaggacttcaagaaagttgaaactatcgacttagaagatggactagtattattaaggcaaatattgaaacggttgggttttgatatagttgaacaaactagtgttcatagcacactatttgtctcaggtattatccatacaaagagcgaggggaactttggttgcctaatgaaaatacaataccaagaaaatggtttggcaaatgttacctgtaagacaacgacagctggtcccctcgccaagtacattgtggagtgtatcagggatgtactaacgaagtga

SEQ ID NO: 96 - DNA, 774 bp, Saccharomyces pastorianus
atgtctacaaatattgcttatgatgatgacagaaaaacggaattgattgctcaatacgagtccattaggaaagaagtggaaacagaagcaagaaaggtttgtgatgataaaagtgcctctaaggtttctattttagctgtttcgaagttgaaaccggccagtgatataaaaatcctgtacgatcatggtgtaagagactttggggaaaattacgttcaagaattgatagaaaaatcaagcttattacctgatgatattgactggcattttgtcggtggtttgcaaacaaataaatgcaaagatttagcaaaagtaccaaatttgcgcattgttgaaacagtcgactccttgaaaaaagccaagaagctaaatgagtcaagggctaaatttcaacctgattgtgacccaatattgtgtcatgttcaaattaatacatcgcatgaagatcaaaaatcaggcctaagtggcgaaacggaaatattcgatgtgatttctttctttttgtctgacgagtgcaagcatatcaaactgaacgggttaatgactattggctcatggaatgtttcccatgaagatggtgaagaaaacaaggatttcaccacgctggttagttggaagcagaaaatcgatgctaaattcggaacatcattgaagttgtcgatggggatgagtgctgattttaagcaggccataaaacaaggagcatcagaagttagaattggaacagaaatttttggggcaagacctccaaaaaatgaagcaagaatcatttaa

SEQ ID NO: 97 - DNA, 2115 bp, Saccharomyces pastorianus
atgagcagatctattgatgtcatcacgcatttcggcccagaggctgataaaccagaaataattactgaattacagaacttaacgaaggtacacgcattgactgttgaggatttgtatattaaatgggagcagttctccaaccaaaagcgtcaaacgcacacagacttaacctccaagaatctagatgaatttaaacaattcttacaattacaaatggaaaagcgtgctacgcaaatctcttccaattccaagataaacccctcaatcaagaaacctctcataaataagagcttgaactcaagcccactgtttggtcttaatattcctaagactccaacgttaaagaaaagaaggctacatggaccttcttcactcagtgactctaagaaaccttatactgcgggttctgaggtagaaacaaatggtaacggtgacagctcattaaaattggaattcacaccaggtgtgccggaaggtaacgaggatacgaagtttcaaccatctgctaaaagcctcaatgtaaacacccccaatccatcaacattccaaactccaacaataaacaccccaaccgcgctgaaactgagtacaactggtggtaaaattttggattcccttaatcctgaaaacgttgaaatatctccaggtaattcaaatgtaggtttagattcaactgaagaattacctcctagtgaagttagagtcgaaccattctatgatgctaaaaagtatagatttagaacaatgagacaaaacttacaagaagcttccgacgttctcgacgatcagatcgactcatttaccagaattattcaggatcattacaagttgtccccgaatgattttgctgatccaaccatacaatctcagtctgagatttatgccgttggaagaattgttccagactcgcctacctatgacaagtttttaaacccagaatcacttgccttagaaacttctagaatgggcggtgttggtaggagagtaagactagacttatcccagatcaacgagctttctttttttttaggacaaatcgtagcattcaaaggcaaaaatgctaacggagattacttcaccgtcaattccaccttagcgctaccttacccaaattctcctgtgtctacgccagaagaacttcaagagtatcaagcaaatttagaaggttcgtctctaaaagttattgccacatgtggaccatactttgccgacgatagcttctccctggaactattggaggatttcattagtcgtatcaatactgaagtcaaaccacacgtcttgatattgtttggtccattcatagacatcactcaccccctaattgccagcggtaaactgccaaatttccctcaatttaaaacgcaaccaaaaacgctggatgaactgtttttaaagttattcacacctatcctaaaaacgatatcaccacacattcaagtcatactgataccttctacaagagatgctatctcaaatcatgctgcgtatccacaagcctctttgattagaaaagcattacaattacctaaaaaaaacttcaagtgtgtaacgaatccttcctccttccaaataaatgaaatatattttggctgctcaaatgtggatactttcaaagacttgaaagaagtcataaaaggtggtactacttcatcgagatatagactggaccgtgtttcggagcatatcttgcaacagcgcagatactatcctatatttccaggcagcattcgtacaagaataaaatctaacaacatacaagtgaagaaggaatccaacaacgtgaagggtaatgaagaaaaagtatatgaacatatatcaggtgccgacttggacgtaggttacctggggttgaccgaattcgctggcgggttcaccccagacataatgattataccaagtgacctacagtactttgcaagagtggttcaaaatgtggttgtgataaaccctggaagattcattagagcaaccggaaatagaggctcgtatgcacaaatcacggtaacttgtccggatcttgaagatgggaagttaacactcgtcgaaggtgaagagcctgtctatctccacaatgtatggaagcgtgctagagttgacttaattactagttga

SEQ ID NO: 98 - DNA, 1026 bp, Saccharomyces pastorianus
atgaccatggatagcagcaacagcagcagcaacgagatcagcagagataaaaacaacaacaacaacaacgagatcagcgacggcctacccttggtgcaatgtgtagcaagagcccgtatacctactacgcagggtccggatatcttcctgcatctatacagtaatgatcgcgacaacaaagagcacttggccatcgtatttggtgaggacatacggtcacgctcactgttccgcaggaggcctcacgagacgcagcaggatcggatgatcaggggcgcgtacatcggcaagctttaccctggcaggacggtggcggacgaggacgatagactcgggctggcactggagttcgacgagcgcacaggcgagttgctggcctccacggccacgacctgggaccctcaccatcatacgctagtccggatacactccgagtgctacactggcgaaaacgcctggagtgcccgttgcgactgtggagagcagttcgacagggccggcaggctcattgcatgcgaccgtgagccctcgagcaacattcaaggcggaaacggccacggcgtgatcgtgtacctcagacaagagggccgcggaatcgggttgggtgagaagctcaaggcatacaatctgcaggacttgggcgctgacacagtgcaggctaacctgatgctgaagcaccccgtggacgcccgagacttctcgctaggcaaggccatcctgctggacctgggcgttgcaaacatcagacttttaacaaacaacccggaaaagatcaaacaggtagaacacgtgccgctcctcaaatgcgttgagcgagtgcccatggtgcctatacactggacaaactctagtgagggcatagactccaaagaaatagagggctacctcagaactaagatagagagaatgggccacctactgacggagcccctgaaactccacacgaatcctcaacccactgagacaaaccaaaagcaaacccaaatgaactccgcattgtcatcgtcatccactttggcaatatag

SEQ ID NO: 99 - DNA, 1014 bp, Saccharomyces pastorianus
atgaatgataaacttcaaaaagaacataaaaaaaacgataacaccacgcaatttaatgattttacggccccgcatatgagtatagacttccattcaaataataatagcaatatcattgagactattggcgtttccaaacgactgggcaattcagtactgcacgaactggattccagagccacgtcgaagtttgaatttctaaaagaccaacagcagtacgacgaaaacagtaacagccaaccacaatcgagctcgcataatatcaatgagtttttccaaacaaaacatgattctcaatttggtcagatggagtcactagacactcattatatggtcttgcacacgccaaagaggaaatcccaacgtgctgtccctcaagactcatcggaatcaatgaagaggtcaaggccgtcacactcaattcaatacactacgccagtggtcaacgatatcacaagaagaatacgaagattgaagctgcggaactcactggtcaatgggaatgacatcgcagccagggcaaggtccatgcaagcaaactctaacgtaaactcaataaagaacacgccgttgtcaaagcccaaaccgttcatgcagaagccgaactttttaatgcccactacaaattctttgaacaagatcaaccccgtacatcctaatgctcaccgcaatgctcccttctctacgtctgcatcggtgcatccacgatctaaattgcccaaatctgcaccaataagagatttacattctaagaccaggccagcagaacgcacgccaactgcgccaggaacgagttctcagttgaagaattcagtttctgtttttgatagactttacaagcaaacaacgttctctaggtcatcgtctatgaacaatttatcattagacggttctgcaaagaccagcaatgcgaatgcgaagacccggatggtgaaaagtaagacgagtggctcgttgtccagccatctcaaacaagacgcgacctctaagaatgataggcctgtttggcgatga

SEQ ID NO: 100 - DNA, 957 bp, Saccharomyces pastorianus
atgtcttccaacgctcaaatcaacaccccactaccacccgccccagccccaaagaaggaatccaattttctgattgatttcctcatgggtggtgtcagtgccgccgtcgccaagaccgctgcttcccccattgaaagagtgaaacttttgattcaaaaccaagatgaaatgttgaagcaaggaactctagacagaaaatacggtggtatcatggaatgtttcaagagaaccgcccaacaagaaggtatcatctctttctggagaggtaacaccgctaacgttatccgttatttcccaactcaagctttgaatttcgctttcaaggacaaaatcaaggccatgttcggtttcaagaaagaagaaggttacggtaaatggttcgccggtaatttggcatccggtggtgctgccggtgctttgtcattgatgtttgtctactctttggattacgcaagaactagattggctgctgactctaaatcctccaagaagggtggtgctcgtcaattcaacgggttagtcgatgtttacaagaagactttgaaatctgatggtatcgctggtctttacagaggtttcttgccttctgttgttggtattgttgtttacagaggtctatactttggtttgtacgattccttgaagcctgtattgttgactggttctttggaaggttcgttcttggcttcattcttgttaggttgggttgttactactggtgcttccacatgttcttacccattggataccgttagaagaagaatgatgatgacttccggtcaagctattaagtacgacggtgcctttgactgtatgagaaagattatcgccgccgaaggtgtttcttctctattcaagggttgcggtgctaacatcttgagaggtgttgccggtgctggtgttatttcaatgtacgatcaactacaaatgattttgttcggtaagaaatttaaataa

SEQ ID NO: 101 - DNA, 285 bp, Saccharomyces pastorianus
atgtcgttcgtccccattgtatgtggtacgaggagtttcgactcttcatacgattctgtgcccgcacaccagaatctatactgtccgaactgccacaatttcagcgtgtgccctatcaagagaaaagagtttttcaccgtctggttcataccgctgcttcctgtgttctggggcaaacagctgcattgtcccatctgcaattggcgacaagacttcaaaaacgaagaacagctcaacaaagttatccaagagcaacagaacatgcgacaaaagcagcccagctaa

SEQ ID NO: 102 - DNA, 1161 bp, Saccharomyces pastorianus
  modified_base (220)..(315): a, c, g, t, unknown, or other
atgtgcgccaatattccagaatccgacttcttttacgaaaaagaaaatttgaaccacaacttggaatcccttacgcctttaaactgtgatgttaactcgccctttttccccataattaatagtgacgttaatatcaatgactacaatgatgaaaacgtgacttattctaattttttattgtcttataagaataagctccctactacaactaataacaatnnnnnnnnnnnnnnnnnnnnnnnnnnnnnnnnnnnnnnnnnnnnnnnnnnnnnnnnnnnnnnnnnnnnnnnnnnnnnnnnnnnnnnnnnnnnnnnnagtaacaatctactgggtaatgacataagccaaatagctttcttactagattacccttctactctcaatgaaccgcaatttgccgttagttgcaaggatatttacaaaaaggatatatccaccccttcttcgttggtatcgagcttaccatctgccaatttttcgttatctctatcaaattcaccctcccctccagcaccactatcttcctccttaaagcaggaaaaagcgtcagatcgtgacttcgaaacaaacagcgccatcttcgctgaccctgccgcatttgaaagggagacatttacgcaagaactaacgttggaaaacctaaataatcagctaaactatccggatttcaccataaacgccgttgagcaagatcccgttccttcttctttttcgtcgtcctcgtccgagtcttcagaatcgtcatcgtcttcctctaagaggaaaggaaaatcctgtcacgattcattctctcactcttcaccctcctcttcttctgagtctaagaaaatttcagactccagattatccgctgaaggtttggctaaagtgctaaacttggagtcccccgaagaagcgttgaaaagagaacgcttcatactgggcattttccagaatgaactcaattacccgctaggctacaagacatggattagagacactacaaaggaatacaggacaaaattaatcaatcaactgcatcaacgcgtaaaggtcaagtatccggaatacgaccaatccattttggaaactataattaggcggggtacctactacatgatgcagagtaggttaagaagggaaagaagaacgaaactaaaagaacgtaaaagaacaacctaa

SEQ ID NO: 103 - DNA, 321 bp, Saccharomyces pastorianus
atggccaaatcgatacgtgcaagcagtcatctaaatgccaagtctatcaagagacgtgcagttttccagaaagtagtggacgcacgtgaacaaagaatatctgacagattaaaggaagatatgctcaagcagaagctagcagacctaaagaagaaggaagagcaaggaatcgaaatcgaggtcgacgagaaaaaacctgaagaggaagcctccaaaaagaatgtaagcacttctggttggagagatggtagacatcacatctacaagaaagccaagctgacgaaaaaatccaagaagaagacatctttcactaggttttaa

SEQ ID NO: 104 - DNA, 438 bp, Saccharomyces pastorianus
atggatagaaatgtatatgaagcatgcagtaatataataaaggaatttggaacgcatacagtgagtgcagatgaagtactcgctgaaaaaatagataacgtggtccctataccattcaaaacaagagaagatttgaatactgatgcagagaaagatagaaacgaaggtgtctttgagggcaatatcgttcccgatatcgacttacgcgtggtacactactacgccacacagctgtgtctaagtaagtacccacatttaattaacgcctttgatgaaacaagtcttgtcacattgggcttgcttattgagaagtgggttaaagattatcttatttgcaccaatacagaagacactagtcaaaataaaaccatcggaaagggaccatgcgaatttatatcaaagcacatcgattatagacacgccccaggtagcatttga

SEQ ID NO: 105 - DNA, 2610 bp, Saccharomyces pastorianus
atgtctgataatagaagacgtagaagagaagaagatgattcagaatcagaaaatgaattgccgccctcttccccccagcaaccttttaggggaggtatcgacccgatttcttcgcccataggtgctccagatatgattaatcctgaaggtgacgataacgaagttgacgacgtgccagatattgatgaagtggaagaacaaatgaacgaagtggacttgatgggcgatgatatgtacggagattatgcgacggatcgaaacagagatatgtatgatgcaaatcaagttgatgataggcagcagcaagaactatctttgagcgagcgtcgtcgtattgacgcacaactgaatgaaagagacagactattaagaaatgttgcctacatggatgacgaggacgaagaacaggaaggtgctgcacaactagatgaaatgggtcttccagtgcaaagaagaagaagaagaagaaggcaatacgaagatttggagaatagcgatgatgatctgttaagtgatatggatattgatccattaagagaagaattgaccttagagtccttgagtaacgtcaaggccaatagttactcagaatggattacccaacccaacgtatcaagaactatcgccagggaactgaaatcgttcctgttagaatacacagatgaaactggtcgttccgtgtacggtgcacgtatcagaacgttaggtgaaatgaactctgaatctttggaggttaattatagacacttagcagaatctaaagctatcttggcgttatttttggccaaatgtcccgacgagatgttgaaaatattcgatttagtcgccatggaggcaaccgaattgcattatccagactatacccgtattcactccgaaattcatgtaagaatttctgattttccaacaatatacagtttgcgtgaattgcgtgaatccaatttgacctctttggtacgtgtcactggggtggtgacaagaagaacgggtgtcttccctcagttgaaatacgttaaattcaattgtttgaaatgtggctctatcttaggtccatttttccaggattctaatgaggaaattagaatatcattctgtacaaactgtaaatcaaaaggccctttcagggttaatggtgaaaaaacagtttatcgtaactatcaaagagttacacttcaagaagcaccaggtaccgttcctgcaggtcgtttaccaagacacagagaagttattttattggctgatttggtcgatgtatccaagccaggtgaggaagtggaagttacaggtatatataaaaataattacgacggtaacttgaacgcaaagaacgggttccccgtcttcgcaacggtgattgaggcaaattctgttaaaaggagggaaggtaatgccgctaatgatggagaagaaggtttggatgtctttagttggactgaagaagaagaacgtgagtttagaaaaatttctagagatcgtggtataattgataaaattatctcttcgatggcaccatccatatatggtcacaaggatatcaaaaccgctgtagcctgttcattgttcggtggtgtgcctaaaaacatcaatggtaaacattcaattcgtggtgacatcaacgtgttattattaggtgatccaggtactgccaaatctcaaatcttgaagtacgttgagaaaaccgcacatagagctgtctttgccactggtcaaggtgcttcagccgttggtttgaccgcatctgttaggaaagatcctattaccaaagaatggactttagagggtggtgcattagtgttagccgataaaggtgtctgtttgattgatgaatttgataaaatgaatgaccaagatcgtacatccattcatgaagctatggaacaacaaagtatctcgatttctaaagccggtattgttaccacattacaggcacgctgttcgattatcgctgcggcaaatccaaatggtggtagatacaactccacattacctctagctcaaaacgttagtttaactgaaccaatcctttcaagatttgacatattatgtgttgtcagagatcttgttgatgaggaggctgaccgaaggttggctacgtttgttgttgattctcatgtgagatctcatccagaaaacgatcaagatgaagaagataagctagccaaagaaaatggagagtcggtgatagaacaaggcgaagatgaaataaatgaacaactcaccgcaagacaaaagagacttcaaagacaaaggaaaaaggaagaagaaatttccccgatttcacaagaactactaatgaagtatattcactatgccagaaccaaggtctaccctaaattacatcaaatggatatggataaggttagtagagtatacgccgacctaagaagagaaagtatttctaccggttcattcccaattaccgtccgtcatttagaatccattttaagaatcgcagaatcctttgctaaaatgagattgtctgaattcgtgtcttcttatgatttggatagagctatcaaggtcgtggttgattcatttgttgatgctcaaaaggtcagtgttcgtcgccaactccgcagatctttctctatttataccttgggccattga

SEQ ID NO: 106 - DNA, 435 bp, Saccharomyces pastorianus
atgaacaccaacgaatctgaacacgtcagtacaagcccggaggacatccaggaaaacggcgggcacgcgagctcgagcggcagccaacagcagatctccacgttaagggagcaggaccgatggctgcccatcaacaacgtggcgcgactcatgaagaacacactgcccccgagtgccaaggtttcgaaggacgccaaggagtgcatgcaggagtgtgtaagcgagctcatctccttcgtgaccagcgaggccagcgatcggtgtgctgcggacaagaggaagacgataaatggcgaggacatcctgatatcactgcatgctctgggctttgagaactatgcagaggtgctgaagatctacctggccaagtacagacaacagcaggcgctgaagaaccagttgatgtacgagcaggacgacgaagaggcgccttga

SEQ ID NO: 107 - DNA, 1551 bp, Saccharomyces pastorianus
atgccacctagtggccaaatactacgcgatgaaaagcctgaaaatacgttaagatttctaaccttcaatgtcaatggtataaggactttttttcactatcaaccattttctcaaatgaatcaatcgcttggatctgttttcgagtattttcaagcagacataataacattccaagaactgaaaacagaaaaaaagtccatttttaaatgggggaaagttggtggtttctactcttttatctccatcccacaaataaaaaagggctattctggtgttggatgctggattagaataccagacagtaatcatccattatatcgtgcattgcaagtttgtaaggcagaagaaggtataacgggttacctgggagtgaaaaacggcaaacaaccagcagtttcttatagagacgatacgagtcaagggattggtggttacgattctttagattctgatctggatgagaaaactgctctagaactagactcagaaggaagatgtgttatggttgagctagcatgtggtatagttgtcatcagcgtatattgtcctgcaaattcgaatctatcagagaagggggaactgtttagaatgaggttcttaaggattttatttaggagaattagaaatttggacaaaatggggaaaaaaatagtattgatgggcgacctaaatgtttgtcgagatcttatagacagtgccgatacactggaacaactctcaatttcaatagtggacccgatgggtgggaaggagttagaagcgcagcgtaatgaagaagcaatgcgattcatcatcaacccagaaacacctcatcgaagaatattcaatcagattctggcagactcgcttttacccaacgcaagtaaggagggaatattgatagacacgacaagactagttcaaacaagaaaccggcttagaatgtatacagtgtggaatagtctcaaaaacttaaggccttcgaattatggctctagaattgactttatcttggtatcctcgaaacttgaaaagcttgtaagaggaggtgacatccttccagacgtattgggttctgaccattgtcctgtatactctgatttagctttagatgttttcgaagtgaaacctaacacggctaacgttgccatcccaaaattcgaagcaaggtacaaatacaatttaagaaaccatgatatcctagaaatgtttgccaaaaaagatcccggtaaaggacacaataaacaacaatctcgtataacgaaaggtgttagtacaaagagaaaaaatattagtgacagcaaaccactcgattcatttttccaaaaaaaagattcatcaatcaaaaagtcttcggaattaccagagccaaataaacaaacaagatcggcatcaaaatttacttttaaagacgcgtttggaaagccccctttatgcgaacatggggaagaatccatattgaagacatctaagaccttggccaatcctggtaaaaagttttggatttgtaagagatctcgaggtgattcaagcaataaggaatcatcttgtggtttcttccaatgggtttga

SEQ ID NO: 108 - DNA, 837 bp, Saccharomyces pastorianus
atgagtgatgaggaacgaatagaggcgacgataaatgaatctgatgttgggagtgacactagtgatgatttcgggaatttctcagatgcttcagtggaaaatgacctatataataccgtaacgatatcttcagaggccgtaatagacggttgcttagacaaaatcctgccagacgggaatttttctagtttagaaatggggactgtgaaaagcaactgttgtgagcttagtagattgattgaagatgaacgaccccatgtcatttatgaacagctagtacaactggattttgtattacagccattcgtatggaataaatcccacatacggaagaacttgctgcacattctaagattgtccgataacgatggctctgataatgcacatcttaagaagcaggaagagccactgaacgatgaattgttcaaaagaatatgcgatatagtagaaaaaaatgagcaaacagccactggtctatttctgagagataatttcaagatcgattacaccccacccatgactttgaaatctattcaagttgaagaggagcatgaacaagaacagcatataccgcaattgctagcggccgattatacggatatggatggagaagcattacgccgataccatgataggctgtgtcaatccattgactttctggtaagtaaatcgaaatcgctgaaaaagaagcagcaagatcttcttaatgataagacgacttttgaaaatgtggtaacgaacttgactgggcacactcaaaggctccagagagatgaaattgcattgtataataaaaagcgcagcaaaaagaagaggttcagttgggttggatactga

SEQ ID NO: 109 - DNA, 2040 bp, Saccharomyces pastorianus
atgagttttgatacgcctgcagattcgcagatactcggcactagatatcttgccctcgaggtagcagaaagtgatgatgctgatagcttattggcttcttcatccacaggtagtccagcagtggacccagcaaagagggtttacaagattccatcatacaagagttcgatagaagacgagaatcaatggtctcttggtcttgcgcgctctccagcatccaaggcaaggcctgcaggaagatccatagaaaacgaggaaaaccatagtaagcgatcttccacaggctcatctctcaagcaactcttcaataaaattgatatcaatgatactattcactcttcaaacaaagaaaacacctctcaagttcagctatcagaaaacagaattccgtctccttctaaaaggttattgaagcaaagtcatacgaaggtagcaaactccaagttccgcacaccattaaggcccatttcagatcaatcaactttatcaagggacgaaggaatcagggactttggtctgcttaactctcgaagtggagataattggcggagccccaacagtgacaagagggccagttctcatgtacactcgccaagtattacttctattgattcttttagttccagtgtgtcttcacccaagtggaaattctggaagaacgataacctattgtctaggtcattgtcgtcaagatccataaatgtccaagcttcagactctgcacgatcacagacaaccaatcagttgcagaaaaaatcttccatctcaagtttccagaattccatctttggcagtggaaatcacacccaaaagaaaagggattctggatttattatgcctgatcatcaaagcacgaaggaattgaaccataaacattcctcatctaatctttcttttagaagtttgaagcacaagacatcgcactcctccctaaataaacttaagataagacgtaaaggaaacacacaagaatcgaatggccaagcaaaatcagcctgccagatctcgctgcctgttccagatcaagtgtccagggacaagatgcaattgaaattaaaaaattccacgtcactggcatctttatcttcagagattactcctataaatactttagactacaacgattcaatcttacaacaaattttacagctttgcgacgtcagttatatattacatgacctatttgaagcccaatcattaaatttgattatgctaaacagtaattcagttcaactatctcgtaatttttggaaaacttattatagcgatacgcaagcttcaattatttgtaagaaaatcagtctcggcactttgagtgatctaaccacttcaaattttatatctctgcacgagttgaaatcacttcgattcttgcaaggaactactggggttgctcatttgttgcaagcgtatattatgccatcagatcagaataaaggtgaccaagccttggtatttttgtacttattcttcaaagaccatggaactcctctgtccagatgtcccaagattgattactgtcaagcgttgtccattttttggcaatgtgctagcattctgtacgttactgaatccaaatttcaatttgagcacagaaatttgaccttagaccatattttggtggatcctagagggaatgttactctgattgatctaaaatgctgccgttttgtaagtgtaaacaccaataaagcattttatacaagattagaccaccctttttttttccaaggacaaggaaacttacaatttgaaatgtacgaatccatgagaagtttgttatctcagccgacatcctgggctacttttgaaccaagaacaaacctattatggttgtattatgtcagtatcaacttgctaaagatgggcaggaaaagcggaggctcccacgtttcgaaccatgaagaaagtgtcttgattaaattggcacatttgctcgatccagctcgaagacaatccaagaaaatttttaagaaaaaagatctttctatcagaacatgcggtgatttattatcttccagacaagatatcatggaataa

SEQ ID NO: 110 - DNA, 3633 bp, Saccharomyces pastorianus
atgaccgtgtttctgggcatatacagggccatctatgactacgagccgcaaactccagaagaactggccatccaggaaaatgatctgttgtacctgctacaaaaatcagacatcgacgattggtggacggtaaagagaagagtcattggctccgacagtgacgagcccgtgggtctagtgccctccacttacatagaagaggctcccatcttaaagaaagtaagagccatttacgattacgaacaggtgcaaaatgcggacgaagaattgacttttcacgaaaatgatgttttcaatgtgctcgatgataaagacccggactggctgctggtgaaatctactgtctcgaacgagtttggtttcataccaggtaactacgttgaagtggcagacaacgctgctcccaagcaagaagcggccccaacgggagctcctgctgccgctcctgctgctgggctacccaccagctttttgccgccacctcaacatatagcacgtaagcaacaaattgaacaagaccaaactccagaagaggaggaagagggccctcctcctgccatgcccgcgagaccaagagccactactgaaactactgaaaccaccgctatggcaggtccagctcataacagattatcttatagcgatgacgataacaacgatgacgaagaagaagattatgactactataatagtaacaacaacagtaacagcggtgccaatcgcgaatacaacacagaataccattcttggaatgtcacagaaattgaaggcagaaaaaagaaaaaggccaagctatcaattggtaacaacaaaataaactttattcctcaaaagggcgctcctcatgagtggtccattgataagttggtctcttatgataacgagaagaaacacatgtttctagaatttgttgatccctatagaagtcttgagttacatactggtaacactaccacgtgtgaagaaatcatgagcatcattggtgagtataaaggtgcttctcgcgacccaggcttgaaagaagtcgaaatggcctccaaatccaaaaaaagaggtgtcgtgcaatacgatttcttggcagaatctcaagacgaattaaccataaagtcgggcgataaggtttatatcctagatgacaaaaaatcgtcagactggtggatgtgccaattaatcgattcgggcaagagtggtcttgttcctgcgcagtttgttgaacctgttcgtgataagaaacataccgaatctacagctagcggtataatcaaatccatcaagaaaaatttcaccaaatctccttcaagatcgagatccagatcaagatccaaatccaatgctaacgccagttggaaggacgatgaatctcaaaacgacgctgccctcagtactagcggtgcaagatcaagaaagggttcattgtcctctcacaagaaaaactcgtccacggcggggactaaagatttccccaatcctaagaaatcccgtttatgggttgacagaagtggtactttcaaagtagatgccgaattcattgggtgtgccaagggtaaaatccatttgcataaggctaatggtgtcaagattgctgtggccgctgataagttatgtaatgaggatctggcgtatgtggagaaaatcacgggattttcccttgaaaagtttaaaattcatgatggttctagttctcatggcactgattcaagggactctgaaagagaaagaagaagaagattgaaggaacaagaagaaaaggaacgtgatagaagattgaaggaacgcgaattgtatgagttaaagaaagccagagaactactggatgaagaaagagcaaggctgaaagaaaaggacctgcccccaataaaaccgccaagaccaacctcttctgtttccacttcaaacacaacttcccaatcgattacacaaaacaacaacagtaatggcaacaaatatgactggtttgaatttttcttgaactgcggtgtagacgtaagcaattgccaaagatacacaataaattttgatagagagcaaattactgaagatatgatgcccgatgtcgataattcaatgttaagaactttaggtctgcgtgaaggtgatattgttagagtaatgaaataccttgataagaagtttggaagagaaagtaatatagctgttccaacaaatatgacaggcaatatgttctcacaacctgatggttcattgaacccagccacaagtgctgaaacctctttacctcaacaactattaccgcaatcaacagcccctatagcaacagccccttctgcatcagcagagaccgatgatgcttggactgttaagccagcctctaaatctgaatccaatctactgtctaaaaaatctgaatttactggttccatgcaagatttgttggacctacaacctttagaacctaaaaagacttcgaccacgacaccagaaccaaatttgaaagacttgcaacctgtgaaaactggtggcactgctgctcctgttgccatttcatccgcccctactcccgctccattagatccattcaagactggtggtaataacatcttaccattgtccactggctacgtgatgatgcctatgatcaccgggggtgcaatgctacctatgcaaagaaccggtggcttcgttgtaccacaaaccacttttggtatgcagcaacaagtcactggaggtatattgcctgttcaaaagacaagtaatgggttaatcgccatctccaatactggaggtgctatgatgccacaaaccacttttggcacaacacccactattttacctttacagaagacgggaggtggtctaataccaattactacaggaggagcacaattgccacagacttcattcaacattcaaatgcaacaaccacttccaacaggcacaatattgcctgttcaaaaaacggctaacgggttaatttcaaccaatactgatatttcaatgccgcctttacaaaggactggtggtactatgatagcacaacctcaaattacgggtggtgctatgatgccacaaacatcatttggtgtttcgcaacaatttactggtaatgcaatgatggcccaacctcaaagaacaggtggtgccttaaatacattcaacaccggtggtgccttaaatacattcaacaccggtgctatgatgccacaaacatcattcaatgctcaacctcaaatcacaggtggattccagccccaatctcagttcggtttaacgttacagaaaacgggcggtattgcaccattaaaccagaatcaattcacaggtggagccatgagtactttcaacgtcggaggtgctatgcaacaacaaccacaacaaccccaaatgatgactactttcaataccggcaatgctatgcaacaaccccaaatgatgaacaccttcaatactggtggcgctatgcaacagccacaaatgatgaacactttcaataccggcggcgctatgcaacagccacaggtgatgagtacatttaacacgggaggtgctatgcaacaaccccaacagcaagcattacagaaccaacctactggatttgggtttggtaatggccctccacaatcaagacaagctaacatattcaatgcaactgcatcaaatccctttggattctaa

SEQ ID NO: 111 - DNA, 2889 bp, Saccharomyces pastorianus
atgaaggcgaaaaaaacaactagatcgaaagtttctaatgcatgtgtcaactgcagaaagagaaaaatcaaatgcacaggtaaacatccatgtacaaactgcatttcttataattgtaagtgcgtgtttttgaaaaagtacttgtccctagagagagatgctgctgttggcctgtcttctacgaatcctagtgtagatacctctgcaggtgtgcatcatcgtgacactacgactaaactagaacaccagaattacttcgaactaatgaacgagccaatacagactccagtctctccgagttctgcaagtgtcactaataataacgattacatcctttttaagggcgattctagttatcaatcccagctcactacgtatcagagtattctagcaaatttatattcgttgcccccttccaccgacactcaacttttaatcactaagaccaaggctcaactagacaacttaattaacaactggaaccctgagataaactatcccaagctttccaagctttcacctcctccacaaaagtccatagaaacttgtcttttagtgaataaatatagaagtaaggtttacatgacaaggttttcaatttggacggaccagatggtcaagaaccaaagttcagattcatttctggccactctcccgttagttgatgagatttttggtcttttctctccgctacaagctttttccttgaggggtataggttacttaatcaaaatcaatcttgataatgtaccttcaccaatgctgatagattcaaaggaaaccatttatttgatattaagactgtttgacttgtgttatgagcatctggttcagggttgtgtctctatagctaacccactagaaagttatcttcaaaggacaaaccaactctccgccacagcgacacctgttactttgtccacctcgccagcctctctgagtaatgatctggtcctctgtgtcatcaataaactacctcaaccgtttatccaaacaattacgggtttcacaactgctcaattgctcgcaaatttacacgacgcattttcaatgttccgcatcgtgacccaaatggcttccctccatcgaaagcgctttaaagaattcttaaatcaagagttctctttgccttatcaaaatcgtgatttgttttcatcattttgttcctctgaatatcttatatctacactttgttacgcatactataatgtcacgttataccacatgatagatataaatactttggattacctagaagatttggtgccccttctagaggttcaaaacgaaatcaacgatcattttggatttgaaaaaatgttagaagtcgcggtaatatgttgcatcaagatgggcttagctcgttgggagtactacgttggcatagatgaaactacggcagaaagaagaagaacggtttggtggaaaatctatcgcttggaaaagtatcatttagttgatcttggtgacctgtccctaattaacgaacatcaaattagttgccttttaccaaaggattttagggacatgggattcattaaccatagagaatttctatcaaaaatcggtacatcttctctatcatcatcgtctcctgaattaaaaaatttgtcattaaccagattgattgagtatggtcagctagcgatcgcccaaattgtgggagaatttttttcagagactctttacaatgaaaaatttacatctttagaaacatctgttaaaccaacactcataagacaaaagttattaaaagaggttttcgataatgttgaatcttttaggggtaaattggctaaaataaaatgtcatacgtcgaaggtcttcgaagtagcacaatctaattttccacaacatccaagaaatgacttgattgaagcagcaatattcacgagcttttataataatacgtggttttcaatcctgggtgccgtcagcaatctaattgctaggctatctgaagatcctgaagtgatgactgatcaatctttgaaatatggagaagaaatgtttcaagactggaaaaagaccaatgagtttttagcgaaagtagacactgatttcacggtttggagttgtttagattcctatgaattgatattcttcttgatggcttcaaaaatttacgtacaaagcccgagcgttactttagatgatgtcattagtactttaaaggtcttcaagaggattacgaaaatcatatatttttttaataacaatctagacgaaaaagattctgactgccaaactttcaaagaattttcgagaagctcgagcttaattgccatatcaattagaatcatttttatgagatattgctttgccgaaaaaatcgatagaactgaatttatcaaacgtttgaaacaagttgaaccaggtttaactaatcttttgaaggaattctttgacaatcgttcttttatttataaatatatgttgaaatcagtcgaaaaatcaggttttcatctaacaattaggcaaatgttggaaagtgactataaaatctcatacaaggacaaacaggccactggaaatatttcagaccaaagtaatttaaatagggcttctcacttaagcagcggcactaccccattctgtaaccactcttctacttccccagtaagctcacccttaaagctatcatctctgttgaactctggagaagtgccatatacccaagatgtgccaggaaatacttcaaatgatacgcctcatcaacaacaatcatcgcagcaagctaaaagacaacaatctgtgcctaatcaaatgaacaacaccgaaaataatatatacaatttgggcactttggaggaatttgttaacagcggtgatttaaccgatttatatcatactctctggaatgacaatatttcggatccctttctatga

SEQ ID NO: 112 - DNA, 7488 bp, Saccharomyces pastorianus
atggcaaaacaaaagcaaaccacaaaatcgtccaagcgatatagatattcctccttcaaggccaggatcgatgacttgaagattgaaccagctagaaacttggaaaaaagagttcatgattatgttgaatcatcacattttcttgcttcttttgatcagtggaaggaaatcaatttaagtgctaaatttacggaatttacaggggaaatagaacgtgatgttcaaacattaccccaaatattataccacgatgagaaaatttttaactctttagtttcatttatcgatatgcatgacgagttttctttgcagccgctattggacctcctagctcaattctgtcacgatttaggtcctgattttttgaaattttatgagaaagctatcgaaactctaataaatctgttagatgccgctatagaatttgagtcgtcgaatgtttttgaatggggttttaattgtttggcttacattttcaagtacctttcgaaatttttagttaagaaattagtattaacttgtgaccttttgattccattattatctcatactaaagagtacctttcaagattttcagcagaagcattatcctttctagtgagaaaggcccctgtccccaacttgagtgagtttgttagatctgtttttgggaaattagaaggagataatgaacaaactaatatttacgaaggtcttttgatattattcactgaatccatgacatctactcaagaaacgctacactctaaggccaaggtaatcatgggtgttttgctacaggaaggtttggcgaaatcatctacagaaagatctatttcattactgtcggatatttggatgaacattagtaaatatgcttccattgaaagtctgcttccagtctatgatgtcatgtttgagaagttcaactactcgcttgataccactaatatcgacagaatagtaaaagtattggcaacgatcattttttctgaaagtggtagaaaaattcccgattggaacagcgtcactagcttaattgaaaaattaatgaatgatgaaaacagttcttcgctctcacctgataacgtagcgttcctgtttgccgtgtttctccgtaatagtgatgttaaaactctaactcaatttcaccaaaaattgttcaattacgctttgacaaatatcgctgaccattttctcgaattctttaaatctgcattaaaactaaactatgaaagagtgctttcatttaatggtttgaaatttttgcagctatttttaaagtcaaactgggaatcacaaggaaagaaaatcgcactgttctttttagaaatagatgaaaagcctgaacttcaaaaaataatgagcgttactttcccagaagagctcatttcatccatcagagattatttcgtcaccgtagaagaaattaaagactcaaatgatctttttgaaatatattggagagccatcattttcaaattctcaaaattacaagattcagctgttatcacctctttacttgcacgtattttttcagcatttccaaccccagacaacttcaccaaagatacagttggtgccctattgagagtgtattccaagggagacgaagctctaggacaaaacttattaaaaaatattttggagaattacgaaaactataaggacagtttaggctttgtgagcggatggaatcagttattaagtaatctcgacccttcaaaaagcgtaacagacctactcccacagtatccagagctactgttaaacctaacagacaatctggtcttacccgatgggaaaatccgttacgaaactttcgaattgatgaaaacattaatggttttacaggatataccagtacctgatcttctttcttcatgtatgattatcgagcaaatacctcttacgttacaaaacgccagggatttgacaatcagaattaagaatgttggtgttgagtttggaaagactaaggtagataaactaacgtcctccttttttcttaagtacttgttcggtcttttaactgttaggttttctcctgcttggaccggtgtttttgataccctccctaatgtttacacaaaagaccaggctctcgtttggagccttgttttatcgtttatcaaatgtcctgaagaaaatagaaagttggactactacgagcctctacttgaagacggcccagacgcaattttgtgggactctagtgtagtaagattaagagatactattgattcgttctcgcaagcttggtacaaatattctacccagaatacaagcatcataagtacgactattgaaagacgggggaatatcgtttacccagccttaatcagaaatcaagctcttaaagttatgctatccattccccaagttgctgaagcgcactttgctgatatcgcaccttttgttttcactgatttcaagacctataaggatgaagaagacatggaagatggtactgaacgtgttattactggcgcatggatggaagcggataggaacttgtttttaaaaagtttaagcaaattcaaaaatataaagaatgttcacaacgcaaccgagttacacgaccatttgatggtgctactaggcagtcgtaatacggatgttcagaagcttgcattagacgctctcctcgcttacaagaatccgaccttaaataagtacagggacaatctaaggaatttgttagatgatactctatttaaagacgaaatcacaatgtttctaacagagaatggatctcaaactatcaagggcgatgatgagaaggtagtcatgccttatattcttaggattttctttggtcgagcgcaagttcctcctaccagcggacagaaacgaagccgtaaaattgccgtaatttctgttttgccaaacttcaaagaagtttatatcaatgactttttaactttggctagtgaaaggttggattgtaactactttttcaacaacaatcatcaaatagatagctcgaaggccattttaaaaactattagacgcatgactggttttattaacattttgaattctgcactatctgttttgagaacgaatttcccattacatactacatcagtgttacagccattaatctactcgatttctatggcatattacgttttggagactgagagcgcaacagaggtacatttaagaaaaatggcagcaaatttaaggcagcaaggtctaaaatgtttaagcaatatcttcgaatttgttggtactacgtttaattggcctgtagctatggacagtatttttgctgttgttgttaaaccacgtattccacatttttccgatgagaatttacaacaaccttcttctttgctacgaattttcctttattgggcaaataatccctccttgtacccatttttgtactacgatgaatttgcagctgctacagcattgatggacaccatctcaaacgaacacgtcaaggagactgtcattagccccattctcgaagcagcggatgcaattattagggcaccagtaaatgacgatcgttacgtggatttggtaactctgatttgctcatcttgtctgaaaatacttcctttgttatacactaaactttctgactccaactcaatttctatattcctggacttactaatcagtattattgagtcggacttcattcaagatgatgatgttagaagtcatttaattagctcattaacatccatactgaaaggaaagctaagaaaattgcacgaaaacgatacacagaaaattctgaagatattaaaacttttagtgtataactacgattgttgttggaatgatatcgaagagctctatagcaccatatcctctttgttcaaaactttcgatgagcggaacctgagagtttcattgacagagctcttcgtggaacttggcagaaaagtgccagaattagggaatatttcgaagttagttgccgaactaaattcgtattcttcatctcgtttgcatgagtatgatttccctaggattttatcctccttcaaaacgcttattgaaggtggctataaatcttatagtgagatggagtggttgcctcttttgtttacctgtttatattttatcaacgataaggaagagcttgcgctgagaacaaacgcatcgcacactatgatgaggtttgttgatttcattaatgagaagcctgattctgatgaagccaaaaaatcagtttctatgttaaaagatatccttttacccagcataagggctggtttaagacaacctgttgaagaagttcagagtgaatacatatcagttctatcatatatggtaagaaatgccaaatatttcacagacttcgaagatatgaccgttttgctttataatggtgatgaagaagcggatttctttacaaacatcaatcatgttcaattacatcgtcgtcaaagagccatcaaaaggttaggagaacatgcgtgccaactcaaagataacagtatatcccactatttaattccaatgattgaacattatgtattttcagatgacgaaaggtatagaaacatggggaatgaaacacaactagcaattggagatttggcacaacacatgagctggaaccagtacaaagctcttcttagaagatacatttctatgctgaagagcaaacccgaccaaatgaagcaagctgtactattaattgttcaactttcagttccgttaagggaaactcttcgtactgtaaaaggtgaggctgagtcaaagtttgctttgagcaaatttccttctaacttggaggagcccactaattttattacgcaagaattgtaccctactctttcaaagattttaggaacaagagacgatgaaaccattattgaaaggatgcctattgctgaggccctggtcaatactgtattggggctttcaaatgatgacattctcaattatcttccaagcattttaacaaatatttgccaagttctaagaagtaaatccgaagaattaagggacgccgtgagaactaccctgggtaaaatcagtattattctgggtgcggagtatcttgtttttatgataaaggagttaatggccacgctaaaacgtggttctcaaattcacgtattgagttacactgtccactacatattaaagagtttgcaaggagttttaaaacattctgacctggatccatcttccagcatggttgttaagatcatcatggagaatatttttggtttcgctggtgaagaaaaagattctgagaattaccacacaaaagtgaaagaaattaagagtaataaaagttacgatgccggtgaaattctagctgcaaatatcagcctgtcagagtttggtacattactttcccctgtgaaggctttattgatggtcagaattaatttgagaaatcaaaataaactgagcgagttattgagacgatacttgctgggtttgaatcataacagtgatgcagagtcagaagatattctcaagttctgtcaccaacttttccagcagtcagaggtgagtgaatctatacagaaaccgaagaggaaagtaagagcagaagtggacgaaaaagaggaatttttcttagtgaatttgaacgcgaagtcatataccatcaattcacacaattctctcttaggtagcactttacaaaaatttgctttagatttgctaagaggcgtactagcaagacatcgctcctttttgaccgtgtcccacttagaggcctttatcccatttttgagagattcgttactttcagaaaatgaaggtgtggtaattagcaccttgcgtattttggtcacattaatcaaattggaattttctgatgagtcgagcgaaatcttcaagaactgcgccagaaaggtattaaacattattcaggtttctccgtccacttcaagtgaattatgccaaatgggtttgaaattcctttctgctttcatacgtcacactgatgcaacattgaaggatactgccttgagttacgttttaggaagagtcttgccagatttgaacgaaccaagcagacaaggtcttgccttcaatttccttaaagcacttgtttcaaagcacgttatgctaccagaactttatgatatcatggataccacaagagaaatcatggtcacgaatcattcaaaagaaattagggatgtttctagaagtgtctactatcaatttttgatggaatacgatcaaagcaagggccgtttagaaaagcagtttaagttcatggtggacaatttacaatatcctacagaatccggtcgtcaatcggtaatggagttgattaatttgattatcacaaaagcaaatcctgctttgttgtcaagactatcatcttcgttttttttggcattagtcaacgtctccttcaacgatgatgcgccgagatgtcgtgaaatggcttcagttctactttctacaatgcttccaaaacttgaaaataaagacttagaaatcgttgaaaaatacgtaacagcctggttaaagcaagcagagaatgcgtcgttcttgaacctcgggctaagggtttataagatttatttgaaaagtgttggatttgagcataatgctgacctagacgaatttgctattaagcgtataagatatgtgctaaccgatacatctgtaggatcaaaacatgaatgggacttggtgtactcaagtctgaacacattctcgtcctatatagaagcgacagagggcgtgtacaagcaagatttcaaagacatatgggatggtgtcatcacatgtttgttgtatccgcactcttgggtccgtcaatctgcggcaaacctcgttcacttgttaataaacaataaagataagctggaggtaccattgaccgatttggaaattcaaattatcggcacaagaattcttcatcaactaggtgcaccttctatcccagagaaccttgctaatatttcaatgaaaacgttggttaatatttgtaccctatggaaagatggccacacgccattcgttatggatgcttcgaaggaaaatgaaggagagcccaggtacgctaccgcgattgattttatgattactcgaatcggtggtattattagatcagatgagcaccgtatggattcgtttatgtctaagaaggcatgcattcaactactggccttattcgttcaagtcctagacgaaaaggaagtaatcgatgaaggtgaaaagatattattacctttatatggttacttagagacttactattcaagggcagttgatgaagagcaagaagaactacgcactcttgccaacgaatgtttacaaattttagaaactaaactaccagtttttgagttcacaagaatatacactgctgtcaaaaagacagtattagaaagaagaaaggaaagaagatccaagagggcgattttagctgttaacgctccacaaatttccgctgataaaaagttaagaaaacatgcaagatccagagaaaagagaaaacatgaaaaggatgaaaacggattttaccaaagacgtaacaagaggaagagggcataa

SEQ ID NO: 113 - DNA, 399 bp, Saccharomyces pastorianus
atgtccggtggtaaaggtggtaaagctggttcagctgctaaggcttctcaatctagatctgctaaggctggtctaacattcccagtcggtagagtgcatagattactaagaagaggtaactacgcccaaagaattggttctggtgctccagtctacttgactgctgtcctagaatatttggctgccgaaatcttagaattggctggtaatgccgctagagataacaaaaagaccagaatcatcccaagacatttacaattggccatcagaaatgatgacgaattgaacaagttgttaggtaacgttaccattgctcaaggtggtgtcttgccaaacattcaccaaaacttgttgccaaagaagtctgccaaggctaccaaagcttctcaagaactataa

SEQ ID NO: 114 - DNA, 396 bp, Saccharomyces pastorianus
atgtcctctgctgccgaaaagaaacctgcctccaaagctccagctgaaaaaaagccagctgccaagaaaacttctacttctaccgatggtaagaagagaactaaggctagaaaggaaacttactcctcttacatttacaaagttttgaagcaaactcacccagacaccggtatttctcaaaaatccatgtctattctaaactcctttgttaacgatatctttgagagaattgctaccgaagcttctaaattggctgcttacaacaagaagtctactatttctgccagagaaattcaaaccgctgtaagattgatcttaccaggtgaactggctaaacatgctgtttctgaaggtactagagctgttaccaaatactcttcctctactcaagcttaa

SEQ ID NO: 115 - DNA, 315 bp, Saccharomyces pastorianus
atggccaagatcttttgtttagctgatgtttgtatggtacctgttggtaccaattctgccagtatatctgactttgttgcgttaattgaaaaaaagataagagaaagtccattaaaaagtactttacacagtgccggtaccacaatcgaagggccttgggatgaagtgatgggtttgatcggtgaaattcatgaatacggtcatgaaaaggggtacgtcagagttcacactgatattcgtgttggaactagaaatgataaacatcagactgcccaagataaaatcgatgttgttttaaaaaagatatctcaatga

SEQ ID NO: 116 - DNA, 2343 bp, Saccharomyces pastorianus
atggtagaattcttgccaaaagtcacagaaataaacccaccacccgatgtcgatgatggtgaggatgaggtggagcccctttcaaatggtcccgaacagcgatcattgaaagaagaggggcaacaaggtactagaaggcatcatcggcggttgtcctctatgcacgaatattttgacccattctgtaatgcagatgtctattacggtccggtaacagacccaagaaagcagccaaaacctcacagactaaacagaaccagaacgatgagtgttttcaataaagtttctgattttaagaacgacatgaaggattattccttgaaaagaaggggctccgaagacgatagttttcttagtagtcaacgcaatcgtaagttctttatcgataatgtggatatggctctagatgagttgctggccagtgaagatacagataggaactaccaaatcactatagaggatacaggtcccaaagtaatcaaagtcggaacagcaaattccaacggtttcaaacatgttaacatcagaggaacatatatgctttctaatctgttgcaagaactgaccatagcaaagagtttcggaagacaccagatatttttggatgaggcacgtataaacgaaaatcccgttaatagattgtcaaggttgataacgaatcagttttggaatagtctaacaagaagagtcgatttgtacaatattgcagaaattgctcgcgactcaaaaatagatacaccaggcgctaaaaatccaagaatttatgttccatataattgtcctgatcaatacgaattttacattcaagcatctcaaatgaatccgtctttaaagctcgaagtcgagtacttgccaaaacatatcaccccagaatacgtcaaatcattaaacgatacacccggtttgttggcattggccatggaggagcatgtcaatccatctactggtgaaagatccttggtcggctacccctatgcggtccctggtggtagattcaatgaattgtatggctgggactcgtatttgatggcattggggctcttagaaagtaacaaagttgatattgcaagaggtatggtagagcatttcatatttgaaattgaccactacgataagattttgaacgctaatagaagttattacctttgcagatcccaacccccgtttcttactgatatggccctgttgatctttgaaaaaatcggaggtaagaataacccaaacgctatacaatttctgaaacgcgcatttagggctgctattaaagaatataaaggcgtatggatgtcaacccctagattagatccaattactggactttcttgttaccaccctgatggtataggtatccccccagaaactgagcctgcccattttgatacgatattgttaccatacgctgaaaagtataatgtttctttggaaaaccttagaaagctttataatgacggtacaataaaggaaccaaagctggacgcctttttcttacacgatcgtgctgtgagagagtcgggacatgacacaacctatagatttgaaggtgtatgtgcatatttagcaacgattgatttgaactctttactttataagtacgaaatcgatattgctaatgttatcgaggaatactttgatgatgaatactttgatgagaatgatggaacggttactgatgctaagcattggcggaaattggccaaaactagaaaggatagtattaacaagtatatgtgggacgaaaaatctggattcttctttgattataatattaaacttaaatgcagaacttcctatgaatcagctacaacattttggagtctatgggctggtcttgctaccaatgagcaagcaaaaatcatagttgaaaaggcgctccctcaattggagatgcttggaggactagttgcatgcacagagaaatcaaggggccctatatccattgataggccaattagacaatgggactatccgtgcggttgggcaccacaccaaatattggcatggaaaggcttgtcctcatacggctatgaacaaatagcgacaagactagcttataggtggttgtacatgatcacaaaagctttcgttgattataacggaatggtagtagaaaaatatgatgtgacaaggggaactgacccgcatcgtgtcgatgcggaatatggtaatcaaggtgcagatttcaaaggtgttgctacagaaggttttggctgggtaaacacgagttacttgcttgggttaaaatacatgaataatcatgctagaagagctcttggtgcttgtagcccaccattacctttttttaatagtttaaaaccatctgaaaaaaaactatactacctttga

SEQ ID NO: 117 - DNA, 861 bp, Saccharomyces pastorianus
atggagacggttagcggtatacctggacactcgtttgtgcttaaatggactaaaaatattttctcgcgcacactgcgtgtgtctaattgtgtacctaaacatgttgggtttattatggatggaaacagaagatttgccaaaaaaaaagagatggctctcaaagagggtcacgaggccgggttcgtcagtatgagtaggatcctggaactatgctacgaggcaggagtagatacggctactgtgtttgcgttctctattgaaaatttcaaaagaagttcacgtgaggttgaatcattaatgactttagcgcacgaaagaatacgacaactcacagagcgtggagaattggcttgcaagtacggggtgcgcattaaagtcattggcgatctttcattattggataagtccttgttggaagatgttcaagtggctgtagacgccacgaagaacaacaagagagccacgttaaacatttgcttcccgtacacgggcagggatgaaattttacacgccatgaaagaaaccgttgccgaacataagaagggtgctattatagatgaaagtacgttagaatcgcatctctatactgcgggagttccacctttagacttgttgatcaggacgagtggtatttccagattgagtgactttttaatatggcagacatccaataagggcgtgcgcattgaactattagattgcctatggccagagttcgggcccatacggatggcatggatcctattaaagttctcattccacaaatcctttttaaacaaagaatatagattggaagaaggggattatgatggagaaacacccgaggactccgtcgacttgaaagaaaagaagttgaactag

SEQ ID NO: 118 - DNA, 1302 bp, Saccharomyces pastorianus
atgctagtaggcttaactctatattttgtactatttcgctcactgcagtacctgttagtattccttactccagtaaggcagttcgatacgtctacatcacttttattaaatgagctatgcacttctcctaatgagatcaacagttattggaacaaatttttttggaataagctgttatcctgggatgccgttttctttatcaagaatatgacttctaaagacgaaaagcctcaatttgagcacgaatacgcattttctcagctttgggcttccctaataagattgatcgtcaaaaataatgataaaaatatttatcatgttttcaaagttgcggtcgtaatggaaaatgtcttgttttactcatctgcaattgttctatatttcttaacgaaaagaacttttagccaaaataaaaagcattcacggtttgccaaaagtatcgctaaaaagacatctttattattttctctaactagtgccgctggatttttaactagtatatattctgaaccgttatcatttttcttagcatttgtcggtatctggtgtcgtgagtgcaccatctccatacctgtctccggtcaatttgattgtccatggaggaactggttttcctattccattatcagcatgtcctgtttcaccttagcatcactgaatcgttcaaactgtattttgctcgggatatatttcgtttttgacctaattgagctcacaaagaataggaaatttgtaaaagcaatttgctttccattgttgtcaggattactaatgttttccgccttaatatatcaacaatattacctaccgtacaataccttctgcccccaaagaggtgaatggtgtacatctcaattattaccaagattattcgttacaaagacttctctgtattcctatatccagggccattattggggagtcggatttttgaaatattggaccccaaataacattccaaattttttgttggctataccgaatattattattttgacatattcctccatatattttagcaaaatctacccatcctacaatttgaagcccctagtatggattaccagatccttggttatcatggtatgtctttttgctcacgtccaaattttaaaccgtatagcctcttttataccattacacctttggtacttggccgatagattggttaagacctcaggaccagaacaaatggacaatccaaagggtgacgataaaatagttaagctttacatatattggcttgcgttttggatacccttacaaacagtcttgttcgctgcattcttaccgcctgcctaa

SEQ ID NO: 119 - DNA, 1494 bp, Saccharomyces pastorianus
atgagcttgagcaagtattccaaaccaactttaaacgatcctaatttatttagagaatctgcatatgtcaacggtgaatggatcaaaggtacggacgagttttttgaggtggtagaccctgcatctggtgaaatcatagcaagggttcccgaacagccagtctctgtggttgaaaaagcgattgatgtggcttattctgccttcaaaacctacaaaaatacgtcaccaagagagagatccaagtggctcagaaaattgtacaatctaatgcttgataatttggatgatctagccacaatcattactttagaaaatggtaaggccctagaagaagctaagggagaagtcaaatacgcagcttcgtattttgaatggtatgccgaggaagcacctcgtttatatggtactaccattcaacccttgaaccccaacaatagagtttttactattaggcaacctgttggtgtatgcggtataatttgtccttggaatttcccaagcgctatgattacaagaaaggctgctgctgccttagctgttggttgcacagtggtcatcaagccagattcccaaacaccgctgtccgctttagcaatggcatacttggctgaaaaagctggctttcctaagggttcatttaacgttattctttctcatgctaacacgccgaagcttggtatgacattatgcgaatcaccaaaagtgaagaaagttaccttcactggttcgacgaatgttggaaaaatactgatgaaacagtcatcttctactttgaagaaactgtcttttgaattgggtgggaatgctccatttatcgtctttaaggatgctgatctggaccgagctgtggaacaagccatagtctgtaagtttagaggactgggtcaaacttgtgtatgcgcaaataggctatacgttcactcttccataattgatagatttgccaaatcattagcagatggagttaaaaaatttgtacttggtcatgggttggacccaaaaaccacacatggttgtgtcatcaattctgatgccattgagaaagttgaacgtcataagcaagacgccatttccaaaggagcgaaagttattcttgagggtggccgccttcctgatttaggacctaacttttatgctccagttatattgtcacatgtgccaccaacggccattgttgccaaagaagaaaccttcggtcctttatgtccaattttttcatttgacactatgaaggaagttgttgggtatgcaaatgacaccgagtttggtttggcagcttacgttttttccaaaaatgtcgacactctatatactgtgtctgaagcgttagaaactggtatggtttcatgtaatacaggtgtcttctcggactgttctctaccattcggtggtatcaaagaatcagggtttggaagagaaggctcgctacatggtgttgatgactataccgtcttgaagactgtcacaatcggtaaattgccagatagtatttag

SEQ ID NO: 120 - DNA, 2157 bp, Saccharomyces pastorianus
atgaatcaaaatataaaaaacacttctcgggcagatcgaataagtagcaaggatcaacaaaagaaaactagcttcgaggaagtttcacaaagccccccacgtaataatagctttgaatcatcaatggatacacggtttagctatgcaaattcaaataaaagcagcatttcctttgaatctactcagaccacagagaggcttctcgataagctcgaccttagtttagaagacgaacgcctactccaagaagctttgttagaagaggaaaatgcctctagaagctctcaattgtcacaaacaacagccggtcccacattatgtatgcctgcgtcggagtttccgtcattgaggtatagaagcagtccttccccaacatatgtgcaagctagggatcgctctcttataatcaacagtctaaaggagaaggattctacattgagaggcaaatattcttcttgcaaagtggaaaggcatttgccagcgaaatcaagatactcttatatcgtcgaagaagatcatgactccgaaacttcaaacggaatgaaccctccaacggacagaaataacaatcactacaaatatccaaatcctgataaaaatgataccgctacaaataccccgaatgctttaaactttgaaaagtatagaatagagaacacgaaactgcagcatttgtacccgatgttaatatctgataacaataacaaacccaagaataaagactggacaactgaaaaggagagctcccctaatgaatacacgtctatgcaaagaaacaaccacctttatcgaaatggaagttcgacaagcaccgatacttcgttttccgaagttgggcaattatccaaaccgaaaactcaatcctcttttgaaagtgagtcttcatcattttctaaactcagaataacgacaaacgatactactcctgttaaaacctctccgagacgatctggttcttctacttccacaataacaaaacccagtacgctgacagacgatgtttcagtacctccaacaccaccgtataaaactcataagaaaaaatcctcattgagctccctaaaaaaactgttcaaatctcccagagcaaggacaaagaacaaaaaagactttgattccgaaggctcgagcccaagtcactctacaacaaatttgttagacttttccggtgaaaatatccatttgcctcaaacctccgctagtactaatagttctaaccctcatttggctaaatacatcttccccccaaaccctgtcttccatttcaaaacatcatcatcagctcaacaaattgctgataacaaaataaacgataaactacggccaaataggactcatctgagaactttttcagactttcaaagaatggaaaagaattcaaaaacaactgatctaaatgctccgacatcacaatcaagtaaacttaattgttctagagtcagaagaagaacactttccctagacggcatggtaccaaataatccaactcaatacgccgacattcttaatcacaagaaacaagaatcaaacacaacagacactcgcgaaaaacttaaatttcatcaagaaccttttaatagtgatgagacttcacatatcgggttggcaattaccatgcgtcatcaaggcaaactagaagaatccgcccaacgcctgaaaaaagcctgcatgtgtggtaacaagacagcattcttgctttatgggctagctctacgacacggttgcggggtggataagaacttaaagctatcattaggctatttgatggctgccactgatataaaatcctttaccactgaagttcttaatttagatataaatccgttaaacataacttcgataaatgacattcctgatatagcgcctgaaccaacagcccccgccttgtatgaatgcggtatggcgtatttaaaaggtcttggagtagactacccagatgaaataaaaggtttaaaatttttagagaaagctgccatattgggccatgtagattctatgtgtttaagtggaacaatttggtccaagacttcaaatataaaaaaaaaaaatctcatgagagcagctgcatggtttagaatagctgataaaaagggtgcgaacttgttaggttcagatgggatttataaagaaaagtatatgaaacgatgtccagaataa

SEQ ID NO: 121 - DNA, 312 bp, Saccharomyces pastorianus
atgtccggtagaggtaaaggtggtaaaggtctaggtaaaggtggtgctaagcgtcacagaaagattctaagagataacattcaaggtatcactaagccagctatcagaagattggctagaagaggtggtgtcaagcgtatctccggtttaatctacgaagaagtcagagctgtcttgaagtccttcttggaatccgtcatcagagactctgttacttacactgaacacgccaagagaaagactgttacttctctagatgttgtttatgctttgaagagacaaggtagaaccttgtatggtttcggtggttaa

SEQ ID NO: 122 - DNA, 411 bp, Saccharomyces pastorianus
atggctagaaccaagcaaacagcaagaaagtctactggtggtaaggccccaagaaagcaattagcttctaaggctgccagaaaatctgccccatctaccggtggtgttaagaagcctcacagatataagccaggtaccgtcgccttgagagaaatcagaagatttcaaaaatctactgaattattgatcagaaagttgcctttccaaagactggtcagagaaatcgctcaagatttcaagactgatttgagattccaatcttctgctatcggtgccttgcaagaatccgtcgaagcctacttggtctctttgtttgaagacactaacttggctgccatccacgccaagcgtgttactatccaaaagaaggatatcaagttggccagaagattgagaggtgaaagatcatag

SEQ ID NO: 123 - DNA, 864 bp, Saccharomyces pastorianus
atgacttacactactagacaaattggtgccaagaacactctggaatacaaagtttatatcgaaaaggatggtaaaccagtctctgccttccacgatattcctttgtacgccgacaaggagaacaacattttcaacatggttgttgaaattccacgttggaccaacgcaaagttggaaatcaccaaagaagaaaccttgaacccaatcattcaagacaccaagaagggtaagttaagatttgttagaaattgtttccctcaccatggttacattcacaactacggtgctttaccacaaacctgggaagatccaaatgaaagccacccagaaaccaaagccgtcggtgacaacgatccaattgatgttttggaaatcggtgaaaccattgcttacactggtcaagtcaagcaagttaaagctttaggtgtcatggctttgttagatgaaggtgaaaccgactggaaagtcattgccattgatatcaacgatccattagctccaaagttgaacgacattgaggatgttgagaaatacttcccaggtctattgagagctaccaacgaatggttcagaatttacaaaattccagacggtaagccagaaaaccaatttgccttctctggtgaagccaagaacagaaagtacgctttggacatcatcaaggaaactcacgaatcttggaagcaattaattgccggcaagtcttctgacaacaagggtattgacttaaccaatgttactttggctgacaccccaacctactctgccagtgcctcttctgctattccaccagctgctccaaaggaagatgctccaattgacaaatctgtcgacaagtggttctttatctctggctctgtctaa

SEQ ID NO: 124 - DNA, 2754 bp, Saccharomyces pastorianus
atgggatctacatggaaacctgctgaagactatgtgttgcaattagcaacgcttcttcagaactgtatgtcaccaaatccagaagtccgtaataatgccatggaagctatggaaaacttccagctacaacccgaattcttcaattatctgtgttatatcctaattgaaggtgaatccaatgaagttttgaaacaacactattctccacaagatttacagaacaacagagctaccgctggtatgctgttgaaaaattccatgctaggggaaaacaatataattgaaaacaacagccatgatttagaatacgtcaaatcgaacatcattcacggcctctataactcaaacaataaccttgtttcgaatgtgacaggcattgtcatcactaccttattttctacttactatagacaacatagggatgatccaactggtcttcaaatactttatcaattattggagctaacttcaaatggaaacgaacctagtatcaaggctttatccaaaatcatggaagacagtgcccaatttttccaattggactggtcaggaaatgccaaacctatggaaaccctattggacagttttttcaagtttatttctgatccaagtttttcaccagtgattcgttcggaatcggtcaagtgtataaatacagtgattccgttacagactcaaagttttattgtaagattagataaatttttggagattattttccagttggcacaaaatgacgaaaacgacctagttagagcacaaatttgcataagtttcagtttcttactggaatttagacccgataaactggttgctcacttggatggtattgtgcaatttatgttgcatttaatcgccaatgtaaatgaagaaaaagtggctattgaggcctgtgaatttttgcatgcttttgcaacaagcccaaatattcctgaacatattttacaaccatatgttaagattattatacccatactattgtccaaaatggtatataacgaagaatccattattctcctagaagcctctaacgatgacgatgcgttcctggaggacaaagatgaggatattaagcctatcgccccccgtattgtgaaaaagaaagaggcagggaacggtgatgatgctgatgataacaacgaagatgatgaggacgaagatgaagatggcgatgtcgacactcagtggaatttgagaaaatgttccgccgcgacgctagatgtgatgacaaatattttaccgcatcaagtgatggacattgcatttccgtttttgagagaacacttgggttctgatagatggtttattagagaagctactatattagcattgggagccatggccgaaggtggtatgaaatactttaacgatggactgcctgcattgataccgtttttggtggaacagctgaacgacaagtgggcgcccgtgaggaaaatggcatgttggacattgagcaggttttcaccatggatactgcaagatcatactgaatttctaatgccagttttggagcccataatcaataccttattggataagaagaaagatgctcaagaagccgctattagtagtgtggctgtatttattgagaattgtgattccgagttggttgaaaccttattctatagccagttattgacgagttttgataaatgtttgaaatactacaagaagaagaacttgattatattgtacgatgccattggacggtttgccgagaaatgtgaattggacgaaacggcgatgcaaataatttttccacctttgatcggaaaatgggctctattgtcggatagcgataaggagttgtggccacttctagagtgtctttcgtgtgtggcatcgtctttaggagaaaggttcatgcccatggcacccgaagtatacaatagagcctttagaattttgtgtcattgtgtggaattggagaccaaatctcaccaagaccctacgatagtggtgcctgagaaggatttcataatcacgtcattagatttgatcgatgggctagtacagggccttggtgctcaatcgcaagatttgttgttccctcagggaactaaggatttgacgattttaaagatcatgttggaatgtctacaggattcggtccatgaagtgagacagagttgttttgccttgttaggagatattgtgtatttcttcaattcggaattagtaataggcaatttggaagaatttttgaagctgatcggtacggaaataatgcataacgacgacagtgacggggtccccgccgtgataaatgcgatctgggcgctcgggttaataagcgaacgtatagacctgaacacctacataattgatatgtccagaatcgttctagacctgtttaccaccactacacaaatcgtggacagttcggtgatggagaacttgtctgtgaccattggcaaaatggggctaacgcaccctgaggttttcagttctggcgcgttttccaccgattcaaactggaataaatggtgcctgtgtgtgaatgccttggccgatgtggaggaaaagagtagcgcttacatggggttcctgaagatcatcaacgttacccacacgggaaccgcgatgagcaatgacaccatcaaaaaggtcgtatcagggttgtcgaacaacgtagaggccaacgtgtttgcgcaggacatatatacttttttgatgaaccattccgcccaaatctccaacatcaatttcacgccggatgaaatttcattcttacagcagttcactaactag

SEQ ID NO: 125 - DNA, 1101 bp, Saccharomyces pastorianus
atgactgcccaacaatttgacttctcagatcattcccatagacgttacaacccattgaccgactcatggattttagtttctccacacagagctaagagaccttggttaggccaacaggaggctgcttgcaagccaaatgctccagcgtacgatccaaagtgctatttgtgtcctggtaacgaaagagctacaggtgttcaaaacccaaattatgaatcaacatacatcttccccaatgattatgctgctgttaaaattgaccaaccccctttaccacataatgatttaggtagggacactttaaaaaatagattattcaaagttcaatctgtgagaggtaactgtttcgtcatttgttttagtccaaaacataacttaaccattccccaaatgaaacaatcagatctggtccatgtcattaatgcttggcaaaagctttataacgaccttgctagagaagcaagggaagatcagaaacctttcaaatacgtgcaaatctttgaaaacaaagggactgccatgggttgttctaacttacatccacatggccaagcctggtgtttagaagccattcctagcgaagtttcccaagaactgaaatcttttggtaaatataaacacgagcacaacgctgacttatttgccgattatgttaagttagaattagaagaaaaaacaaggcttgtattggagaatgactctttcatgattgttgttccatactgggctgtttggccatttgagaccatagttgtttccaagaaaaagattgcctctattagccattttgaccaaaagcaaaaggaagatcttgcttcgataatgaagcagttaactaccaagtatgacaatctgtttgaaacaagtttcccatactctatgggtattcatcaggctcccttaaatgcgactggtgaagaactaaataacagttggtttcatatgcatttctatccaccattgttgagatcagctactgttcgaaaattcctggttggttttgaattactaggtgagcctcaaagagatttaactcccgaacaggctgcggaaagattaagaaaactagatggtaaagttcactatttagaaaaattgtga

SEQ ID NO: 126 - DNA, 2100 bp, Saccharomyces pastorianus
atgactgctcagttacaaacttcaggtaatgctaaaaccgttctggttacaggtggtgctggttacattggttcccacactgtggtggagctgattgaaaatggatacgaatgtgttgttgtcgataatctctcaaattcatcttacgattctgttgccaggttggaaattttgaccaagcatcatattccatttcacaaggtcgatctttgtgaccgggaaggtttggaaaaggttttcaaggaacatgaaatagattctgttattcacttcgccggtttgaaagctgtgggtgaatctacgcagattccattgagatactaccataataacatcttgggcactttagttttgctggaattaatgcaacaatacaaagtctctaaatttgtgttttcttcttctgctactgtttatggtgacgcgactagatttccggatatgattccgattccagaagagtgtcccttagggcccactaatccatatggtaacaccaaatatgccattgaaaagattttgaatgatctttacaacagtgacaaagcaagttggaagttttccatcttgcgttactttaacccgattggtgctcatccatctgggctaatcggtgaagatccacttggtattccaaacaatttgttaccatatatggctcaagtagccgtcggtagacgtgaaaagttgtacatctttggcgatgattatgactctagagatggtacaccaatcagagattacattcatgttgttgatttagccaagggccatattgccgctctgaaatatttagatgcttataaccaaaaggagggtttgtgccgtgagtggaacttaggttctggtaaaggttctacagtttttgaggtataccgtgcattctgtaaggcctcgggtattgatcttccatacgaagttactggtagaagggcaggtgatgtgttgaacttgacagctaagccagatagggccaagcgggagctgaaatggcaaacagagttgcaagtcgaggactcatgcaaagatttatggaaatgggccactgaaaatccgtttggctaccaattgaagggtgttgaagccaggtttgctaccgaagagatgagttacgatgcaagatttgtgactattggtgctggtactagatttcaagccacgattgctaatttgggcgctaccattgtagatttgaaggttgacgggcaatctgttgttcttggttatgagaatgagaaaggatatttgaatcctgatagttcttacattggtgccacgattggtagatacgcgaatcgtattgccaagggtaagttcaatttgggtggtaaagattatcagctaaccgttaacaacggcattaatgctaatcatggtagtattggttcttttcatgtgaaaagatttttaggcccaattgttcagaatccatcaaaggatgtctttaccgcagaatacatgctaatcgacaatggtaaggacactgaatttccaggtgatctactggtaactgtacagtatactttgaatgtcgccaaaaagagtttggaaatcgaatataagggtaagttgactgctggtgaagccacaccattaaatctaaccaaccatacttacttcaatctggataagcctcatagagacaccatcgacggtacagaaatcaaggtggtttctaataaatccgttgacgtcgacaaaaatgtcattcccacgggtaagatcgttgacagaaatattgctacctttaagagctcaaagccaactactttaggtcctaaagatcctctatatgactattgttttgtagtggacgaaaatgcgaagcacaaacaaatagatacctcaaagaatgaaccaacgcttgtcgccaaggctttccatccagactctaaaatcactttggaagtgttgagtacagaaccaacatatcaaatttacactggtgatttcttatctgccggttacacagcaagacaaggtttcgctgtcgaacctggtagatacgttgatgccatcaaccaaaaagaatggaaggattgtgttattttaagacacggcaaaacatacggctctaagattgtctacagattttcttga

SEQ ID NO: 127 - DNA, 1902 bp, Saccharomyces pastorianus
atgccggacgatttatcattacacttgagtggctcttcaaaaagactaaattctcgccaacctggacagtctcccaatggggactttgcaccaaatggtatggatttggaaaaagagtataaaacatctcaaagcaatgtaactaccgaggtttacgaggcatcgagcttagaagaaaagacaagttcaaaaaaaccacaatacagttccttttggaaaaagctgtactatgagcatctggtcgttgacaaatcaattctgggagtatctgttctagactcttttatgtacaaccaggacttgaaacccgttgaaaaagaaaggcgggtttggtcctggtataacttttgttacttctggcttgcagaatgcttcaatatcaacacctggcaaattgctgctaccggtttacaactgggtttgaactggtggcaatgttggataacaatttggattggttatgggtttgttggtgcttttgtcgttttggcttccagagtcggtaccgcctaccatttatccttccccatatcatctagggcatccttcggaatttttttctccttatggcctattattaacagagtagtcatggccattgtgtggtatagtgtccaagcttatattgcagcaaccccggtgtctttgatgctgaaatccatctttggtaaaaacttgcaagacagaataccagatcactttggttctccaaatgctaccacttacgagtttatgtgttttttcatcttttgggctgccagtcttccatttttgttagtaccacctcataaaattagacacttgtttactgtgaaagcagtcttagttccattcgcttcatttgggtttttaatttgggccattagaaaggcccatgggcgcatcgccttagggtctttgactgatgtgcaacctcatggctctgcattttcgtgggcatttttaagatctctaatgggctgtatggctaatttctcaacaatggtcattaatgccccagatttttcaagattttcaaaaagccgtaactctgctctgtggtcccaactagtgtgtattccatttttgttttccattacttgtttgattggtatcttagttactgcggccggttacgaaatatatggcgtcaattattggtcaccactggatgtgttagagaagtttttacaaaccagctataacaaaggcacaagagcgggagtctttctgatttcctttgtctttgcggtggcgcaattgggtactaacatatctgcaaactccttatcgtgtgggactgatatgtctgctattttccccaaatttattaatattaaacgtggttcattattctgtgccgctatggcgttgtgcatctgtccgtggaatttaatggcgacatcgagtaagtttacaatggccttgtccgcatatgccatctttttatccagtattgccggtgttgtttgctcggactactttgttgttagaagaggctacatcaagctaacacacatttactcccatcagaaaggttctttctatatgtatgggaatagatttggtattaactggagagcgttggctgcttatttgtgtggtatagctccttgtttgcctggttttatcgccgaagttggtgcgccagctataagtgtctcagatggcgctatgaaactatactacttaagttattgggtgggatacggcttaagtttttcaacttatactgcattgtgttatttctttcctgttcccggatgcccagtcaacaacattttaagggacaagggctggttccaaaggtgggccaacgttgatgattttgaagaagagtggaaagagacaatagagagaaatgacttggacgatgacgagatcagcgtctatgaacatgaaggcgaaaagacattcatttaa

SEQ ID NO: 128 - DNA, 534 bp, Saccharomyces pastorianus
atgtcaaatattacttatgtcaaaggtaacatcctaaaagcagctacgcgtcctaggatccttattcactcttgcaattgcaacggctcctggggcggtgggattgcttaccaacttgctttgaattatccaaaagcagaggaagattacatcaaagtatgcgatgaaaatggctctgctttattgggcaagtgcgtattacttcctagttacaaagactcggatctattaatttgctgtctgttcacatcatcgtttggtggttcaagtcatgcgggaaagcaaagcattctagagtatacaaaactgtctctagataaattgagggcctttagggcagcggaaggcaaaactaaattaagggatgacataattaacacttacgttgatgatcatatcaaatacccaatagaagaatataagctggaaatgccacaaattaacagcggtatatttggtgttccttggaaagaaacagaacacgttttggaagaattcagtgatagtatggattttacggtataccaactgtag

SEQ ID NO: 129 - DNA, 3507 bp, Saccharomyces pastorianus
atgaccggcttgacaggagatgattccgatgattactatctaaaccctaaccaagacgaggaatctttgcttagatccagacacagtgtcggttcgggagcacctcatagacaaggttctttagtgcggcctgaaagaagtcgactgaacaatcctgacaatccgcatttttattatgcgcaaaaaacacaggaacagatgaaccatttgaatgtgttgttatcaagtaccggtgtcgatccgaatacgatccgtcgaggcggctcgctgcgctctaaaggatcggtaagaagcaaagtcagcggccacgaaatggatggctacccgttacaagacatgaacactactgaaaggaaagattcagtcaaaatcagtgatgaaggtgaggttgatgatgagtttggcaaagatggcgaagaatatgaagtcgataatttcgaagaaagctccatgcggcctgtaaaaaagcctataaaaccgttaaggaaagatacgggcgattcattgtcattttggcagatgtattgttattttattacattttgggcacctgctcctattctttccttgtgtggaatgcccaaaaaggaaagacagatggcatggagggagaaagttgccttgatctctgtcattttgtacattggtgcaatcgttgcctttgtgacttttggttttaccaagacagtttgtagcagctctaagttacgtttgaaaaacaacgaagtatctacggaattcgtggtcattaacggtaaggcgtacgatctgaacacttcttcacgttctggtatacaggacgttgaagtggactcgaataccctatatgggccttggtcggatgctggtaaagacgcctcatttttgtttcaaaatgttaatggtaactgtcacgatcttataaccccaaagagcaactcttctattcctcatgatgacgacaataatttagcatggtatttcccatgtaggttgaaaaatcaagatggctcctcaaaaccaaattttacagttgaaaactacgcagggtggaattgccatacttctaaagatgatagagattccttttatggtttgaagtcaaaggcagacgtttacttcacttgggatggtataaagaactcctcaagaaatctaattgtttacaacggtgacgttttagatctagatattcttgactggttggaaaaggatgagctcgactaccccattgtatttgatgacctgaaaacttcaaatttacaaggttatgatctctcattgatcttatccaatggacacgaaagaaaagttgctagatgtttaagtgaaattatcaaagttggtgaagtggattctaaaactgttggttgtattgcgtctgatgttgtcctgtatgtttctctagtgttcatcctttcagtggtgataatcaaatttctaattgcctgctacttccgttggactgtggctaggaaacaaggtgcatacattgtggataataaaacaatggataaacatacaaacgacattgaggactggtctaataatattcaaacacaagctcccttaaaggaagtcgatcctcatttgaggccgatgaaatactctaaaaagtcattgatgcacaagcgtgcttcaacttttgacttgttgaaaaagcacagttctaaaatgctccaactgaatgaatctgtaatagacttgaacaccccaatgagcagctcgttacaatcgtctggttcattcagaggaatgacaacaatgactacgcaaaatgcctggaaattgtctactgcaaataaagccacacattctcgtaatccctccactctgttacccacatcttccatgttttggaacaaagctacttcatctcctgtaccaggaacatcgctaattcaaagtcttgattcatcgattatacacccggatattgttcaacaaccaccaatggacttcatgccatacgggtatccattaattcataccatttgctttgtgacatgttattcagaagatgaggaaggtctgagaacgactctagattctttgtctactactgactatcccaattctcataaattattgatggttgtttgtgatggtttgattaagggttcgggcaatgataagactacgccagagatagcattaggaatgatggatgactttgtcactccaccggacgaagttgagccctactcgtatgtggctgttgcttccggttctaagagacacaatatggccaaaatttatgcgggattttacaaatataacgattccactgtttcaccggaaaatcagcaacgtgttcctatgatcacaatcgtgaaatgtggtactccggcagaacaagggtccgccaaacctggtaatagaggtaagcgtgattctcagattattttaatgtcgtttttagaaaagattacatttgatgaaagaatgacacaattggaattccagcttttaaaaaatatctggcagattacagggttaatggccgacttttatgaaacagtgcttatggttgatgctgataccaaagtctttcccgatgctgtgactcacatggttgccgaaatggttaaagatccgttaataatgggcctctgcggtgagacgaagattgctaataaggcgcagtcttgggtaaccgcaattcaggtttttgaatattatatatcgcatcatcaagttaaggcatttgaatctgtctttggttcggtgacttgtttgcctggttgtttttcaatgtatcgtattaaatctcctaaaggttcagatggttattgggtccctgtattggcaaacccagatattgttgagagatattctgataatgttaccaacactctacacaaaaaaaacttattattactaggtgaagatagatttttatcatctttgatgttgaggactttccccaagagaaagcaagtgtttgttccaaaagctgcatgtaaaactattgctcctgatgaattcaaggttctactttctcaacgccgtagatggatcaactccaccgtgcacaacctttttgagttggttttgattagagatttatgtggtactttttgtttttcgatgcaatttgtgatcgggattgaattgattggtactttggtgctgcctttagctatttgctttacaatttacgtcgtcatttttgccattgtctctagacctactcctatcattactctagtcttactagcgattatccttggtttgcccggtttgattgtcgttgtcactgctacaagatggtcgtacctagggtggatgtgcgtgtatatttgtgctttacctatttggaattttttgctaccttcatatgcgtattggaaattcgacgatttctcatggggtgatacaagaaccatcgctggtgggaataagaaagcacaagacgaaaatgaaggtgaattcgatcactcgaagattaaaatgaggacttggcgagaatttgaaagagaagagattcttagccgaaaggaggaagctggctccttgattgcatag

SEQ ID NO: 130 - DNA, 1185 bp, Saccharomyces pastorianus
atgcctccaaagaagcaagtcgaagaaaaaaagatcttattaggtcgtcctggtaacaacttgaaagccggtattgtcggtttggctaatgttggtaagtctaccttcttccaagccatcaccagatgtccattgggtaacccagccaactatccattcgctaccattgacccagaagaagctcgtgtgactgttccatctacaagatttgaccagttgtgtgcagtctacaacaaaacagcttctgcggtcccagcccatttaacagtttacgatattgctggtttgactaagggtgcttccgccggtgaaggtttgggtaacgctttcttatctcacattagatcagttgattccatttatcaagtcgttcgttgtttcgacgatgctgaaattatccatattgaaggtgatgttgatccagttcgtgatttggaaattattaacgaagaattgagactaaaggatattgaattttcagaaaaggcacttgatggtgctgaaaaaattgccaagagaggtggtcaatctttggaagtcaagcaaaagaaggaagaaatggatttaatcaccagaattattgaattgttgaaatccggccaaagagttgctaaccaatcctggactccaaaggaagtcgaaatcattaactctatgttcttattaaccgctaagccatgtatctatttgatcaacttgtccgaaagagactacatcagaaagaagaacaagcatcttctaagaatcaaggaatggatagacaagtactccccaggtgatttgattattccattcagtgttcctttagaagaaagactttcccacatgtctgaagaggaagctgaagaagaattgaagaccctaaatactcaatcagccttaccaaagatcatcaccaccatgagaaagaagctagatttgatttctttctttacctgtggtccagatgaagttcgtgaatggactattagaaggggtaccaaggccccacaagcagccggtgtcattcacaatgacttaatgaatacttttattttggcccaagttatgaagtgtgaagatatccttgaatacaaggacgacgctgccatcaaagccgccggtaagttgatgcaaaagggtaaggaatacgttgtcgaagacggtgacgttatttacttcagatccggtgctggtaagaattga

SEQ ID NO: 131 - DNA, 1143 bp, Saccharomyces pastorianus
atgctaccaacgttaaagcgctttatgtcgtcctcaggtaatcagattcccagacagttcaaatcaatcatttactctactcatgaagtggaggactgcacgaaagtcttgtcggttaagaactatacccccaaacaagatttgtcccaatcaattgtgctaaaaactttggcttttcctataaacccctcggatatcaaccagttgcagggcgtgtatccatctcgtcctgaaaagacattcgattactctacagatgagccggccgctatcgctggcaacgaaggtgtgtttgaggttgtctctttacctttggatagttccaagggtggattgaagttgggtgaccgtgttatcccacttcaggcaaaccagggaacctggtcgaattacagagtcttctctgatagttctgaattgatcaaagtgaatgattttgatttgttttctgccgctactgtctcagttaatgggtgcaccggtttccaactggtttcggattttattgactggaacaagggtggtaatgagtggataatccaaaatgcaggcacatccggtgtttcaaagatcgtctcacaagtggcaaaggctaaaggaataaagaccctcagtgtcattcgtgaccgtgacaatttcgacgaggtagccaaagtattggaggataaatatggtgctaccaaagtcatttctgaatcgcaaaacaatgacaaggcatttgctaaagaagttttgtccaaggttttgggagaaaacgcaagagtaaaattagctttaaattctgtcggaggcaaatccagtgcttcaattgctcgtaagctggagaaaaacgctttgatgctcacttatggtggaatgtcaaaacagcctgtcactttaccaacgtcattacatatcttcaaaggcttgacttccaagggttactgggtcactgaaaagaacaaagaaaaccctcaatctaaaattgacactataaacgatttcatcaaattgtacaatgaaggaaaaattatttctccaaaggacgaaatccaaaccttgacttggaatattaatacaatgactgatgaacaattattggatatagttaaaaagggtataaccgacaaggggaagaaaaaattgattgttttggaatggtaa

SEQ ID NO: 132 - DNA, 1563 bp, Saccharomyces pastorianus
atgattttttcattggatgaggaacttcatcgtatgtcactagatgacaagaagaatgagatgagaatagattatccgacagcgttatatgatgataatgacagcagcgccatcgcagacggggatgataataatcatctcagtgtccattcaaactccattccgttcagcggttctacccataaaatgaggaggaggtcttctgcttattccaagttcccaattctcaccccacctcatacaagaaggttttccatcacaggttcagacggcacgccaaatggaatgcacaaattatctattacaccacagaatatgatttctcctaatattatcgaaaatgaagtgtcaagaaatctacatgattttaaacctgtaagagtattaggccaaggtgcttatggtaaagttattcttgtcaaggacacaaatacatccaaactctatgcgatgaagcaactacagaaagctgaaattttaatttctcctacaataacagattccaataaagaaaatgaagaaaataatagtgctggtaacaacgacaacgataacggattatcaaagaggctggagagaacttttgccgaacggtccattttatctgaaatagaacatcccaacattgttaaattattttattctttccacgataactccaaactatatttattgttacaatatattcccggaggtgaactattttaccatttaaaagaacatggaactctagatgaaacgacagtttcgttctacgcggctgagatcagttgtgctttgagatttctacacactaaaggtgttgtttatagagacctgaaacccgaaaattgcctattaaatcaaaatggccatttggtgttaacagattttggcctcagtaagaaaagtgccaatgattccatgactagtgaggaggatccagaaaacgtcaataccttacactcaattatcggtactccggaatattgtgctcctgagatattatcgggccaagcatatactcaaaactgcgactggtattccctgggatgtctgttatatgatatgctagtcggaaagcctccatacacaggtaataatcacaaggtgattattagtaaaatccaacaaaataagcaaggcccaaaaatccctttctatttaagcgaaggaatgaaagatatgttaaatgcactgttgaaaaaggaaaccactaagaggtggaatgttgataaatactgggccaaaattgagacgaataacaaaacaactaaatccaagaagaaaaaatcagggagtattagaacaagccccttcacggaccattttatctttaggaaaatagactggaaactactagaatccggacaatcacaaaaaactactctggggcccattgtccccatcattacaaatctagaactagcagaaaattttgacacagagttcacctcgatgtcatatgaagagaattatgctgacagcaaaccgattaatatcagctcggtgagcaagtctccagatatgttcaaggggtttagttataaggcaagtggtagctatttggagaaatacttttaa

SEQ ID NO: 133 - DNA, 1374 bp, Saccharomyces pastorianus
atgtcagacaaaccagagataaaacctcatggtaccagcaaagagattgtggactcagttactgacgccacctcaaatgccattaataaactccaagaagaactcaacaagaaccctagcgggtctgccacaccagcgactaaggaaaatgctgtggctgcaaaggaaagcaggaaatacaacttcttcattagaaccgtctggacgtttgttatgattagtggattttttatcacattagcctcaggccatgcgtggtgtatagtactgattctgggctgtcaaatcgctaccttcaaagagtgtattgctgtaacaagtgcgtctggtcgtgagaaaaacttgccactaacaaagacgttgaactggtacctccttttcaccaccatttattacctcgatgggaaatcgctttttaagttcttccaaacgactttttacgagtaccctgtattgaatttcatcgtaacaaaccacaagttcatctgttactgtctctacctttcgggattcgttttgttcgtctgtagtttgagaaaggggttcctgaagttccagtttggttcattatgtgctacccatatggttcttcttctagtggtatttcaagcccatctgatcatcaagaatgttcttaacgggctattttggttcctactaccatgtgggttggtcatcgttaatgatatcttcgcctacttatgcggtatcactttcggtaagactaaattaattgagatttctccaaaaaaaactttagaaggtttccttggcgcctggttcttcacagccttggcaagcattctattgacaagaattttaagtccatacacctacttgacctgccctgtggaagatcttaagacaaatttcttcaccaacttgacatgtgatttgaaccctgtgtttcttccacaagtttacaagctcccatctatcttcttcgatgtttttcaaatcacttctatcacagtcaagccaatatatttccatgccttaaacttagctacatttgcatctttatttgcgccatttgggggtttcttcgcatctggtctaaagagaacttttaaagtaaaagattttgggcactccatcccaggacacgggggtattacagatagagttgattgtcaattcataatgggttcgtttgccaacttatactatgaaacatttatcagtgaacatagaataacagtagacactgtactatccacaattttaatgaatttgaatgacaggcaaattttagaattgatcgatatattggttagattcttatctaaaaagggcataataacaccaaaaaattatgaaaagctggctgatatctttaacgtcactaagaaatctttggcaggtcgcgcttaa

SEQ ID NO: 134 - DNA, 1047 bp, Saccharomyces pastorianus
atgagtaagacagctgcaaatgattccgctacggaaaagaacaatctaagtgagactgaacaacactacttcaattcatacgaccactatggtattcacgaagaaatgcttcaagataccgttcgtaccttgtcttacagaaacgcaatcatccaaaataaggatctgttcaaggacaagattgttctagatgtcggttgtggtacaggtatcctatccatgtttgctgccaagcacggtgctaaacacgtcatcggtgtagatatgtccagtatcattgaaatggctaaagaacttgttgaactgaacgggttcagtgacaagattactctgctcagggggaagttggaagacgtccatatgccctttcctaaagtcgatattataatatctgaatggatgggttactttttgttgtacgagtccatgatggacacagtcctttatgccagagatcactatttggtggagggcggtttgatcttccctgataagtgttccatccatttggctggtttggaagactctcaatacaaagacgaaaagctaaattactggcaagacgtctacgggttcgattattctccattcgtcccattagtcttacacgaacccatcgtcgataccgtggaaagaaacaatgttaacaccacctcagatgagttgatcgagttcgatttgaatacagttaaactttcggacctagctttcaagagtaaattcaaattgactgccaaaaggcaggatatgatcaatggtgtggtcacttggttcgacatcgttttccctgctccaaagggtaaaagacctgttgaattttccactggacctcatgccccatacactcactggaagcaaacaatcttctatttccctgatgacttagatgctgaagctggtgacaccattgaaggtgagttgatttgttctccaaatgaaagaaacaacagggatttgaacatcaagctttcttacaagttcgaatccaacggcattgacggtaattcaagaaacaaaaagaacgaaggttcttacttgatgcattaa

SEQ ID NO: 135 - DNA, 687 bp, Saccharomyces pastorianus
atgactaaacaatccgaggagacccagaagccaattatcttcgcgcctgaaacgtaccaatatgacaaattcaccttgaatgaaaagcaactggccgaagaccccattgatctcttcaccaagtggtttgacgaagccaagaatgaccccagagaaacgttgccagaagcaatcactttctcctctgcggaattgcccagcggaagggtttcttccagaatacttcttttcaaggaactcgaccacagaggcttcaccatctattccaattgggggacctctaggaaggcccgtgatattgctacgaacccgaacgcggcaattgtgttcttctggaaggacctgcagagacaggtcagagtagaaggtaccaccgagcatgtgaacagagaaacttcggaaaggtattttaagacaagaccccgtggctctaagatcggtgcgtgggcctcacgtcaatcagacgtcatcaaggacagagaggaactggatgaattgacccagaaaaacaccgagcgttttaaggatgacgtagagattccgtgtccagattactggggtggcctaagagtcgtcccgctggaggtcgagttctggcaaggcaggcccagcagactgcatgatagatttgtttacaaaagaaaatcagaaaatgacccatggaaagtcgttagacttgcaccatga

SEQ ID NO: 136 - DNA, 1233 bp, Saccharomyces pastorianus
atgtctactactttactatggttttcgagcgtaataggctacgtgattcaaacgaaatgtctgtccaatatacaatctaggaaggaggtccccgtgggggccaacagcaccgttgcgacccccgaggctaacggtgacaatggcaacaacggctcgctgaccttctatctgaccttcatgtactttgcgtcgtggttgctcttggtacctgcatctcgactctggaagaacatgagaccgatgtttatctcagattcagaatcgaacagaaccctcgagctcaacggcactaataccgagtccgttatggacgacgacgtggatacgttctcacacgtactagatgaccctcaaccacgcattgccatccaacaacaaaaacaaaaaatcatatccgttgccagcatgaagtatttagctaagctgacagtgttggcctcaataatgattgtagcgaacctgacttacaacttagctttgtctttatcgccagcatttgatgttgctctgatacaaaacactgccattttcgaaattgtcactcttctctacggtgtttgcgggatctccaggaaaaactatgttttccgtaacttcctaattatgatgaatgccgtcattggcattttgatcatctcgtacacaaaggctacctgtgatatgctcgccggcaagctgtctgttaaccctaatacgggtgaacttacagaccccttcttgtttgacaggttgaaaggtgccttgatttgcggtctcggtgctttggttatgggcccattcgccgtgttatggaaccgttggttttgcagcaacatttctaagaatgacaactctgcagttgtcttggtcaagcaaagcactcatttggccctgatcggtgtcatcggtatgatcatgcttttgccattcattcctaaattcccctctcgcgggtctttggaatccatctccttgttgtacaatgacaagagcttctggttttcattgctcggcgcaattttctttggcacactaccaaacctggtttcggtactagagttgaaccgtaaagctcccgctgagtatttgactacatgtaatttaggggctattatattcatggggttggccgaatggatttgcgaacccacccagaccaccatcgttagatgggaggtcattggctacataatgttgactgtaagcttgttggtcttgtcagtgacactaggtgaaggtaaataccatcattag

SEQ ID NO: 137 - DNA, 909 bp, Saccharomyces pastorianus
atgcttaggttatcaagaagtatcgaccaaagactgcttcagtgcggtgccatgagacagctgcgggccgcgagcgtgggttgcagtggctctaaattgctcactcaaaggggattctccactagggcaggcctgtggcaaacaaacgacaagaaacccttgagtagagttcccgtgggcggcgcacccatcccaaaggaccacaagagggcgagcgagggttctattgagttttccacgggaaaggccattgccctgttcctcgcagtcggtggggcaatctcgtacttcttcaacagggaaaagaacagaatcgagactcaaaaggaggcagacgcgaatagagggtacgggaagccctctctgggtgggcccttccatctggaggacatgaacggtaatgagttcacagagaaagatcttctcggcaagttttccatattgtactttgggttcagcaactgtcccgacatctgtcccgatgagctggaccagctgggcgtgtggctaaacgacttgtcttctaagcacggtatcactctgcagcctctctttgtcacttgtgacccggcaagagactcgccagcggttttgaaggagtacttgagcgacttccatccctccatcttgggactgacgggcacgttcgacgaggtgaagaacgcatgcaagaagtacagggtgtacttctccacgccaccaaacgtcaagccaggccaggactacttggtggaccactccatcttcttctacctcatggaccccgagggccagtttgtagacgccctgggcaggaactacgacgagaagacgggcgttgacaagattgtgcagcatgtcaagagctacgtgcctgcagagcagcgcgccaagcagaaggaggcatggtactccttcctattcaaatag

SEQ ID NO: 138 - DNA, 936 bp, Saccharomyces pastorianus
atgttgtcaagaatcgtctctaacaatgcaatgcgttctgtgatgtgccatcaagcacaagcgggcattctctacaagactaatccagttagaacttatgctactttgaaagaagtggaaatgcgtttgaaatccattaaaaatatcgagaaaattacaaagactatgaagattgtcgcatctaccagattaagtaaagctgaaaaagctaaaatttctgccaagaagatggatgaagctgaacagttattttacaagaacgcggaaaccaagaatttggacgtcgaggccaccgaatccaccactcctaaagaattgattgttgctatcacctctgataagggattgtgtggttccatccactctcaattggctaaagctgtaagaagacatttgaataatcagccaaatgctgatatagttaccattggtgataaaatcaaaatgcaacttttgagaacaaatcctaacaacatcaagttgtctatcaacggtattggtaaggatgccccaactttccaagaatctgcattaattgctgataaattattgagtatattgaaagctggtacctatccaaagatctctattttctacaatgatccagtgtcttctatatcatttgaacctgccgaaaaaccgatcttcaacgcaaagaccattgaacagtctccatcatttggtaaatttgaaattgacgcagacgcaaacgtcccaacagatttattcgaatacactttggccaaccaaatgttgacagcaatggctcaaggttacgctgctgagatttctgcgagaagaaacgctatggataacgcttccaagaatgctggtgacatgatcaaccgttactctatcttgtataacagaacaagacaagctgtcattactaatgaattagttgatattattaccggtgcttcctctttgggctga

SEQ ID NO: 139 - DNA, 900 bp, Saccharomyces pastorianus
atggttgttatttcagtaatttggttctttaccaaacgtatgcccagaatatttgcattgatctttaacataatcacaatatttcttttgattttccttctaatcggttgctataatccgacaaacgtgtcaactttcttagtcaagtacacgtttgatgagagctcgcccttctattcaatcatcgaaaagtcatatgaaaaatcaaacacaacgttggggctggaaaacgtcattataagatccggctatatgggtgtttgtattgacaaaataccctcacaatatagtgcatacaataacatgaccacatcttccaatacaatctgttatccgagaaaagatttaagctccgttcctttgtataaagacttggaaatccaattatccaatattgcatcttccggttccaaatcacagtctagtgttgttttagatattttgaagttagcgcaactaacatccgttaacgttttacatccatatatcttgatggccactatagtcttaacgatcctgatgtttttattcattgtgtatgtaaccgttcctaagctaccattcaaattatgtgttaatagatttttgttgctgctaagcccggccttagtcttaacatggggacttggagctatgtggacacacgtgggtataaatggtagttatagattagttccctctgcaagcatgaatataattgatgttaaaaaaggtaagaaagcagcgacaatggcatggttcagttttgcattcttgttattggatagcactattttatggctaatatatctgagagataggaaaagcttaaaagaggagatcgacaacgtcccatgtgcacagaataggtacaacaattatacttcttcggattcgtctacgttgcactccaaggtatag

SEQ ID NO: 140 - DNA, 1005 bp, Saccharomyces pastorianus
atgtcgcgtgatataccagaaacacaaaaggttgttttgattgatggagttggtggttacgatgtcatcaagtatgaggattatcctgtaccattgatatcggataaagagttactgattaaaaacaagtacgccggcgttaactacattgagagttactttcggaaaggtctctatccttgcgaaaaaccttatgtgttaggtagggaagcaacaggtactgttgtagcaaaaggtaaagatgtaaacaattttcaaattggagaccaagttgcatatatatccaattcgactttcgcgcagtatacaaagttcccttccgagggaactattatgagattgccaaaatgcactagtgatgagaagatgaagttatatgcagcgggtctattacaagctctcactgctttgtcatttacaaacgaagcgtaccatgttaagaaaggtgactatatcttgatatatgccgctgcaggtggtgttggactgatcctaaatcaactggtaaagatgaaaggcgcacatgctattgcagttgcttcaacagatgagaagttggagacagcaaaaaaatacggtgcagagtatctgattaattcatccaaagaagatgttcttgcacgagttttagagatcacaaatggagaaggtgttgattcttgtttcgattcaattggtaaagacacttttgaaacgaccttggccgcattgaaaagaaaaggtgtgtttgtttcctttggtaatgcatccggtcttatcccaccgttatctataactaggctctcacccaaaaatatcacccttttgaggcctcaactttacgcctatatcactgatcatgaagaatgggtatattatactgacaagtttgtggacttggttgactcaaagaaattgaacatcaaaatctacaaaacgtacgctctaaaagactataaagttgccgctgctgatatagaaagcagaaaaactactggtaagctggttctggaaatacctcaataa

SEQ ID NO: 141 - DNA, 528 bp, Saccharomyces pastorianus
atgttgattaatcgcttgagtagggttcgatctgtaaggtatttttataatgctaaacccattctgtctaaagaggtttcacgacgagtgatcgttgcgccagcgtcgcacttcagaacctccagtccaaatctcaagagtaacatacccatccatgagtacaagcaactgccagaggactcgaattacattgaaaagcactacagagaattacaaatatttctgaatgagtttttaatgaagaaactaaacaaaacttatgccgatttcgaaggaaatccagatgaactggtgtttcagctcgaaaagttcattgaattagaagtcacatcgaaatgtacggatcacaccacctcagacagtcgtaagggaggattcaaatccatcggagacaggatagtcgttgatcgttatttggattttgttaaagatgtcaggctaacactgcttctaaatggaggacattccttcatatttgacgttatgctgcaagctaaagaggtatttgataaaatgcagaagcagtga

SEQ ID NO: 142 - DNA, 1014 bp, Saccharomyces pastorianus
atgacattgagtaattgtgcgtccctggataatttattctacgatccgccagaagaagaacagaacagcaagtttatcgaagctgtgagaatctcgatgagtaaaagcaatatgggtcctcctcctgttgagacgaacgggaagtactgtctaagaaaggtaaagtctttgagtgccaaacaatggaaaataaacaagaaaaaatatagttcactgccggcggccaccaggaagaagaagaatttcgatttctataaacagcgaaacttaatcttgaatttaaatttatggaaattcatcaagttcatcaattttaacggtaaaaataactacgataagaacaacaagcatgtgaagcacttgagtaagacagtaaaaaacgacggtatgtcaccttttcaaaaagccaagaaaatcgacaacgatagaagactggaaaatatttgctggaggagctggttcaaggcgcataaaaaaaaggacgctgcagactgccaacaggagagacacattaggttcaacgataacgttgaacagtgtatcatcaccaatgagcacttcatacaaaagctaccctccacacagttgaattcgtccgatgacgaagatccgggttttcaactcgggttcgaacccagctctggttatagcaatagtaagcgagtcttctacgactataaccgtgtctacattgccagtgatactgcgaccgctgtggctactgctattatcaatactagcaacgaagacccccagcacaagcacgatatccgtgacgtgccaagtaatatcttgctgcaagaagaagaagcagacctaagcagtgtgcttcgggtcgaccccaatctcaacttgtccaacataagccaccattcctccgcatcttcctcgtccagttcaggccattcgacgtttatcttcgagtcggaaactgaaacggatacagacacagacacggacacggacacggacacggacactacaaatgacacgatacccaccgtgctcttataa

SEQ ID NO: 143 - DNA, 639 bp, Saccharomyces pastorianus
atgccaaaagttgctatcttaatttactcagtggacgacacaattgctacgttagcagagaatgagaaaaagggtatcgagatagccggaggtaaggctgaaatctttcaagtgccagatgtaagcagcagcagcagcagcgataaagaacaagacgacgacgacgacgaggggaaagtcaaaaagacaaacgctgatttcagctacaagatcctaactagagaaacgttggttgaacacgattactacctgtttggaatccccgccaagttcggtaacttccccgtggagtggaaaaccttctgggactccaacacaggcggcctttgggccaagggctcgctccatggcaagatagccggcctgtttgtttcgggcgcaataagcggtaagggggacacagagatgtgcatcatgaacgcaatgagcaccctggtccaccacggtatcatctacgttccattgggatacaagaacgcgtacaaggaactaacagacactgatgatgtcaatgggtcgtgtgcttggggggctggatgcgtctctggcgtggacggtgacagacctcccagcgtgtcagagttaaaagttcatcaactccaagggagagcattctacgaaagaatcagagacttgtaa

SEQ ID NO: 144 - DNA, 1077 bp, Saccharomyces pastorianus
atgagtagcggtagtagttttgaagaggtcgcgttgggtggtttaaaaccttactttcaagtccctggggctatacacagtgaaggaataactttcgtgaaggaaaccaatacgttgttatgggtcgatatctttaaaagtgaggttcataaggtggaagacatcgaacaccccgagagtagccattcttccttttctgttacgcgggcgaactattccaaggactcgtcggttgagtatcctcccaatccggaagatttgaaggaatctgttggttgtatcttcccattattcggtggggcctcccaagataaaattgagcatgttttgtttggtagtaaattcggcatcggtcggttggactttaccaacggcgaatgggaatacctgattttgtattctcagtgttctgatttgagctcagacagagcatataagctaagatctaacgacgggaacgtttctccagacgggaaatatctgtatgtaggcctaatgagcgattttccatttaaattggagccgattgggtgcattctccgtgttgatctattggcccaggaggtagagatggtgtggaactgtatgttgattcccaatgccattcattgggataagagtgatgaaaagtcaatgtacgtgacggattctttgaacttcacgatttggaagtgccctggcggtgacttactaaaacgagaggaattgattgacgtaaagaactctaacaatcaatcatttgaatcgcctgagcccgatggaagcgctatttggttcagcaaagatggcaagcattccgggtacctgtttatcgccgtctggtccacttgtaaagtacagatgtttgacctggttaacgggaaactgcttaaggagttcattttgccaaagtcaacgccgagagtctcatgttgttgttttgtcggtaaagatctgtttgtgacgacagccaacgcaaaaatcaacgacgctgtgggcttcaatttcgataagatcggtggttgcatctatagaatccccaacgtgctagacgggaatgtccctttggagtctacaaagccgcaaccacgctactaa

SEQ ID NO: 145 - DNA, 1035 bp, Saccharomyces pastorianus
atgtctgattacgtcgaactattaaaaagaggtggtaacgaagccataaaaattaatcccccaaccggtgccgatttccacatcacgtcccgtggttcagattggttttttaccgtcttttgtattaatttactatttggaatagtcctaatcccactgatgttcaggaagccagttaaggatagattcgtatactataccgcgatcgccccaaatttattcatgtctgttgcttattttaccatggcttctaacttgggttggattccagttagagctaaatacaaccatgttcaaacttctactcaaaaggaacatccaggttacagacaaattttctatgctagatacgtcggttggtttttggcttttccatggccaattattcaaatgtctttgttaggtggtactccattatggcaaatcgcattcaatgttggtatgaccgaagtcttcaccgtctgttggttgattgccgcttgtgtccactccacttacaaatggggttactacactatcggccttggtgctgccattgtcgtttgtattagtttgatgaccactacgttcaacttggtcaaggctaagggtaaggatatcgccaatgttttcattacattcatgagtgttattatgcttttgtggttgattgcctacccaacctgtttcggtatcactgatggtggtaacgttttacaacctgattctgccggtgtctttttcggtattatcgacttattgattttatccgtcttgccagttcttttcatgccattggctagctatctgggtcttgaaagattaggtttaatcattgacgaagaagctgaacatgtcggcccagttgcagaaaggaaaatgccatccccagcttcattcaaatcatctgattctgactccagccttaaggaaaaattaaagctaaagaagaagcacaagaaggacaaaaagaaggctaagaaggccaagaaggccaaagaggccaagaaggtcgaagaagaggaggaagatgatgcagccactgattctgaatag

SEQ ID NO: 146 - DNA, 1506 bp, Saccharomyces pastorianus
atgttaagctcactaaaaaacaaatttgagcatttgaaggtttctgaaaagggaggcaaagaattctctacaaccttaccacaattaccatcctcgaaagacctcgataagtcgaccatttataagtaccgttacaattatggtgtaaatttgggtgcattgtttgtgttagagccatggatattttcaaaagaaactgtgtgcactgtggacaataaggaatatgactgtgaatttgacgcaatttctcaccacttgaaaaaacattccaaggaagatgttgcgaaaatattgagtgaacattataaaaagtacatcgatcgaattgactggaaatggctgtcagaagatgctcatctcacggcattaagaattccaattggatattggcacgtcgaaaacgggaaacatttagattcgttaccgttcgccccactgagaaatgtttatgaactagcaaaaccctgggagcaacttgctggattaatcgaaacggccaagaaacataacattggtgtgttaatcgatttacatggtctgccagggggtgcgaattgcgattcactcagtggctccaagaattgcgaagccggatttttccaaaaggaaaaatacatgaccaaaatgttcaaagatattctaccggcaatcgttgaaacgatgactttgcataatgagaatgttatcggtcttcaagtggttaatgaagcatgctttgataacaatgccaaaggtgaaaaattctactattcagaggccatcaacaccattgaaaagcttcagcctggtttacctgtggtgatatctgacggttggtggccccaacaatgggcagactgggttaaagaaaagaatttcagcgagacggtggtcatcgattctcatgtataccgctgcttttctgattctgataagtccaaggatgccaacacgattataaaagagttgcctaacactgtgaatttccctcgtgatgatgctgattataccgtcggtgaattttctggtgttcttgatggacaaacttgggacaaaacttcaggtgacagggactctacagtgcaaaagtacgtacaagctcaagcaagtgtcttttctcatgtggcgagttggggttggtttttttggacattacaattcgagtatggtgatgggggtgaatgggggttagctcccatgatgcaaagagggaatctaccaaaacgtcctcacgatgatgggttccaaatcgataaaaggaaaatagactctataattcaagaacatgagggttattgggatggtaagggtaagaacttcgaacactggagattcgaggatggtttaaatacggccgcgaacgacataattgctttcagaaaatttgacagttctttaattgggagatggcattcctggaaatcgcaaagaagagccgaatacatctctgccaagaaagacagtaaattcatgtgggagtgggatgaaggctaccaacgtggattagacgagttcaataggtattaa

SEQ ID NO: 147 - DNA, 243 bp, Saccharomyces pastorianus
atgacacaacacaaaaactcgatggtgcacatacccactacaaaggaagtcaaaagacgtagcgggaaatcaaatggcatactgaatgccatcgaagagttcatcgaaaagctttattggacttactacattcatttacccttttatttaatggcatcctttgactcattttgtcttcatgtcttttttctcacgattttcagcctaagtttcttcggtataattaaatactgcttcctttga

SEQ ID NO: 148 - DNA, 1866 bp, Saccharomyces pastorianus
atgctggatggagaagactttgtagaacatattgatatcttatcatcgccaacaaaaagcaggaatgccaccccaaaacggctggatatacatagggaagggccattgagaaagatatacgcatcaaagaagaatttgttggaaaggatctcgcttgcggataataaaactagtagtgtatcaccggatgagacacttgaacctagtacaccaagcaaagcacctcgtaaacgtggaaggccaaaaaaaatacaggagaacttggaccttggagttgtaaaagacgatggaggtactagtgtctctagaaagaggaagaaaccacacaaagatagattaagccataccgatgaggagagtgaaagttccaacactaaacaggtgatggaagaagaggaaggtgaagaggcagagaaggctgaaaaaatattcatgggcgtccaaccaacgcatgaggaaagcccgcttttacccagtggcagtggttctgcatcaaactcagtagagcctctagaacctgcaacaccatcgaagaaatccttcaccactaatcatgactttacctcacccctaaagcaaattataatgaacaatttaaaagagtataaagacatggcttccccaggcaaattaactttgagcaggaatttcactccaactcccgtaccgagaaataaaaaggtttaccagacttcggaaaccaaatcggcaagctcatttttagacacctttgaagggtacttcgaccaaagaaaagttgtcagaactggtgcaaagtcaaggcatacaatgtcaatggcacctgatgtcactagagaagagttttctttggtttcaaacttttttaatgacaactttcaaaagcattcaagatcaaaattattccaaattcaaaaaaaaatgtttcctcaatattggttcgaattaactcaagggttctcactactgttttatggtgtaggttctaagcgtgatttcttagaagagttcgccattgactacttgtctccaaaagttgcatactcgcaactagcatatgatgctgaatcgcagcaggacgaggcttcaaacgcgatcccatgccttatactaaatggttataatcctagctgtaattatcgtgacgtctttaaagagatcaccgatcttctggtacctgctgaattgacaagaagcgaaacaaaatactggggcaaccatgtgattctgcagattcaaaaaatgattgacttttacaaaaaccaacccctagatatcaaattgatccttgtggtgcacaaccttgacggccctagtataagaaaaaacactttccaaacgatgctgagttatctctctgtcattagacagattgccatagtggcgtctacagatcatatatacgccccattactctgggacaacatgaaggcccagaactataactttgtcttccacgacatctcgaattacgagccggctaccatcgagtccacatttcaagacgtgatgaagatgggcaagagtgataccagtagtggcgcggaaggtgccaaatatgttctgcaatcacttaccgtcaactccaagaaaatgtaccggctgctcattgaaacgcaaatgcaaaacatgggcaacctttccgctaccacgggcccaaaacgtggtactcaaagaaccggggtggaactcaaagtcttcaaccatttatgtgccgcagatttcatcgcttccaatgaaatagccctaagatcgatgctcagagaatttattgaacataaaatggccaacatcaccaagaacaattcggggatggaaataatttgggtgccctacacatacgcagaactggaaaaactgcttaaaaccgtcctaaatactttatag

SEQ ID NO: 149 - DNA, 933 bp, Saccharomyces pastorianus
atgggtaagggcagtaaagacaagagagatttatattacagaaaggcaaaagaacaaggttatagggctagatctgccttcaaactactacaactcaacgatcaatttcatttcttggatgatccgaatttgaaaagagttgtagatctatgtgctgcaccgggctcatggtcacaagttctctctaggaaactatttgatgagaatattgatacagatagcgaggagaagaaaatagttgccgttgatttacagccaatgtctcctatacctcatgtgacaactttacaagccgatatcacccaccctaaaacattggccagaatcttggacttatttggtaatgaaaaagctgattttgtttgcagtgacggtgcccctgatgtgactggattgcacgatcttgatgaatatgttcaacagcaattgatcatgagtgctctacaacttaccacatgcattttaaaaaaaggcggagtattcgtagcgaagatcttcagaggtcgtgatatagatatgttatactcccaattaggttatttatttgacaagatcgtttgcgcaaagccaaggtcatcgaggggtacttctctggaagcatttatcgtttgtttgggctataacccaccatctagctggatacccaaattggacgtcaatacgtccgttgatgagttttttcaaggctgttacttcaataggttggtcatatcagacaaactgtctcattggaatgaagaagaaagaagtatagccgagtttatggcttgtggcagtctcgagagttttgactcagatgcgacctaccacgacctgccttcttcgatcgcgaacactatttcgtctttggaccccgttcaaggtccaacaaatcctccttataagaaagctttagaattgaagaggagtggaaaacttacgagatctgtttaa

SEQ ID NO: 150 - DNA, 1095 bp, Saccharomyces pastorianus
atgaacgatgaaataaatgagctaccaccgaaaatttgtgagcaatgtttaggtgatgataccaacgtcagaatgacaaagattcctcaaggctctgaatgtaagatctgtactttaccattcaccttataccattttaaggcatcgaaaaggagcggccatattgtaaaaacattaatatgcggaaggtgtgctactcaaagaaatgtttgtcagtgttgtatgcttgatttgagatggcatatccccgtacaactgcgggatcatttgatatctatggttaacgaagaaaatgtcataacagaggaggcaaaaaacgacatgatgaaaagatttttatcattaaaggatgtgaagttagggggtgcccaaattacgagcgattcggcagaggctgacattatacttgataaattgaagagtatacttcaaaaagcgacatcagatagcgaaagttcacaattgcaaatacaaggagcagcggaatcggataaaaacaagcaagacaaggacacagagaaatacagatctgtagatgtttctcacatcttaaagaaaatacctttgagtgaatcttttacgagtgatgtttccagtaggtccttcttcctttacaatattgatgcttcaattcctgaatggaaaatagctgattcgatttcacagttgttaaatataaagaaatggagtgacggaaattcgttatcgctaataatcaatcataaagcaaagtgcggaggtgtacgattccagtcaagtatgctgggggaacagtttgctcgtaaagtacaggaaacaatcaccacacgaaagggcttagagaggggtgttctacgtattgatcgttccagaatatttgttattccttggacatccggattttcggctgcttcatttggtgccactactgcggaaaacataaagctaagtttaagtttgaacaaactgatgggattggagctgggttctgatgataaacagtttcgcgcaaaaagtttggataacatcaagaaaaataagcaaaatacatcaaaaaaagtacaaaaggccaagtcaaagaaatcaaaacctcgtgcaaacaacttaacattgtaa

SEQ ID NO: 151 - DNA, 663 bp, Saccharomyces pastorianus
atgtctataggttacaaggacaatttaatatcgaccattctagccaaggatgggaaatgcgactttccagtcaattttgactattcatcttctcagataaccttaatgcctgaaatgttttcgttcaataacgaaaggaaatatcaaactctgatacccttaatgaaaacatcacatctagttgatgatgatttgaaggataagctgaacaagtgcgctttggattttttttctggaaaacaatccaacagaacaagtgatataattatgtcgaaactaactgcgagcaaagaggcttcgccagaatcgccgttgcataatgttaacgtagtgaaaatggaaaatatcgatcatatccagccagacgtatatagttcggctaggataaaaaaatccaccaaagctgtaatgaaattaaaacccacaaaagctcattcgacaggacagagaacacgccatttttgtaagatctgctcgactgggtttaccacttctggccacctttcaagacataatagaatacatacaggcgagaaaaatcacatctgtccacacgagggctgcgggcaaaggtttagcaggcatgataattgtaaccaacattaccgtacccacgcgaataagaagaaacgaaactggaaacgaagggaaaccagcagttga

SEQ ID NO: 152 - DNA, 591 bp, Saccharomyces pastorianus
atgtctgtttctaaaatcgctttcgttttaaccgctattgcctcttttgccgccgctgaaaccgccggtcaaactgccgaattacaggcgattattggtgacattaactcccatctttccgactatttaggtttggaaacgggtaacagcggtttccaaatccctgctgatgtcttgagcgtctaccaacaagttatgacttacaccgatgactcttacactaccttgttcagtaaactggactacgatgccatcaccaagaccattgtcaaattaccatggtacaccactagattgagttccgaaatcgccgccgctgttgcctctgtttctccagcttcttcttcttctgctgccccatcctcttcctcttctgctgccccatcctcctcctcagcagcttcctcctcctcagcagcttcctcctctgttgctccatcctcttccaaggcagtttcttcttccgttgctccagccacttctaccgctagcacttctgttgtaactgcatccaacgctggtcaaagaatcaacgcaggcgctgcctctttcggtgctgttgttgccggcgcagctgctttgttgttgtag

SEQ ID NO: 153 - DNA, 1857 bp, Saccharomyces pastorianus
atgaacgacagtgacagtctctttgtcgacgagaccaatccagctccatatgcacatggtatgcacgagaaagggcatgtcgaaaaggagaaaaagggcttcacagtgactgaaaaccaagacgaaggatcggaacagcaagcgaaaccccaagggccgagtgggagatccaaactacaaaaggaatgcaaaaaattcttcgattctttcaaaaggcagcttccaccggaccataattctgaactagagtcacaagaaaagaacaacctgacaaagtccatcaaatcgcgtcatttgatcatgatcagtcttggtacaggtatcggtacggggctgctggtcgggaatggccaagtactcggaacggcgggacccgccgggttggtgctcggttatggtatcgcctctattatgctttactgtatcatccaagctgccggtgaactgggtctttgttatgccgggttaactggtaattataccaggtattcttccattttggtcgatccttcattggggtttgccgtttccgtggtttataccattcaatggttgaccgttctgccgttgcagttggtcacggcagcgatgactatcaaatactggaccaacgtgaacgcagatatctttgttaccgtggttttcctttttgtcattgtcatcaacttgtttgggtcccgaggctatgccgaagcagaattcatctttaatatctgtaaaattttgatggtaatcggattcgtgatcctggctattgtcatcaactgcggtggtgcaggggataagaagttcatcggtactaaatactggcacaatcctggtccatttgctcacggtttcaaaggtgtttgtactgttttttgttatgccgccttcagttatggtggtatcgaagtcctccttctatcagcagctgagcaagaaaatccaagaaaatccattccaaatgcctgcaaaaaagttgtgtatcgtatcttgttgatttacatgttaacaaccattttgatttgtttcctggttccatacaacagtgacgaattattaggctctgggagctcctctgggtcccatgcatctccatttgtcattgctgttgcgtcccacggtgtcaaagtcgttcctcacttcatcaatgctgtgattttgatctctgttatctctgtggccaactcttcgttatattctgcaccaaggttactgctatctttggcagaacaaggatttttacctaaatgcctggcgtatgttgatagaaacggcagacctttgctttgttttctaatttctcttatctttgggtgcatcggatttgttgccactagtgacgctgaagaagaggtttttacatggttattagccatttccagtctttcccaattgtttatttggatgtcgatgtccttgtcacatattagattcagagacgccatggccaagcaaggccgttcaatggacgaggtgggatacagagctcaaacaggctattggggctcttggcttgcagttattattgcgttatttttcctagtttgccagttttgggtcgccatcgcacccgttagtgaacatgggaaattgaatgctaaagtgttttttcagaattatctggcaatgcctattgtcttgtttgcctattttggccacaagatatactccaaatcgtggaggttttggattccagccgacaaaatcgatttggactcacacagaaccatatacgtcccgccatcacttatagagaccaacaagaatgaagacgatgttcttaaagaacatgaaacttcagagtcatcggaaaacctgaacggctcaagttcaagaaagtttttcaagagaatggtcaatttctggtgttaa

SEQ ID NO: 154 - DNA, 636 bp, Saccharomyces pastorianus
atgcttagacgctccaagaattccggttcaagctcgcacacagacgctaagaaaaggcagtctatgtttctagaatccaaaagttcgttgatgtcattgtctaacgagtttgctcaaggacattctaaaacaaagcagaaaacgcaagagggtgtctcctcctcatcgtcttcttctgcacacaaaaaatccacgtccagtcggtcaaagttgaaaagaagcagtttgttgctcgatgaaacacttctaaaggactaccattcggccataaaacacatgcaggtaaacgctcccagagaggagaagctactgctggttccgtctccaacgcagtcaacgagaagcgaatcagacaccagtctctcttccagtaagagttcgatatcttccatattctcccaggataaaaactattccattcacgacttgttatatgaagacatcgaagagatggataaaacagccaacggccccaaaattgatgacacaatagcaatagacgaatctaaagcactttttgtcttctgcacaaacgagtcctctatgaagctaccttataatgaaacactgcacgaactgaacttggacactccagtcatgggccccaacagaagaacatcgctaaatttcttttaa

SEQ ID NO: 155 - DNA, 645 bp, Saccharomyces pastorianus
atgtcattcaacagtccatttttcgatttctttgacaacatcaacaacgaagttgatgcctttaacagattgttaggtgaaggcggattaagaggctacgcgccaagacgccaattaacaactggtcctggtaaggattcgacaggtaaggaaattgctagaccaaataataatggtggtgctctttatgatccaagagatgacacattggatgattggtttgacaatgatttgtccttgctgccatccaatctcagcttccccagaagtgttgctgttccagttgatatcttggatcacgataacaattacgagttaaaggtggtggttcctggtgttaagagcaagaaggatatcgatatcgaataccatcaaaacaaaaatcagattttggtttctggtgaaatcccatcttctttaaatgaagaaagcaaggataaggtcaaggttaaggagagcaactctggtaaattcaagagagttatcactttaccagattacccaggtgtcgatgctgataacattaaggcagactatgcaagcggtgtgttgactttgactgttccgaagttgaagcctaaaaaggatggtaaaaaccacgtcaagaagatcgaagtctcgtctcaagagtcatggggtaattga

SEQ ID NO: 156 - DNA, 2898 bp, Saccharomyces pastorianus
atggctcctcctccattccgtcctgaaaatgctgttaagagagccgacgagcttatttctgtcggcgaaactcaagctgctttacaatctttacacgacttcataactgctagaagaatccgttgggccactccttccactgtcgaaccagtcgttttcaaattcttggaaatcggtgttgatctaaagaaaggtaagctgcttaaggatggtttgcaccaatacaaaaaactggttcaaggctctcctgaaggtttggcatctgtcggtgctgtcgctcgtaaatttattgatttagtcgaaacaaagattacctccgaacaaactagggctgatgaacttcaaaagcaagaaatcgatgacgatttggaaggtggtgtcactccagaaaacttgttagtttctgtttacgaacaagatcaatctgtcgctggtttcaatgacgaagctattacttcatggttaagattcacttgggaatcataccgtgctgttttagatttattgagaaacaacgctttgttagaaattacttattcaggtgtagtcaagaagaccatgcatttctgtttgaaatatcaacgtaagaacgaattcaagagattagctgaaatgttgcgtcagcatttagacgctgccaactaccaacaaagcaaatcaggtaacaacttagttgacttgagtgatgctgatactttgcaacgttatttggatcaacgtttccaacaagtcgacgtttctgtcaaattggaattgtggcacgaagcttataggtctattgaagatgttttccacttaatgaagacatgcaagcgtgcacctaagccttcaactttggctaattactacgaaaaccttgttaaggtcttctttgtttccggtgatccactgttacacaccactgcctggaagaaattttataaattgtattctaccaatccaagggctacggaagaagaatttaagacttattcttccacaattttcttgtccgccatttctattcaattggacgaaatcccatctattggttacgatcctcatttacgtatgtaccgtttattgaacttagaaactaagccaactagaaaggaaatgctggaatctattattgcagatgaatccatttatggtaaggttgacgaagaattaaaacaattgtacaacatcgttgaagccaacttcaatgtcgacacaatcaaacaagatttggaaagcttattgaccaaattagtctcaaagccttacttcagtcaatacattgtacagttaagagatgtcattatgagaagagtttttgtcgctgcctctcaaaaattcactacagtctctcaatctgaattgtatgaacttgccactctaccagctccactagacttgtctggctgggacattgaaaaggctttattacaagctgctattgaagattacgtctctatttccattgaccacgagtctgctaaagttattttcgcaaaagatccatttgacatttttgaatctaaggaaattcccgaagaagacagttcagaactggaaggtcaagaagaaaaagaggaagccgaagaagctcttgaaccacaagaagccgaagagactgaaccaaaggaggacggcgaagaaaaggaagaagaatccgatcccgttattatccgtaattcatatattcacaacaagttacttgaactgtccaacgtcttacatgatgttgacagtttcaataatgcttcttatatggagaaagttaagattgcccgtgaaactttgattcaaaagaacaagggcgatcttgaaaagatttccaagattgttgacgaacgtgctaaaagatctcaagaacaaaaacaaaagcacatggaacacgctgctataaatgccgaacaaaatgccgaagtcagacaacaacgtattctggaagaaaaagctgccattgaagctaaattggaagaagaatctcatcgtcgtttaatcgagaggaagaagcgtgaatttgaaatcatcaaggaaagagaaatcacaaaaatgattactgaggtaaacgctaagggccatgtttacatcgatcctaacgaagctaagagcttagaccttgacactatcaagcaagttattattgctgaagtgtctaagaacaagagtgaattagaaaaccgtatggactatgctatgagaaaattggaccataccgaaagagctttaagaaaggtagaattgccattgttgcaaaaggaagttgatgcgttacaagaaactgacactgccgactatgagatgatgaagaagaagattgtcgatgcggccaagggtgaacatgaagccagaatgactgaccataagaacttggccatggtctttgacgattacttgaaattgaaagaacgcttgtcaggtaccaaagaaagtgaagtagcccaactccgtaatcaaaagaaggctgaactagaagctgctaagaaagcaagaatcgaagaagttcgtcaacagcgttaccaagaggctatcgcaagacgtaaggaagaaattgccaatgctgaaagagaaaaacgtgcccaagaactcgcagaagctggccgtaaacaaagagaaatggaggaagctgccgctgctaagaaacctactccattcgctcctcgggccggaaacagagaacctccaagcacaccaagtctcttaccaaaggctactgtttccccagataaagctaagttagatttgatggctcagaagcaaagagagatggaagaagccattgaacaaagattggctggtagaggcgcaggtgggtccaccccagctactccagctaccccagctactccagcttcaacctctgctccaaagaaaatgaccatggccgaaaaattgagagccaagagattagccaaagaaggcagataa

SEQ ID NO: 157 - DNA, 2277 bp, Saccharomyces pastorianus
atgttcaagataccaggtttcggaaaagctgctgcaactcacgccccaccagatatgacaaacgtagatacccgtccacgccatttacaagtgtcaaattgccctaataactcctatgcactggccaacgttgccgctgtttcgcccaatgattttcctaacaatatctacatcatcatcgacaacttatttgttttcactactaggcactctaacgaggttccacctggaaccatcgggttcaacggtaatcagcgtacttggggtggttggtctctaaaccaagaggttcaagcaaaggcgtttgatttattcaagtattccagcaaacaatcgtatcttggttcgatagacatagatatttcattcagagctagaggaaaggcggtcaacacggtattcgatcaagatgagttagccaaacaattcgtccgctgttatgaatctcaaatattctctccaactcagtaccttattatggaattccagggtcatttctttgatcttaaggttagaaatgtccaagcaatcgatttgggagatattgaaccgacaaccgctgttgcaacagggatagagactaagggaattctgacaaaacaaacgcaaatcaatttttttaaaggaagagatggactagttaatttgaaatcatcgaactcattaagaccaaggtcaaatgctgttatcagaccagatttcaaatttgaagacttaggtgttggtggtttagataaagaattcaccaaaatttttaggagagcttttgcgagcagaatttttccaccttcagttattgaaaaattgggtatctctcacgttaaaggtttactattgtacggtcctccaggtactggtaaaacattaattgcaagaaaaatcggtacaatgctgaacgccaaagagccaaagattgttaacggtcctgaagttttaagtaagtatgttggttcctcagaagaaaacatccgtaatttattcaaagacgcagaagcagaatacaaggccaagggggatgaatcttccttacatatcatcatttttgatgaactggattctgttttcaagcagagaggttcaagaggtgatggtactggtgtaggtgacaatgtagttaatcaattgctggctaaaatggacggtgttgatcaactgaataatatattggtcattggtatgaccaaccgtaaagatttgatcgatattgctcttttacgtccaggtagattcgaagttcaggttgaaattcatttaccggacgaaaaaggtagactgcagatttttgaaattcagacaaaaaaaatgagagaaaacaatatgatgagcgacgatgttaacttggctgagttagcggctttaactaacaatttttccggtgctgaaattgaaggtttagtgaaaagtgcaagttcctttgccatcaacaaaaccgttaacattggaaaaggagcgacaaaactcaacacaaaggatatagcaaaacttaaagtaacaagagaagactttttaaatgctcttaatgatgtcactcctgcttttggtatcagtgaagaagatttaaaaacatgtgtagaaggtgggatgatgctttattccgaaagtgttagctcaattttaaagaatggggctcgttacgttcgtcaagttcgcgaaagtgagaaatctagattagtgtctctattaatacacggccctgcgggatctggtaagacagcattggccgctgaaattgctttaaagtccggattcccatttatcagattaatatcacctaatgagttatcaggtatgtcagaaagcgccaaaattgcctatatcgataacaccttcagagacgcatataaatctcctctaaacattctcgttatcgattcgttagagactctggttgattgggtgccaattggtccaagattttcaaataatattttacaaatgctgaaagtcgcactgaagcggaaaccccctcaagatggccgtttgctaattatgacaactacctcaacttattcagttctccaacaaatggatatcctgagctgttttgacaatgaaatagcagttccaaatatgacaaacctagatgaattgaataacgttatgatagaatctaaatttctcgatgacgctggtagggttaaagttatcaacgaattgtcacgcagttgtcctaactttaatgtcggtatcaagaagaccttaaccaatattgaaactgcaaggcatgatgaagatcctgttaatgagattgttgaattgatggcacaatctgcgtga

SEQ ID NO: 158 - DNA, 4131 bp, Saccharomyces pastorianus
atgactgaaaaaataccaataacgaactatcaaaggacaaatgccaaacctttactgaaattgactgaaaaactttttagaagaaacattttcgatctctatttgactgcccaacaattggttgttctcggatatttattggcaattccaagtgaagaagacaaactcaaagcatgggattatttcatgaaaggaaacataacgttaaacgtcgaaaaatcgttcccatcgactcaggaaaaggaacagggtagtataatatcctccactggtgatgctcaacctgacaatgtatcgtcggaaacagtagagataactacagaaaatcacaacaataataataatgatactaataataataatgataatagtaatagcaatagcgaaagtcaatgcgaagataaaggccctgaacccaacacaaacgatgaagataatgtcaataatgatgttgaagaagacttatttaagctggatttagaagacttgaaacagcaaataagtggtccaaagtttatcggaaatctgtctttgaaaatcaggtatgtcttatggcaatgtgctatagattatatgtatagtggccataacgaatttgatgatggtgatgaaatggaatatgccctactagatgttgaaaaggaagaggaagaggaagagaaagagaaagatgatgaaacggaagcaccgcaaaaccaagaaaatatccctaagtttaccgaagatgaaaattatgacgacgaagatgataactatgaggaagacaccacatttgaaaagaaagacgattttatagaaaatggcaatggtattcccttttctaatattgaaattgatgatgaacgacgcctgttgttgaacatttctatatcaaaggaaacattatcgaagttgaaaactagtaacgttgaagggattatgggaaactggaacaaaatttaccacagtcttgaatacgataaagaaactatgataaagcgcttaaggctggaggaaagtgataaaatgatagagaaaggaaagaggaaaagaagtcgaagcgatttggaaatagcttccgatgaagaaaacaataaaaatatagacagtaaaccagaaacaaacgatatactgtctgcaattgaaggcgagacatttagtgacactgggaataaacgtcccaaacagaataagttagatttaacagtcaatctagggatcgagaatttatcattaaagcaccttctgtcttcagttcaagaaaacaaatctcgcttaggtatatcagattacgaactgaaacaccttattatggatgttagaaaaaatcgatcgaaatggacatcagatgaaagaattggccaagaagaattatatgaagcctgcgaaaaggttgtattagaactaagaaactttactgagcactcaacaccatttctaaataaagtgagcaaaagggaagccccaaattatcaccagattataaaaaagtccatggatctcaatacagttttgaaaaaattgaaaagctttcagtatgactccaaacaagcatttgttgacgatgttatgctaatatggaaaaattgcctaacctataactcggacccttcacactttttgagggggcatgctattgctatgcaaaagaaatctcttcaattgatccctatgattccaaatatcacaatccgtaacagagcagacctagagaaagaaatcgaagacatggaaaaggacaaagactacgaagtggatgaagaggaagaagttgctggttctgggagaaaaggactgaatatgggtgctcatatgttagcaaaggagaatgacaaaggttccaaaaggggtacctctaaaaccaccgagaaggaaacttcaactgatattgacaaagcaacttcaacaattcttgaggggggagaagacgaactggactctccaaaagaagaaaaggaagatgaccaaaccgcttcacccaatgtaacttttagtgaaactggcggaaaaaatgaactcagggaaaatgagaaatatgacgaacatcaaagtgttgaagaaagtgaaaaagctgagggatgcgaaaaggagaacgaaaacggacgagatggggaagtttccaaaaatgacacagaaaacaagcgacaaagtaaagtcgacgagggaaatgaagtaagagaagagaatgatggagaaggagaaaaagtaaatgagaatgaagaagaagaggaagaggaagaagaagaagaagaagaagaagaagaagaagaagaagaagaggatgaggaggatatggccgactctcaatcctatttacttgaaaaagacgatgataaggacgacttggagatttctgtttggaaaactgtgactgctaaagttcgtgctgagatctgcttgaaaagagcgagttattttaaaaatggaaagttaaatatcgattcggaagcatacctaaaaaacccacaaagaatgaaaatgttcgatcagttgttctcagaatataaggaacagaaagctctggaatcatatcgtcagaaaatggagcaagactcaatcatgaaaaacggtttcgggacagttttgaagcaggaggacgacgatcaactgcaatttcataatgatcatcccttgaatgggaatgagggttttgaaaaacaacccaatgatattgaattggacgacaccagatttttgcaagagtatgacatcagtaacgctattcctgacatattgtatgaaggagtgaacacgaagacactggacaaaatggaagatatttctgtagaacgcatgcttcaaaacgggatgaccaggcaaagcctgtttttagctaacaaggatttgggtcttacacctcaaatgaaccaaaacatcacactcgtgcaacagattagacacatttgtcacaagatatctttgattagaatgctacaaagtccgttgtcagcccaaagctctagaaacaaccctaacgcctttcttaacagccacatctataactacaccgttattgatgattcacttgacattgacccagtatcgcaacttccaactcatgattacaagaacaacagggaacttatatggaaattcatgcataagaacatatctaaggtagctatagcaaatggatttgaaactgctcactcttccgcaataaatatgcttaccgaagttgcaggggattacttatccaatttgatcaagaccttaaaactacatcatgaaaccaattctttaaatagaggtacaaatgtagaaatgttacaaacaacactactggagaatgggatcaatagaccagatgacttgtattcctatgtcgaatcggagtttggcaaaaagacaaagaagcttcaagacattaagcacaagctagagaactttttaagggccttactaaggccaactctacaagaactatctgagagaaattttgaagatgagagccaaagtttctttactggtgattttgcaagtgaactaactggagaagatttctttggtttcaaagagcttggtctagaaaaggagtttggcgttttgagttcgtctgttccattgcaactgctgactacccaattccaaactgtcgatggggaaactaaagtgcaggataagaaaatccaacctgaagaatctgacagcatcacgtatagcaagattacaaaaggcctgcttgatgcgggttcgttctggaacactttacttccactgctaaggaaagattatgagcgctccaaagcatatatagcaaaacagagcaaatcctcagcaacaaatgatagaattctacctacttcgactgaggacaattcctttgctctcttagaagaagatcaatttatttcgaagaaatccgcatcaaaagcaaggttacctcctactggtaaaataagtactgcgtacaagaagaaaccaatttcaaatgccttcatacttccagaagaggacccagagaagagcgaaaaaggtgatccaaatacaactatacattctacagtgcatacagaaaatgaaatgggttcttccctatttttggaaacacctcaaccactggattctttgaacatggacgacccctttaatgattcaaacgtgggcaccaatagttcctttagtttgagccttccccgtttaaatcagtaa

SEQ ID NO: 159 - DNA, 1473 bp, Saccharomyces pastorianus
atgagtcttaaagtagatgactttggcacagactgctctagaagtatagaaacatacaatgacagaatctttgatgtgtacatacagaaggattcgtattcccagtcgggtctagatggcatgtttccagaacctggtattcggagcgatgcttgtgtgaaaaatgaagcggaagatggcatcgacctcgccaacgcgcctcctcagtttgaactggtcaatactgggctgggagctaaatcagatcgtctaaggtctccatcagtgaagggtgcgttcaccgataaacagaggaaaaatgaagtaccaagcatagctgttaacaattacttttctggacaaagtagcgaaaatacgtcaacaacggaatcttggggcatcggctgcgataagtggtccgaaaaagtggaagaagcattctttgaagctctcaaactgataatgaaaaacggtaccacgaaaataaaaataagaaacgccaatttcggaagaaatgaactcatttcattatacatcaagcatcaaaccaatgagttcagaaccaagaagcaaatttcttcacatatccaagtctggaaaaaaaccatacaaaacaaagttaaggactctttgactttgtcacagagagaggaggagctcttacatctcatcgagcatggtgcagaacaagcagcggaaacttctaatatgttttatgacatattcgaggaaattattgattcattaccttcaattaacgacgcaacgaattcaactcctaataatcttcacgccagtaacaccagtaacaccagtaacaatgaattatcagtacactcaaggttactaacgccaatcacagcttcaaacgagaagaagatagagaatttcatcaaacacaacgctgcatctcaagcgaagactcccttaatctacgctaaacacatttacgaaaacatggacggctataaatgtgtaccatctgaaagacaccttagacagctttctcccgcagaatctcatcacggaggcgttttcgacaaggataagatttcaagtaaggaagctatcttggaaacagccagaaatatcgaaatagagcagaggaagattatcaacaagtaccaaagactatcccgcatacaaggacaagagagtaatacagagttcagttccaattccaattccggttcggaatacgaatctgaagaggaagttgttccaaggtctgctgcagagccacagttacaaggtaggctagcaccatactacaagaacaacggcatgccatatcctctctccaaagtacgaaccaggccaatgtaccccagacctgctgaagacgtctataattcgaactatgctcaaggtctaccccagtaccaatcttcctacttttctcaacttctattatcatcaccccaacatttcgagcattccccacaccaaagaaactttacacagtccaaccaatcgcatgggaacttctattga

SEQ ID NO: 160 - DNA, 924 bp, Saccharomyces pastorianus
atgagtagtgacactaagcaacaagaatcgagctttgctattaatttcttaatgggtggtgtcagtgcggcagttgccaagaccgctgcctcacccattgagagagtcaagatcttgattcaaaaccaagatgaaatgataaagcaagggactctggaaacaaagtattccggtattgtagactgtttcaagagaaccgctaaacaagagggtatgatctcattttggagaggaaatactgcaaatgttattcgttatttccccacccaggctttaaattttgccttcaaagataaaattaaattaatgtttggtttcaaaaaagaggaaggttatggtaaatggtttgcaggtaatctagcctctggtggtgctgcgggtgccctttcgttactatttgtttattctttagatttcgccagaacaaggttggctgccgatgctaaatcatccaagaagggcagcacacgccaattcaacgggctggttgatgtttacaaaaaaactttaaaatctgacggtattgctggactgtacagagggttcatgccttcagtagttggtatcgttgtttatagagggttgtattttgggttattcgattctctcaagccactggtactaaccgggtcattagacggatcatttttagcttcgttcttattgggttgggtggttactacaggtgcttcaacatgttcatacccattggacacggtgagaagaagaatgatgatgacttccggtcaagccgtcaaatatgatggtgctatggattgcctaaggaagatcgtagcagccgaaggggtcggatcattattcaaaggctgcggtgccaatattctaaggagtgttgctggagcaggtgttatctccatgtatgatcaattgcagatgatattatttggtaagaaattcaagtag

SEQ ID NO: 161 - DNA, 258 bp, Saccharomyces pastorianus
atgtcatctgctctatacaaacaaaacacaaatttcactcattctacaggttctttcttacaaagtgcccctgttgagttgaccacagttagtggataccaagagtttttgaaaaagcaacaaaagaaaaataatgaaatccaaacagtcctgagcgaagacaagtcgcacggctatgtgctaatgggcggtgaagtcattgccaatattctaggtgaagctaaagattatctcttggatttggcgggtcaggcctaa

SEQ ID NO: 162 - DNA, 2811 bp, Saccharomyces pastorianus
atgtcgcagacaatcacatccttagatccgaactgtgttattgtattcaataagatttcaagcgctaacgagaaaagtttgcgtgcgaaatttaagcgtttgcatattgattctattatcaaacctggccatgatttgaagacaaattatgctttcattaagatccatcaggataaagccaagtcactgttttcatccctcaagaacttgggctttattgaatctatcataccatttcatgatactgaattgtccagtaatttgcataaacttgtttctaaagacaaaacaaaattactggaaactccaaaacagtacgaattatacaatttgtcgaatttgaccaacaaccccaaagaatccttatattttgcattcttacaaaactacataaaatggttgattccattttcgttttttggattatcgatccgattcttatccaatttcacatatgaattcaattccacttattcattgtttactatgatatggactctgttatttgcggctttctggctttataaatacgaactattttggtcggatagattgagtcaatacacctcattttcgaccattgagttccttcgcgacaaaaaaaacgttggaggaaattctggctcaactaccatgttgaaaaaatgttgttttataccagtggctttgctttttggtgttgtattggtatcattccagttgttttgttttgcattagaaatttttatcaagcaaatttataacggcccaatggtgtctgttttgtcattcttgcccacaatactaatttctgcgttcatcccagttttaactatggtctacaataaatattttgtggaaccaatgacaaattgggaaaaccataccagtgcaatgagtgcaaagaaatccaaagaggctaagaattttgtcattatctttttatctagttatgttccattgttgataactttattcctttatctgccaatgggccatctattaaccgccgaaataagagccaaatttttcagtactatctcgatcttagcttgtttgcctacgcatgattcagattttgttattgacacaaagcgttatgaagcccaatttttctactttatcgttatcaaccaagtgattcaattcagtctagaaaattttgttccaagccttgtcaatattgcaatgaacaaaatcaatggaccaaaccctgagcttgtgaaagccgaaaatgaaatcagtaaagaccaactgagcccatcagacatgagaatttggtcaaaggttaaatcgtacgagacagatccatggggagccacattcgacttggatgcaaatttcagaaagatcatattacagttcggttatcttgttatgttttctactatttggccattggccccattcatatgtttggtggtcaatttgatagtttatcaaatcgatttaaggaaagccgttctttacagcaaaccagagtatttcccattcccaattgacgatatgtcatcttctgtctctgttaccaaaaaattgactgttgctctatggaactctgttttggttattttcgcggtcgtaggttctgtcatcacagccactttaacttacatgtatgaagactgcaacttaccagatgtcggcgcacacacttcaatccatatgagtaagctttggtatttggcaaatccaatcaagcattcgtgggtgagtattgtactacatgccgttttaattgaacatgccagtgttgccgttttcttccttttctctaatattctaaaatcttcccgggataatgtttccaacggaatcgtgccaactaatataacgaagacggaaaaattatcaaaacaagaagattttgactacactcctgctgtcaaatccagtcctgataatgaaaatgagctgacccaaagaagaggacctacccaggattacgtgtcccatgaaatcaatgagaaacagcctatctctcttgcaaatggagttgaaagacggggtaccggccagtctaagaatggtccttccattcttcccccattaccaccttcttcttcttcttcgtcttcttcttccggtgcaggcgctgtcgattctggcaatagtgataaaattggagttactaatgaaaaatcagtggccatagaaaacaacgaaaaaggaaccgctttggctaaagtgccaactgttgggtcatacggtgttgcaggtgccactctacctgaaacaataccaacttcgaaaaactataatttaagatttgacgaagacggtaattccatcaaagatgggaaatttggtggggaaacctcgaacttaaccgacacgaacgcggtagacagcgagagcaaattcaatgcaaacggcaatgctcctgatgcattcagcagaaaaatcgatcaaatacccaaaattgctgttacgcatggtgaagataattctcaagttgaaaacgatgttgccatggctgacccggtaaatgccaatggggccatcaaaccggttctcagtacaggcgttactgatgaccattcgagggcttccgtgactaccgagcaaacgaagaattctatgttaaacaataagaatggcccagtaagatctatttctacgaaggaaaccaaagaatctacaagaccatcaaacaacagtgctactgatgccgctcaccaccatcaccatcaccgtcaccatcgcgatgctggagtgaagaacgccacgaacaattccaaggcagctgaatcttcatcttcttcatcagcgacaaaagaaaaaccaaaacgcaaaaaggggctgctgcataaattgaaaaagaaattatga

SEQ ID NO: 163 - DNA, 1065 bp, Saccharomyces pastorianus
atgtccttgtgggttgacaagtatagacctaagtcattaaatgcactttcacataatgaagaattgacgcattttttaaagtcactgtctgatcaacctcgcgatttacctcatcttttactatatggaccaaatggtgcaggtaagaagacgcgttgcatggcattactagagtctatatttggttcaggagtttatagattaaagattgatgttagacagtttgttaccgcctcgaacaagaaactagagttaaatgtggttagttcgccatatcatttggagatcacacccagtgatatgggcaacaatgatagaattgtcattcaagagctgttgaaagaagtggcacaaatggaacaagttgacttccacgattctaaagatgggttggctcatagatacaaatgtgttattatcaacgaggcaaattctttaacaaaggatgcccaggctgccttgaggcgcaccatggaaaaatactctaagaacattaggctgatcatgatttgcgattctatgtcgcctataattgctcccatcaaatcacgttgtcttttggttcgttgtcccgcaccaagtgataatgaaatctcaaatattttatctgatgtagcgacgaatgaaagaatacatttagaaacaaaggaaattttgctgaaaattgccagcgaatcgaatgggaatttacgagtctctctattgatgctcgaatctatggcattaaacaacgaactaacattgaaagtcagtagccctataataaagccggactggattatcgtaattcaaaagctagcgagaaaggtcgtcaaagaaagatctgttaactcattgatcgaatgtagagccgttctatacgacttgctggctcactgtatacctgcgaatgtaattttgaaggaactaacgtttgcgctgttaagcgtggaaaccttaaacactgtgcaaaaggcatccgttattgaaaattcaagtgttttcgatgaaagactatcactggggaataaggcgatcttccatttggaagggtttatagcaaaggtcatgtgcactttagattaa

SEQ ID NO: 164 - DNA, 777 bp, Saccharomyces pastorianus
atgttagaagctaaattcgaagaagcatcccttttcaaaagaatcatcgacggtttcaaagactgtgtccaattggtcaatttccaatgtaaggaagatggtatcattgcccaagccgtcgacgactcaagagttttgttggtctctttggagatcggtgtcgaagccttccaagaatatagatgtgatcatcctgtcacactgggtatggatttgacctcgctaagtaagattctacgttgcggtaacaacaccgacactttaacgttaattgctgacaacacaccggactccatcatcctattattcgaagatacaaaaaaggaccgtatagcggagtattccctgaaattgatggatatcgatgctgatttcttgaagattgaagagttacaatacgattcaaccttatccttaccatcatccgaattctccaagatcgttcgtgatttgtctcaactgagcgattctattaatatcatgatcactaaggaaacaatcaagttcgtagcggatggtgatatcggttcaggatccgtcataataaaaccatttgttgacatggaacatcctgaaacaagcatcaaattggaaatggaccaacccgtagatttgacattcggtgctaagtacttattagatatcatcaagggttcctccctttccgatagagtcggtatcagactatccagtgaagctcctgctttgttccaattcgatttgaagagtggattcctacaattcttcttggctcctaaatttaatgacgaagagtaa

SEQ ID NO: 165 - DNA, 300 bp, Saccharomyces pastorianus
atggccgcaactaaggaagcaaagcaaccaaaagaaccaaagaagagaaccaccagaagaaagaaggaccctaacgcccccaagagaggcttgtcggcctacatgttcttcgccaacgagaccagagatatcgttcgttccgagaaccctgacgtgacctttggccaagtgggaagaatactcggtgagaaatggaaggccttgaccgcggatgagaaggtgccttacgaaactaaggctcaggctgacaagaagagatatgagtccgaaaaggagttgtataacgctacacgtgcctga

SEQ ID NO: 166 - DNA, 1404 bp, Saccharomyces pastorianus
atgttcaagtctattgtttgttcagttttagccgcttctttagttaatgcaggtactattcctcttggcaagctagccgatgtcgccaagatcggtacccaagaagaaatcattccattcttgggtggtgcaggaccatacttctctttccctggcgactatggtatttctcgtgacttacctgaaggttgtgaaatgaagcaattgcaaatgctcggtagacacggtgaaagataccccacctatagtaaggctaagaccattaaaaaaacatggtacaagttgagcaactacactcgccaatttaacggctcattgacatttttgaacgatgattatgaatttttcatcactgatgataatgacttggaaatggaaaccacctttgccaactcagacgatgttttgaacccatatactggtgagatggacgctaagagacacgctcgtgagttcttgcaacaatacggctacatggtcgaaaacaagaccagtttccccatttttgccgccagttccgaaagagtccacgataccgctcaatactttattgatggtttgggtgacggcttcaacatttccttgcagaccgttagtgaagctatgtctgccggtgccaacactttgagtgctggtaatgcatgcccaggttgggatgaggatgccaacgatgacattttggacgaatatgataccacctatttggacgacattgccaagagattgaacaaagaaaacaagggcttgaacttgacctcaaccgatgccaacactttgttcgcatggtgtgcatacgaactgaactccagaggttacagtgatgtctgtgatatcttcagcaaagacgaattggtccgttactcttacggtcaagacctgacctcattttaccaagatggtccaggttacgatatgatcaaatctgtcggtgctaacttgttcaatgctactttgaaattgttaaagcaaagtgaaacccaagacctaaaggtctggttgagtttcacccacgatactgatattttgaactatttgacaaccatcggtataattgacgacaaaaacaacttgactgctgaatacgttccatttatgggcaacactttccacaaatcctggtatgttcctcaaggtgcccgtgtgtacactgaaaagttccaatgttctaacgacacctatgtcagatatgtcatcaacgatgctgtcgtcccacttgaaacctgttccaccggtccagggttctcttgtgaagtaaatgacttctacgactacgctgaaaagagagttgccggtactgacttcctaaaggtctgcaacgtcagcagcgtcagcaacgtcaccaaattgtccttctactgggactggaacaccacccactacaacgccactttactaaaacaatga

SEQ ID NO: 167 - DNA, 2250 bp, Saccharomyces pastorianus
atgcgtgttttgataactaacgatgacggtcccctgagtgatcaattttcaccatacatcagaccctttattcaatatattaagagatcttatcctgattgggaaattacaatctgcgtgccacacgttcaaaaatcatgggtcggcaaggctcatcttgctggtaagaacttgacggctcaatttatatattccaaagtcgacgctgaagataatactttctggggtccttttatccagccccaactaaagtcgaaccactccaaattgccttacgttttgaatgcagaaattccgaaagatgcgatcgagtgggtattgattgacggaaccccggcatcgtgtgtaaatatcgggttacatttactctctaacgatcaattcgatttagtgctgtcaggtccaaatgttggcagaaatacatctgcggcgtacattacatcatctggcacagtgggtggtgcaatggaatccgttatttcaggaaatacaaaggcaattgctatatcatgggcctactttaatgggttgaaggatgcttctcctgtactgatgcaaatggcctccaagagatccctagacgttatagatcatcttgtgaaaaactgggacccaaagaccgatctatatagtattaatatacctttagtggagactcttaatgacgataccaaggtatattatgcgccaatctgggaaaacagatggactccaatattcaacgggcctcatattaatttagagaataactttgctgagatcgaagatggtaacgaatcatcatcgatttcctttcactgggctccaaagtttggtgcacataatgattctatccactacaagaacgagtatagagataggactgctttaactgatgctgaagtcatagaatccaaaatgatcagtgttacgcctatgaaagccacgttcaagggtgttaatcatctacttggagagttaaagctgactcaaaaagaaaacggttcaccaaagataaatagccttgcagtggtgagtatcgatccaatggaatatatatataaacctttaacgagcgcattgaaaaaatacttgccacagttggatatcgtgccaagcttaccagaattcgagagtggtaaacacgaaaaccaaacgaagattttccactacggtgactatgagcaactagacatggacaaattaatggaactaccaaaaaattattacaccaactcttatatatacagaaaagcattgatcagaaagcactttctttcgcacactatccaaacgtatacagcaaaacatccagattcaattttgaagaaagcatatttagaatcgtttactattgatttagactatgctgaatttttagatgatgcattagacgaaaactgggagttacgtcaagaattggaaaacgaaagtaaaggcaaatggtggattgtgaaaccaagtatgagcgataaaggtcaaggtattagggtattcaagaccatacaagacctacaagccattttcgattcttttgatgacgaagatagcgaagcggaagagagtggaaatgacgacgacgcaaatgcagaattcatggataataacaaagtaaatatctcccaattgcgccactttatcatacaagaatattcaacgagcccattattgctatcatccatggataatagaaagtttcatataaggtgttatgttgtttgtaaaggggatttacaagtattcgtatacgataggatgctagcactatttgctgctaaaccgtttgtccctctagatcctaacacatattccgtaacagatttgaaagatttggagtgccatctgactaatacatgcttgcaaagcaagaagaaagataaagattcttctgttttggagtttgattccctagaagaaattccaaacgagaaaaagttgaaaattaaggaacagattcattgcataacaaatgacgttttcttagcggcagtaaatgtaaacaggctaaacttccaaccgttaccaaatgcgtttgagacctatggtgtagatttcttggtcgattcggattatgaagtcaagttattggagatcaatgctttcccagatttcaagcaaactggtaaagacttgaaggacctcattgatgaattgtttgacgatactgtcaagtattgtgttgccccaatctttaaaggtaacaacaagatcgaagatgaagaagatccaaactttgtaaaggttatcgactacacttcaaatgattggtga

SEQ ID NO: 168 - DNA, 693 bp, Saccharomyces pastorianus
atggttttctgcacaatcttaaaatggcttttcgctgcctacctactgtcttcatacaagtcactacctggtgcatatttttttagattttattactacgtgattcctattttatttttgcctattgtcacaggatcgaagaccaaaaatatcaagaaacttaaagaaaacgaatacggttgcttctcgtacaccaaactggacacatatgcctctccattcgaatgtgacttttactttcataaaagtaatagcacctattttgaagagttggatatttcaagaggcggcttgatgtgtaagatttttcagaagttgatgctcaattccaagcattacccatatattccagtcgcaaacgttttcaccaacttcttaaaggagatcaagcctttccaaaaatactctgttacatcgaggatcatttgttgggatgagaaatggatttatgttatgagcagattcaccatcaaaaacggcaccgttctatgctcactatcgctgacaaaatatgtcttgaaggagggcagaaagacaatcaagccaaaggatgcatttgaatactgtgacatatacaatgagaaggtcgccaaaatttctgaagaaaatctaaaacttttaacagagcattgtggttttcacgaaactgtaccgttagaaaacttggacctgagctactgttcccaaatttaa

SEQ ID NO: 169 - DNA, 2058 bp, Saccharomyces pastorianus
atgcgccaggagatagagtttatcgatgaagtggattcaaaaaacgatgccagtattcaaattctcgatggatcatctaacgttgaagtcattgctttatcagaatcagtggaccaagatgaggttaaaaggtcagcacatggcgaatatacaataccatcctcgccagagaacaaccctcttagtctgaatgatattgagattattgaaccaaacaaatctatagaactttctgcgccgttttatcaggatattagcacaagtaaactggatgactgtgtcatggactcgtcgttaaaagttgaagatcacacaagagggaagactaaaagacttttggatgatctcataaatgacgagtggtcagccgatgtcgagtcgagtgaaaggaaacaaagcaaacatcagttcaacttgaaaaacgttgcagagaaatggggagtacagccttgcaaaaattccggatcagttgttatcggtcatgaatatagagaaatccctgctgtccaaactaataacggtgatatcgatagccaaaaatcacaggtggaagcagccaatatattatttgacttcccattgtctccagtaaactacgatagcccatcaaaagaaaagccgtcatcgactgcgaaccacacttctctaccagaccgttatgtagaagcattggcagaaggcaatcaagatggcgttctgaaggtcacacaaaatagtgtacaccaaaaagatgaaggccagttgagatatattccaaaaaagaagaaaagaaccatcgcgttatcaagaacacaaaccaaaaacgttaaatcacctgatacagtggaattgaacctatctaaattccttgatgactcagataattgcagtgttgatattctttcaacgcctacaaaaaagttgaatatactaaggacatgtagtcaaccaattataggcaattctgaccgttcgcaagaagccaaacgctcgaaaactttagcaactgaaaacgtcaaaagcgtcaaaagcactgccagagaaatttctcagctggaaaattatataacttatggccagtattactccagagaagaatcaagaagcaaaatacgacatctattaacggagaataagaacgcgtttaaacaggtcaatcagatatatcgtgataatgtaaaagcgcgctctcaaataattatagagctttcaccgaacctttttcagttgtttcaaaagattgagagtaatctgcaacaacaagtggcaccggcgattatccaaccgagttatgacgattctatacctctcataaggtttcttcggaagtgcgacagtatttacgactttagtaacgacttctactacccttgtgatcctaaaattgtagaagaaaatgtttctattctatattacgatgcgcaggaattttttgaacaatatacatcacagaagaaggaattgtataggaagatacgttttttttcaaagaatggaaaacatgtgatacttgtattaagtgatttgaataaactcaagagggccattttccaattagaagataaaagatataaagctagggtagaacaacgattatcaggaaccgaagaagcactaaggcctaaaagcaaaaaatcaaatcaggttggagaactagggataaagaaattcgatttagaacaacggcttcgcttcattgatagagaatggaatgttaaaattcatactgcgaactcacacatggagtttattaattccttaccgaatttggtttcattggttggtaaacaacgtatggaccccgcaattagatatatgaaatacgcccatttgaacgtcaaatccgcgcaggatggtagagacacgttgagaaaaaccttccatcaaattgggaggatgcctgagttgaaagccaataatgctgtgggtttgtatcccagtttccaatcactattcgaagatatgcaaaaggggcgattacagtctgataatgaaggaaagtatttgatgactgaagcgatagagagaagactctacaaattgtttactagtactgaccccaatggtgttatcgaataa

SEQ ID NO: 170 - DNA, 2256 bp, Saccharomyces pastorianus
atggttgacttttctttgaagaaggccagaaacaattggaaaaatgcaaaaaaatctgcaaattctcctgcaaagcaaaaggcacctccatcgcctgccaagcccaagcaaaaaacgaaaaaaaatccatacagtgatctcaaggatcctgccaccagctatacgttgccaaccattgatgctagggagagaaacagggtagcaacttcaatgcaaagaaggctatcaattcataatacaaactatgctccaccaactctagattactcaatgcccttgcctgatatgacaagtatggcaataataaatgacaacatggagggcagccataataatagcagcttgacgacagagaacgaatcactaagttccaaaggtcttcaaaatagtttaaatccgcccgttgctgatagctctatgaacgagaacgtatataacaagttacctgctagatcggcaatgagaaatactatgatggtctccaacagtaacgatcttttccaaaatagcatgtcgctaaggaaagtgttggcaaatccgcgttttaatgccaaagatttcgtacatgataaactgagtaatgcaagtgccattactatcgacaaatttacttcaaatttaaccgatttatccatacaagttcaagaagaggtaaagttaaacattaataaatcttacaacgaaatcatgactgtgaacaatgacttaaatgttgccatgttggagttgaaaagggttagagaaaatataaatgacctaaacgagactttggaccagttcacaaaaatagcagcaaagaggctccaattacaaaaccaaattaacaaggagagacaagatgatgctaataatgtggaaagtcatagcccagagttactaccacctttgaaagcaggacagaatgaaaaaaccaggaggagagatagatcaagcgttttcatattagaaaaattttgggatacagaattagatcaattattcaaaaacgtcgaaggtgctcagaaatttgtcaattccacaaagggaagacacatcttaatgaacagcgcgaattggatggaattgaatacaaccaccggtaaacctttacaaatggtacaaatttttatcttgaatgatttagttcttattgccgacaaatcaagggacaaacagaatgactttacagtaagccaatgctatcctctaaaagacgttaccgtgacacgtgaggaattttccagtaaaaggcttcttttcaaatttagcaattcgaattcgagcttatatgaatgccgggaagcggacgaatgcgctaaaatgttggatgttataaggaaggctaaggatgatttatgtgacatttttcatgttgaagaagagaattctaaacgtatcagagaatcgtttagatacttgcagtctacacaacagacacctggtagagaaaataatagaagccctaaaaagaatcaaagacgtagtatgggtggttcaatcactcctggtaggaatataacaggtgcgatggaccaatatcttttgcaaaacctgacattatcaatgcattcgagaccaagatccagagatatgagttcatctgctcataggcttagatttctggatgaaggggtagaagagattgacattgaattatctaggctcagatttgaaactgctgtagatgtgttattggatattgaatcacaattgcaagacctcgcagaaaaaatctccgacgaagaactaatgctacataacttgatatccctgaaaatagaacagagacgagaagcaattgccagcaagctttctcagagtattctgtcgtctaacgaaataatgcgcttgaaaagcggtaccgagaatatgatcaaattgggattaccagagcaagcccttgatcttttcttacaaaacagatccagcttgatccaagatttgattttacagattgggtcggtagataatcccaccaactatttgactcagctagctgttattaggttccaaactataaaaaaaacggtagaggacttccaggacattttcaaaaggctcagcggtaaaatctcttcaatcctcgtggattggtgcagtgttgaagtagacaagcacttcaaattgatagataagcaactactgaacgacgaaatgctatcgccaagttctataaagtcatccagaaaacagatagatgggctgaaggctgtagggctcgatttcgtctacaaactggacgaattcatcaagaggaacagtgataaaatccgctaa

SEQ ID NO: 171 - DNA, 990 bp, Saccharomyces pastorianus
atgagcgaagaatttcctacgccggaactcctgtgtgagttggaagacccacaaaattctgctgtattggacagtaacaaagggctaagttccaatcgtgtgttgaaagatatttttgccggtaccgttggtggtgttgcacaagttcttgttggacaaccgtttgatacaacaaaagttcgacttcaaactgcgactacaaggacaacaacactggaggtattgcgtaaactcgttaagaatgaaggtgtgtttgcattttataaaggcgccttaacgccgttattgggggtaggtatatgtgtctcagtacaatttggtgtgaacgaggccatgaaaagatttttccatacctataatgcctccaagaacgcgaatataagctcccaaaacgttgacctctcgcgttcaaatacacttccactataccagtactacatttgtgggctgacaggtggtgtagtgaattcatttttggcctcgccgattgaacagattagaatccgtctacaaacacagacatcaaatggcggagacagagaatttaaaggaccctgggactgtatcaaaaaattgaaggcccaaggtgggttgatgagagggtggtttccaacaatgataagagccgggcacgggctagggacgtatttccttgtgtacgaggcattgatggctaaagaaatcagcaccggattaacaagaaacgaaattcctccttggaaactgtgtctatttggtgcattttccggcacaatgttgtggttgacggtgtatccattggatgtcgtgaaatctatcatacaaaacgatgatttacgaaaacccaaatacaagaattccatttcctacgtagcaaagacgatctacgccaaagaaggtatcagagctttctttaaagggttcgggcccacaatggttagatccgcacctgtaaatggtgctacgtttgtcacatttgaactagtcatgaggtttctcggagaagattag

SEQ ID NO: 172 - DNA, 1089 bp, Saccharomyces pastorianus
atgattaataatcctaaagtagacagtttggcggagaaatccaaggctaccgtttctaagcatccggagcaggtggctttgccggagccagctccggcaaagcctacgcctagacagcagtacccgatcacgttcaacctgacctctaactcgccattccgtctcgttgaccgccagcattatttgcaagaccaggacctttacaagtgcgcctccagggactcgttgtcctccttgcagcagctcgcccacacggccaacggttccatcaggaagaagtacatagttgaggaccagtccccgtactggcccgaagatcccgtcgcggcaatcccctctctcaaccacacgacctgcacgaactatttgaggccaaggatgcagttcacgggctaccagatttcgggctacaaaagataccaggttacggtgaacttgaaaacggtcgactttccaacaggccgcagcacgtcgttgtcgcctcacctatccgggtttttgtcaataagaggcctcaccaaccaacacccggagattagcacgtattttgaagcttacgcagtgactcacaaagagttagccttcttgtcttctagttggaaggaagagccagtgctaaacgaatacaaggctacggaccaaaccgacttggaacactggataaatttcccctctttcagacagcttttcctaatgagtcaaaagaataccgccaacccaactgacagcaacaccgcagaaaataccggtaagaaccagcaacaacaacagttacccactacatcgagcacggatgcaaataacatctcaagaattttcagccaagagaaacagttcggcgactacctagacgagagattcatattcatgaaatggaaggaaaaatttttggtcccggacgctttgttgatggaaggcgtagacggtgcgtcttacgatgggttttactacattgtccatgatcaagtcactggtaacattcaagggttctactatcaccaagacgcggaaaaattccagcaactggagctggtaccttcaatgaaaaacaaagtcgaatccagcgattgctcttttgaatttgcttga

SEQ ID NO: 173 - DNA, 567 bp, Saccharomyces pastorianus
atgaaccctcaaatcagtaacattatcatcatgttggtcatgatgcagctttctcgtcgcttagacatggaggacccaacaatcatcatgtacattagaatcttatactgttcctccattgctatcagctggatggtctaccaaatggccagaaagagaatcgtcgccaagaacgatatgactaccatgaagtatgtcgtgcctggcaacgccatgtccggcgagggtgaaaaactagaagtcaccactgtcaaggactacgatttgaaggaaacagatagtgctatcaagtcaatctacaccgggatggccatgatggggtttatgcatttgtatttgggatacaccaacccattgttcatgcaatccatctctcccgtcaagagcgctttggaacacaacgaagtgaagatccatcttttcggtaagcctgctgctggggacttgaagagacctttcaaggctgcctctttgttcggtggtatgggtcaatctggtccaaagaccgacaagaaatctatcgaagaagctgaaagagccggtaactctggtgtcaaggccgaatga

SEQ ID NO: 174 - DNA, 738 bp, Saccharomyces pastorianus
atgccttatacgtggaagtttttaggggccaacaaacaactctccttggaaaatgccataccgcagttgaaccaattgctgaacctagaagtggagtttgatgtcaaaaccattcaagtccccgatggggctgatgatgtgtccggtggcaacgagtacattcgttctgagttgagattagacacctccaacctggatgagaacacatattctaaattcatttttttggggaacgcaaatatggaagtaccgatgttcctgggctattgcgggaccaacaaccataacaaggttgtattacagtggctgaaggccgaatacggtatcataatgtggccgatcaactttgatcagacaatgatgataaagttggcagatgctagcatagtgcacgtaacaaaggaaaatgttgagcagatcacatggtttagctcaaaattctatttcgaaccaacaacacaagacaaaaacttaaagcaatttgatatagaaatacctagagaaagttgcgagggtttggctcttggccatggcaacactatgcgcccatacagcgatgcaattgtgccttacatctataacgaaacggggatggccgtgggaaaattgcccttggcttccattatattggcgggacacacgaagataatgagagagaccattgttacttcgacacgaaccctcagaaacagagttttaacggttttactacaatcgatacaatttacgagcgagtga

SEQ ID NO: 175 - DNA, 1350 bp, Saccharomyces pastorianus
atgtttgcggataccccccaatggttgctagttttagtagctgtatacctttccataccgttaatggtttattttattattccttacttatgctatggtaccaagtccaccaagaaaagggttattatatttgtgctcggtgatgtaggccattctccgagggtttgttaccacgcgttgagcttcagtaagttaggctggcaggtcgagttatgtggttacgtagatgacaccctacctaagaatatttctaatgatccgaatattactgttcatcatatatcaaacttaaacagaaagggaggtcaaacgtcggttttgtttatggccaaaaaggtgattcttcaaattctaagcattttcaagttgctttgggaactgagaggcagtaactatattttgatacaaaacccgccaagtatacctattcttccaattgctgtattttataggctgactggttgtaagctgattatcgattggcataatttggcatattctatattgcagctcaagttcaagggaaacttttatcatccgctagtgttgatatcttatatggtagagatgatatttagcaaattagccgattataatctgactgttactgaggccatgagaaagtacctgatccaaagctttcatctgaatccaaagagatgtgctgttctatatgatcgtccaggttctcaatttcaacctttcccaagtgatatctctcgccaagaaactataacaactgaaagttttatgaaggattacattcacagcgattttgatatagaaaaaggtgataaaatcattgtaacatcgacttcgtttactcctgatgaagatattggcattttattgggtgccttgaaaatatacgaaaattcgtacgtgaaatttgattcaactttacccaggatcttatgtttcataacaggtaaagggccgttaaaagagaaatacatgaagcaagtaaaggaatatgattggaagcgctgccaaatcgagttcgtatggttatcagcagaagattatccaaagttattacaattatgtgattacggggtatctttacatacttcaagttcaggactggatctgccaatgaaaatcctggatatgtttggttcaggtcttccagttattgcattaaactacccagttcttgatgaattagtacaacataatgttaatgggttaaaatttgttgatagaagagaactacatgaatctttgatctttgccatgaaggatgctgatgtatataaaaatttaaaggagaacatcattcaagagacccaaaacagatggcaagccaactgggaaaacacaatgagacaactgaagttgatccactga

SEQ ID NO: 176 - DNA, 4179 bp, Saccharomyces pastorianus
atgactaacgaaagtgtttggacagagaaattggacaatccaaccctttcagtgttaccacatgattttttacgcccacaacaagagccttatacaaagcaggccacatattccctacaagtccctcaactcgatgtacctcatgatggtttttccaacaaatacgccgttgctttaagtgtatgggctgccttgatatatagagtaactggtgatgatgacattgttctctacattgccaacaacaagatattaagatttaacattcaaccaacattattatttactgagttgtactctactataaccgatgagttaagtcagcttgagtccattgaagcagatttctctttcgatgatttggctgaaaaaattcagcgtaatcaagatttggagagaacacctcaattattccgtttggccgttttagagaaccaagatttcaaactagatcaatttaaacaccatttagtggactttgttttgaatttagaaactagcaataatacacatgtcataaacctgatttacaacagcttgctgtattcaagtgatagggtaagcatttttgcggaccaattcacccagtacttgactgccgctttaagtaacccatccgtttgcataactaagatttctttgatcactgcatcttctaaaaactgtttgcctgacccaacaaagaacttgggctggtgcgactttgtgggctgcattcatgatattttccaagataacgccgaagctttcccagaaagaacttgtgtggtagaaactccagcattaaagtcagacaagtcgcgctcttttacttatcaagatatcaaccgcacttctaatatagtcgctcattacttaatcgagacaggcatcaaaagaggtgatgtcgtgatgatttactcttcaagaggtgtcgatctaatggtatgtgtgatgggtgtcttgaaagctggtgcaactttctctgtcattgaccctgcataccccccagctagacaaacagtttacctaggtgtagctaaaccccgtgggttgattgttattagaagtgctggccaattggaccaatttgtggaggattacatcaaggatgaactggacatcgtgtctagaattgactctattgctattcaagagaatggtgccattgaaggtgggaaatttaatgagagtggagacgttttagccgcatacgaacatttaaaggataccagatcaggtgtggtggtaggtccagactccaacccaacattgtcctttacttcaggctctgaaggtattcctaaaggtgttcttggtagacatttctccttggcttactatttcaattggatgtccaaacagttcaacttatcacaaaacgataagtttacaatgttaagtggtattgcacatgatccaatccaaagagatatgtttaccccattatttttaggtgcccaattatatgttcctacgcaagacgatataggtacaccaggtcgtttagctgaatggatgggtaagtacggatgtactgtgacccatttgacaccagccatgggccaattgcttactgctcaggcaacaactttgttccccgaattgcatcacgcattttttgtcggtgacattttgacaaaacgtgattgtttgaggttacaaaccttggctgaaaattgtcgtattgttaatatgtatggtacaactgaaacgcagcgagctgtttcgtactttgaagtcaaatcaagaaatgatgatccaaactttttgaagaaattgaaagatgttatgccagcgggaaaaggtatgttaaatgtccaattattagttgtcaataggaacgatcgtactcaaatatgtggtattggtgaaattggtgaaatttatgttcgtgctggtggtctagctgaaggctatagaggtttgccagacttgaataaagaaaaatttgtggacaactggtttgttgagaaaaaccactggaacttcctagataagaatagtggtgaaccttggagacaattctggttgggcccaagagacagattatacagaaccggtgacttgggtcgttatttaccaaacggtgactgtgaatgttgcggcagagctgatgatcaagttaaaattcgtggatttagaattgaactaggagaaatagatacacatatctctcaacatcccttagtgagagaaaatattactttggttcgcaaaaatgcagataatgaaccaactttgattacatttatggtcccaagattcgataaaccagaagagctatctaaatttcaaagcgatattccaagccaagttgcatctgacccaatagttaaaggcttagttggttatcatctgttggccaaggatatcaagactttcttaaagaaaagacttgccagttacgctatgccttccctaattgttgtcttggatagtttaccattgaatccaaatggtaaagtggacaagcccaaacttcagttcccaacccctaaacaactaaattcggttgcagagaacactgtttctgaaattgatgactctgaatttaccgatgtagaacgtaaaattagagacttatggttggagatattacctaccaagccagcttctgtatcgcccgatgattcctttttcgacttgggtggccattctatcttggctactaagatgattttcaccttgaagaaaaagttgcagattgatttaccattggggacaatttttaaatatccaactataagggcttttgctgcagaaattagtagaatcaaaacatctgatgggtcatctcaagaagaaccaaaggcaaccgctactgcagattattcggaagatgctaaaaaattagttgaaactctaccaagctcttatccatcacgtgaaccttttattgaacctaataatgctgagggtaaaaccactattaatgtgttcgtaactggtgtaactggcttcttaggttcttatatcctagcagatttgctgaaccgttctttaaagagttataacttcagagtcttagctcatgtgagggctaaagatgagaagtcagcattcgaaagattacacaaagcaggtgtcacatacggaacctggaatgacaaattttcctccagtattgaaattgtgttaggtgatttatcaaaaaaacaattcggactttccgatgagaaatggacagatttggcaaacacagttgatgtaatcattcataatggtgctttagttcactgggtttatccatacgccaaactaagggacgctaatgtcatttccacgattaatgtgatgagtttagcggccgtcgggaagccaaagttttttgatttcgtttcttccacttccacgcttgatactgagtatttctacaagctttctgataaacttgtcagtcaaggaaaatctggtattttagaatcggatgatttgatggaatctgcaagtgggctcggtggtggatatggccaatctaaatgggctgcggaatacctcattagacgcgcaggtgaaagagggctacgtgggtgtattgtcagaccaggttacgtaacaggtgcatctacaaacggttcctcaaacacagatgatttcttattgagatttttgaaaggctcagttcaactgggcaagattccaaatatcagcaacaccgtaaatatggttccagtagatcatgtggcccgtgttgtcgttgccacttctttgaacccaccaaaggatagtgagttaactgtggcacaagtcacaggtcatccaagaatcttgttcaaagattacttatatactctgcacgattatggttatgatgttgatgttgaagactattctgactggaaaaagtcgttggaagcatctgttattgacagaaatgaagataatgcattgtatcctttgttacacatggtcttagacaaccttcctcaaagcaccaaggctccagaattggacgatagaaacgctgtggtatccttgaagaaagacatagcatgggcaggtgctgattggtctgatggaatgggaattacatcggaaaatgttggtatttacattgcatttttaaacgtagttggatttttacctccaccaactcacaacgacaaaatcccattaccaagtatagaactaactcaagcacaaatcagcctggtcgcttcaggggctggtgcacgtggaagttctgcagccgcttaa

SEQ ID NO: 177 - DNA, 2046 bp, Saccharomyces pastorianus
atggcacaattctccgatattgataaacttgctgtttccactttaagactactttccgtagaccaagtggagagcgcacaatccggtcatccaggtgcacctctggggttggcgcctgtggcccatgtaattttcaagcaacttcgttgtaaccctgacaaccagcactggatcaatagggacaggtttgtcctatcgaacggtcattcatgtgctcttctgtactctatgctgcacctcttaggatacgactacaccattgaagacttgaggaaattcagagaggtgaattcgaagactccaggacatcctgagtttcattcgcctggagtggaagtttcctctggacctttgggtcaaggtgtttctaacgctgttggtatggctattgcacaggctaacttcgcggctacctacaacgagcaaggcttccccatatccgattcgtatacgtttgcgattgtgggagacggttgcttacaggaaggtgttgcttcagaaacttcttccttagccggtcatttgaaactgggtaatctgattacgttttacgataacaatagcattaccattgacggtaagatttcttactctttcgacgaagacgttttgaaaagatacgaggcttatggttgggaggtcatggaagtcgacaagggtgatgacgacatggagtccatttccagcgctctggaaaaggcgaagctatctaaggataagcctactataatcaaagtcaccactacgattggatatgggtctttgcaacagggttccgaaagtgtccacggatctgccttgaaaccagatgatgttaaacaattgaagcaaaggtgggggttcgacccaagcaaatcgtttgtggtgccccaggaagtgtacgactactacaaaaagactatagtagagcctggtcaaaaactcaatgaagaatgggacaagatgtttgaagaatacaaaaccaaattccccgaaaagggtaaggaactgcaaaggagattggatggcgagttgccgcaaggttgggagaagcacttgcccagctttaccccgaatgatgaagccttggctacaagaaaggcatcccaacaggtattgactgacctagttcaagtgctacctgagctgattggtggttctgctgatttaacaccttcgaacctaacgagatgggaaggtgcggtagacttccagcctccaattacccaacttggtaattacgctgggaggtacataagatacggtgttagagagcacggtatgggcgccataatgaacggtatttccgcctttggtgctaactacaagccatacggtggcactttcttaaactttgtctcttatgctgccggtgccgttagattagccgccctgtctggtaatcctgttatttgggtggcaacgcatgattctattgggctgggtgaagacggtcccacccatcaacccattgaaaccctagcccacttgagagctattcccaacatgcatgtttggagaccagctgatggtaacgaaacttccgccgcatactattccgccatcaaatcgaagcgcacaccatctgtagtggccttgtcaagacaaactctcccccaattagaacattcctcttttgaaaaggctttgaagggtggttatgtggtccatgacattgaaaatccggatatcattctagcgtcaactggttcagaggtctccatctctatagacgcggctaagcaattatatgagactaaaaagattaaggcaagagttgtctccatgcctgacttttacacgtttgatagacagagcgaagaatatagattctctatcttgccagatggcgttccaattatgtcctttgaagtgctagccaccgcaagttgggggaagtatgcccatcaatccttcggtcttgatgagtttggccgttcgggtaaggggcctgatatctacaaactttttgattttacagcaactggtgttgcaaccagagctgaaaagacaatcaactactacaaaggaaaacaactactctcacccatgggtagagctttttaa

SEQ ID NO: 178 - DNA, 489 bp, Saccharomyces pastorianus
atgtcttcctctcaggcagtcagagattcggccaagaaattagttaatttactagagaaatatccaaaggatcgtatacctcatttagtcacattcaaggaggtacaggtatcgaggtttagacgtgtagcaggtctaccaagtgtggacgataagggaaaatctgtgaaagataagaagccgtcgctagatgaaataaaaagcattatcaatagaacttcggggccgctggggcttaataaagagacgttagccaggattcaaaatagcgtatccaatgaaaaatttacggaggaaagtatcaatcagcaaatccatgctctaagcactataatgagcaataagttcagaaactattataatgttggcgataaactctacaaacctgcgggcaatccccgttattatcagcggttgatagatgaaattgaaggtaagaaaaatgaaaatatttttactgcgatgagaactgtattatttggtaaatag

SEQ ID NO: 179 - DNA, 2004 bp, Saccharomyces pastorianus
atgagtgtggaagatattaaaaaggctagagccgctgttccattcagcagagaacagctcgaaagtattttgagagggagattcttttatgccccagcttttgacttgtacggtggtgtttccggtttgtacgactatggtccacctggttgtgctttccaaaacaatatcattgatgcgtggagaaagcactttatcctagaagaggacatgttagaagttgactgtactatgttgaccccatatgaagtgttgaagacatctggtcatgttgataagttttctgactggatgtgtagagatttaaagaccggtgaaatcttcagagctgaccatttggtggaagaggttttggaagcccgtttaaaaggtgatcaggaagctagaggcgtagtcgaagaccccaatgccgctgccaaggatgacgctgaaaagaagaaaagaaagaagaaggttaagcaaatcaaggctgttaaattagatgatgacgttgtcaaagaatacgaagaaactttggccaagattgacggttactctggtccagaattaggcgatttgatggaaaaatacgatattggtaacccagtcactggtgagactttagaaccaccaaaagctttcaacttgatgtttgaaactgctatcggcccatctgggcaattgaagggttacttgagaccagaaactgcccaaggtcaatttttgaatttcaacaaattgttagaatttaacaatagtaagactccttttgcatctgcttctatcggtaaatcattcagaaatgaaatttctccaagagctggtctattgagagtccgtgaatttttgatggctgaaatcgaacatttcgttgatccattggataaatcccatccaaaattcaatgaaatcaaagacattaagctttcctttttaccccgtgacgtccaagaagctggttctactgaaccaattgtaaagacaattggtgaagccgttgcttcaaggatggttgataatgaaactttgggttactttattgctagaatttaccaattcttaatgaaaattggtgttgacgactccaaattaagattccgtcaacatatgggcaatgaaatggcacattatgctgccgactgttgggatggtgaactgaaaacctcctacggctggattgaatgtgttggttgcgccgacagatctgcctatgatttgaccgttcactccaaaaagaccaaagaaaaaatggtcgttagacaaaaattagaaaacccaattgaagtcacaaaatgggagatcgatttgacaaaaaaactatttggtccaaaattcagaaaagatgcaccaaaggttgaatcacacttattgaatatgtcgcaagatgatctagccgccaaagctgcatctttaaaggccgatggtaagtttactgtaaaagtcgacggcgttgatggcgaagtcgagttggatgacaaattggttaagattgaacagagaacaaaggttgaacacgtcagagaatacgttccaagtgttattgagccatctttcggtattggccgtattatttactccgtttttgaacattctttctggaacagacctgaagacaatgccagaggtgtcctttctttcccacctttagttgcccctacaaaggtcttgctggttcccctatccaatcataaagatttagttcctgttaccaccgaagtttccaagattttgagaaaatctcaaattcctttcaagattgatgactctggtgtttccattggtaaaagatatgcccgtaacgatgaattaggtaccccattcggtgtcaccattgacttcgaatcagctaaggatcgttccgtcactttgagagaaagagattctaccaagcaagttagaggttctgttgaagatgtgattgaagccatccgtaatatcacttacaatggtatatcttgggaagaaggtaccaagaaattggctccttttgtatctcaagcagaacctgaaactgaaactgagtaa

SEQ ID NO: 180 - DNA, 1554 bp, Saccharomyces pastorianus
atggttttgtctgataaagagttgtttgacataaacaagagagctgtggagcaaggcttcaaagtgaaacctagattgaactataatacggtcagtggtgtgaacggtccattggtcattttggaaaaagtcaagttcccacgttacaatgaaattgtgaacttgacgttgcccgatgggaccgtcagacaaggtcaagtcctagaaatcagaggtgatagagccattgtgcaagttttcgaagggacttctggtattgatgtcaagaagactactgtggaattcaccggtgaaagtttgagaattcctgtgtctgaagacatgttgggtagaatctttgatgggtctggtagacccattgataatggtcctaaagtgtttgccgaggactatttggacattaacggttcccctatcaacccttatgcccgtatttacccagaagaaatgatttctactggtgtttctgccatcgataccatgaactctattgccagaggtcaaaagattccgattttctctgcatctggtttaccacataacgaaattgctgcgcaaatttgtagacaagctggcttggtgagacccaccaaggacgttcatgatggtcatgaagagaatttctccattgtgtttgctgctatgggtgtgaatttggaaaccgccagatttttcaaacaagatttcgaagaaaatggatctttggaaagaacttcgctgtttttgaatttggccaatgaccctaccatcgaaagaatcatcaccccaagattggccttgaccacggcagagtacttggcttaccaaacggaacgtcatgttttgaccatcctgactgatatgtcgtcgtacgcagacgcgcttagagaggtttccgctgctagagaggaagttccaggtagaagaggttatccaggttacatgtatacagatttgtccacgatttacgaaagagctggtagagtagagggccgtaacgggtccatcacccaaatacctatcttgacgatgcccaacgatgatatcacccatcctatcccggatttgacagggtacattactgaaggccaaatttttgttgatcgtcaactacacaacaagggtatctacccacctatcaacgtcttgccctcattgagtagattaatgaagtccgccatcggtgaaggtatgaccagaaaggatcacggtgacgtgtccaaccaattgtacgccaagtacgctatcggtaaggacgctgccgccatgaaggccgtcgtcggtgaggaagccctttccatcgaagacaaattgtccttggagttcttggaaaagttcgaaaaaactttcatctcgcaaagcgcctacgaggacagaactgttttcgaaagtttggaccaggcatggagtttgctaagaatctaccctaaggagatgttgaatagaatctcccccaagattctcgacgagttttacgatagagccagagacgaagcggacgaagacgaagaagacgcggacgcaagaagctccggtaagaagaaggacgccaacaaaggggaatctctgatctaa

SEQ ID NO: 181 - DNA, 1035 bp, Saccharomyces pastorianus
atgcattgtccgatttgtcatcatagagcgcatgtggtttattgtgcacattgtatcaatacgagccccagtttgctactaaggttaaaattggacttagtttccataaaggatagtaataaggtgctaagtgggaaagtcgaacatatactaaacgaggccatggactatggtcagttgggtactagaacgtcagaaaagaaaaaggatcctctggcgaatagtctcctgaagttggatattttacgaatgaaaaaaaataacaatcggatcaggcataagatcgaacagctaaatgagcgaatccatagtaagagagatcgcatcaacaaattgaaggtggaaatagacagtcacgggcacgccaaggctgaggttcgtgatgataaattgagagaacaagtggaaatcaatgatgctaagagcaagttgaaacagatttccaagatttgtgagtcgaccagagactacaaactgaatctgctaaacgactggtttgtgatccagaaactacaagacaattttcaaataccatttgctattgcgttccaaccgttgatatcattgaaaaactttcagattctacctcttgtggtaacgaatgattccattgataccatgtggaagtacgtcagttttctctccgatattcttttgatcaagctcccctattccaacgataatgaagcacaccccatgctggactcctctgataatatacggacggtagtgcaaagattgatcaggttgataataaatattttacaagtatgtagaaatttgaaactcgtgccctcgacacccatggatataccatggatcctagaccagtacgatgtggatgggctgttctacaacatggtgaagcgaaacaagatgaaatgtaggtccgtttcgctatattggacgtttggaatgctgtattccatggtcctggataacttaaacaggccggaaagaggatatcctacaagacgcaccgcaccggcgccggccctcacgggaccccacgaccgatggtacgtggtaggctaa

SEQ ID NO: 182 - DNA, 1788 bp, Saccharomyces pastorianus
atggccaaagaaggaatgtccgtcgattatgaaaacgacgatgattattttgaatgtagtaagaacaggttcaagacagcgattacgcgaatagacagcgcccagcctagtgaagggtggttggaccctgctcagtcactgaatcatgtaagcacgatacatgaagaaggagacgtacacgtgcatgaggatggaggaacctctactgatgaagattcgaggactcacttgctgttttcgacagaaactcgacgcaagttagagaatagacatgttcaatttattgctatttctggtgtcattggtacggcgctatttgtagccatcgggaaagctttataccgtggaggtcctgcctctttattactggcgtttgctctctggtgtgttcctatactttgcattacagtgtccacggcagaaatggtctgcttctttcctgtgagttctccctttttgaggctggctacgaaatgcggggacgaatcgttggctgtcatggctagttggaatttttggtttctagagtgcgtacagattccatttgaaattgtttctgttaatacgattatacattattggagagacgactattctgctggtatccctcttgccgttcaagtcgtattatacttacttatttctatatgtgcggtcaaatattacggtgaaatggaattttggttagcttcattcaaaatcattctcgctcttggtttatttgtgtttacgtttgttactatgttgggtggtaatcctaaacatgatcgttatgggttccgttattatggtgaaaatccatttaaacaatatttccccgatggtaaagatgtggggaaatcatcgggttatttccaagggtttttggcttgtttgatacaagcatcgtttaccatagcaggtggtgagtatatttccatgttagctggagaagttaaacgaccaagaaaggttttaccaaaggcattcaaacaagtgttcgtgagactaacttttctatttttgggcagttgtctttgcgttggtattgtttgttcaccaaatgatcccgatttaacggcagcaatcaatgaagcaagacctggtgctggttcttcaccttatgtcattgcgatgaataacatgagaattagaattttacctgatattgtcaatattgcgttgataacagcagcattttctgccggtaacgcttacacttactgttcatctagaacgttctacggtatggcattagacggttatgcaccaaagatttttactagatgtaacaagcatggtgtacccatttacgctgtcggtatatctttaatatgggctctagtgagtcttttacaactgaactctaatagtgctgttgtgttgaactggttgattaatttgattaccgcatctcagttaattaattttgtggtgctttgtatcatttacttatttttcagaagaacatacaacatccaacaagattcattgcccaaattgccttttcgttcatggggtcaaccgtacactgctatcattggactggtttcatgcttggcaatgattatgattcagggctataccgtcttctttcctaaattgtggaactcgcaagattttttgttttcatatctaatggtgttcattgatattggtatttatgtgggttataaatttatttggaagcgtggtaaagataaaatcaaggatccctataagattgatttttccaaagagttgatcgaaattgaaaaccatgaaattcaatattttttcgaaaaatttcagtattatactaaagcataa

SEQ ID NO: 183 - DNA, 2493 bp, Saccharomyces pastorianus
atgcatagcaacgtttttgtcggtgtcaaaccagggtttaatcacaaacagcacaataaaggctcacgttttctgggaaacgtaaccagccacacgtcagaagagcctagcaactacgattatgtgttacttcccataacaacgggtaggtacaaggagattgttgggcaggtttttaaagagttccaaaaacagtccaaacagcattggcagccgctccgggtccccgagccccagttgcaggatatctgtatccctcctttcaacgtcaacaagctggatgacgacgacacgccttcctacattggcctgctatcatcttggttggaattggagagtcccgatctagctgtaagagatcttggcctgaaggtccttctgaacgaatgtaaatacgcaaggtttgtcgggatcagaaagctgatattggcacctccgcgcgatctgtccaatctgcaactgtatggacagatgatttatagacttttacagaatcgcattatcttcaccgcgcctgcattgaccatatccatctctttgccgctttacgaggacagcgacccgctggccacttgggaattgtggaatactgtccggaagttgtgcgaataccattcatcattaactgtgtctttggctttgccgagaaccaagacaccttcctttgtgttaaacagatggctcgccgagcccgtttcgtgtcttttggtctcttcgtctattttcgccagtaatcagtatgactatcccgttttgcacaagttcaatcagaacttgattctaaaattccaaaaaattaatggagactcgcaaatcttgggaaatgaactatgcgtgatattacacgggatggagaaatatgccaacgatgtcaagggcggtgaatccgcttatttggagtatgtaaactttttattgaaaaagggcgacaaggccttgaacttcaagggtaaccgtcaactgatgctgcaggaagagtctaggataatgccgcctttgaaaccgcattcagacactctgttgaattccacgtatttgacttttgaaaaagacttggtgaaatacgacctttacgaatctgccatattagaagcgctccaagacctttcatcacgagcgacctttaagaggccattggtcgtcttggtggctggtgctggaagagggcctttggtggatcgaacttttaagaccttatcgatgctatccttggaaaacagggtttcaataattgccattgaaaaaaacccacaggcctatttatatttgcaaaagagaaatttcgattactgggataacaaggtggaattgatcaaggaagacatgaccaaatggcaaactaatgaaccgccggaaagacgtgtccaggtagacctgtgcataagtgaactattgggttcattcggttgtaatgaactatcacccgaatgtctttggtccattgagaaatatcattcccgtaatgatactgtctttataccaagatcatactcttcctatatagctcctgtttcgtcgccattgttctaccagaaactctcaaaagtgaatcggtccttggagtcgccttgggtagtccatagagttccatactgcatactttcgtctaagataaatgaagtttggcgattcgagcaccccatgttcgaaaaggatgttgaccaagtggaggatggcgatgacactgttcggttctctcaaagttcattgagcgagttcaaaatgaagcatcgcggtgaaattcatgggtttatcggattcttcacggtaaccctatataatgatatattcttgtcaactttgcccgatgacagtaccgttcgtttaaaatccaatgaagaaagttccaagtgtgccaggcaagatgaagatttacaactaattaaaaggtgtgatcatacgcccaatatgacctcgtggtctccaataattttccctctaaaacaacctttatcatttgtagacgattctgaactttctgtgttgatgtcacgaattcattcggatacagaacagaaagtttggtatgagtggtctttggaaagtttcatatacctcatgctatcaaattacggttcggcaactgcagcgacaaacatgaccaatcccagatccatagtgacagaaggtactaaaacgtcaaaccataaccgccatttttctgtaacgacgaatcaaaacctggataaccaaatcgatctcgatcaagacgtcgaaaacgaagaagaacaaggatttttgtccaacctggaaactggttggcaaagtgtgcaagatatacacggactcagcgagaccactaggccagatcagctaaactctaccaatagacccatgtttgatctaaaatccagccgcgtgctcgattccactagtggatcaccaagacatgaggatctagaagaggatgctcccgaggtccatgtcagagtcaagaccggtgtttccactctacataatgtttgcggtagggccttttccttaccgttgtaa

SEQ ID NO: 184 - DNA, 426 bp, Saccharomyces pastorianus
atgtaccatcactatcacactttccagggcagaaagctcactgaccaggaaagagctcgcgtgctggagttccaggactccatccactactccccgcggtactcggacgataattatgaatacaggcacgtgatgttgcccaaggccatgctcaaggtcactccatcggactattttaactcggaggtggggaccctgcgcatactgacggaggacgaatggaggggcctgggcataacccagtctttgggttgggagcactacgagtgccatgcgccagaaccgcacattttgctgttcaaaagaccgctgaactacgaggcggagctcagggcagctactgctgctgctcagcagcagcaacagcagcagcagcaagcacaatctatatcgaatgacatgcaggtttcttcacaaatctcctag

SEQ ID NO: 185 - DNA, 540 bp, Saccharomyces pastorianus
atggtcgttttagacagaaagctattagaaaggttaacttctcgtaaggttccattgcaagagctagaagatatggaaaaacgatgctttttagccacattctcacatcaagatgcctttgatttaggaagttatgtaagaaacgcagttaaagagaactttccagaaaagccagttgctattgatatctctctgccaaatggacattgcttatttcgtacagtaacatacggtgggagtgcattggataatgatttttggattcaaagaaagaaaaagacagcaattagattcggacattccagtttctacatgggttgcaagaaaggggataaaacacctgaagaaaaattctttgtagattcaaaggaatacgcctttcacgggggtgctgtcttgatacagtcagaaaaaagtgactacccctacgcctgcttaactattagcggattgaagcaagaagaagaccacctaatggcggttacctctctagttgctttcgccaatgaaagtttagaagaagatctaaatctggactaa

SEQ ID NO: 186 - DNA, 9321 bp, Saccharomyces pastorianus
  modified_base (1462)..(1513): a, c, g, t, unknown, or other
atgagtcaaagtgatccgaaaaataaaccatctcccatggaatgttccctaacgaaacatctttatttcgataggcttttacacattctccctattgaatctaaattgaagacatatgcagatgtggaggcagatcaggttttcaattcgtgtaggtccattattctaaatatagctataacgaaagatttgaatcctatcattaataacacacttaaagtgatcgacgtgattgttcaagatgaagagatcacctctgataacattaccgatgatattgcacactccgtattggttcttttaagactactaagtgatgtttttgagtattactgggaccagaacaacgactttaagaagatcagaaacgataactataaaccaggcttttctagccataggccgaacttccatacgtctagaccaaagcatgcaatgattgatccgactttagccatagcgttattatgccaagtttctaaactgaaattcaatacgagaaccctaaaagtcttgcagaatatgtctcatcatctttatggtaatgccaccattcaaagttctagcattttgcccagttcacaagattttttggaaaagaggaattatccagcatataccgataaaatagatttaacaatagattatattcagaggtttatatctgcttccaaccatgcagagtacactaactgtgtcaagacaaaagttgtagcacctttattaatatcacacacacttactgaattaggcgtcgtacagcacttggatctgtttggttgcacatacttgaccaacaaaaatttgttggcgtacttagatattttgcagcatctatcaagttatatgaaaagaaccatatttcactccctgttgttatattatgcctccaaagctttcctattttggataatggctaggccgaaagaatatgttaaaatctacactaatttagtgtcatccaatgacaataacgcaacatcttcagactcaggtactgagcattctggcttgaatacttccgataaaacatctatatcccaattagtttcacttttgtttgataacgtttactctacttttaatgtatcgtcattattaaccaacgtctacaatgatcatcaccaccatatccatcactcttcctcttcatcaaaaactaatagtaacaacactaacagtccaaactctgtatcaaaatcatcaacaaagcaatcgagtacgaacgtatctggtaatgtttctccgattccgtcatgcacacaaggaaatgatacctcacctacttctcccatggcaacactaagttcacccttgaatcagaatatcatggggtacccattgtctccaatagcctcagcattagtggacccaagcatcaacacatcgactacaactgcggtattaaatagaagtactgataccaccacagcaaacaatagtaataataataacaataacnnnnnnnnnnnnnnnnnnnnnnnnnnnnnnnnnnnnnnnnnnnnnnnnnnnntcaataatattccacaccacattttttccttagatgatatttcatcgttcaattcaagtagaaaatcgcttaatctcgacgacaacaactcctcttttctttgggataattcacaaaagttaaatgcattaatgggaaatacgaatgtacatccagctgtgaataatccacagtcttcgaacgcacattgttctttaaactatatggaaaatatcatggaattatattcaaattatacgggatcggaattgtcttctcatactgcagtattaaggtttctgattgtcctgactttattggacagtgaagtgtacgatgagatgaattcaaactcatatagaaaaatatcggaaccaattttaaatgctaattctaaggattccagtagttcaggctggggctcagcatcgaaaaatccaagtattaagcatcttactcatggtttaaagaaacttactttacaacaaggtaaaaaacgtaatgtcaagtttttgacatatttaatgaaaaatttgaatggcggacaattcgtttcagatgtatcgctaattgattctatcagatctgttttattcttgatgacaatgacttcttctatatcccaaattgactcaaatattagttccgtcgttttttcgaagaggctatttaacctgttgggtcaaaacttagaggttggttcaaattggaattctgcaacatcgaacactttcattacccactgtaccgaaaggaatcctgttattcataggcgtttacaattggagttttttgcaagtggtctacaattagatcctgatttatttttgagacatttacaattggaaaaggaactagctcatatagacctacctaaaatatcgttatacaccgaagggttcagggtgttttttcacctagtaagtaccaaaaaattacatgaagatattgcagaaaagacttctgctcctctgaaaaggttgttttgcatcatcgcggatattttgttgaaggcaaccccttattttgatgacaatgtgactagaattatcggttcaatcttagatggacatattttagatcaattcgatgctgctagaacacttaccaaggacgaccgtgtcagttatgatacttctgccagcattcagactgaaccatccaacattaatcatgatttgtcagatgtttcattggtctcttccctttcacaatcaccactatctttcaactcaggcactaatattgctaacgcacgatcctgggaaattcaatcaattttgccaactttatcaaacagatcaagcgcttctgatttaagtttgcctaatgttttgacaaattctttggaagctcaacaaagcaataatgcagttccgttatctcagaggctatctggagtgtctaccagtaagagatacgcttcgccaaacgattcagaaagatcacgacaaagtccatattcttctcccccgcaattacaacaaggtgatttgccttctcctctctcgattctttctactggagctggatttgcttcaagtcattcaatggcaacaactcccacgattttgaaaaacattaaatctccaaaacctaacaggtcaaagaaaattgcagatgataaacaattaaaacaacctatgcatactaaaatagtgcttagtgataatgatgaagcacgaagaattatgatgaatatttttagcatttttaaaagaatgacaaattggtttattcgtccaaatgctaacgctgaatttccaaagacctttacagacattataaagccactatttgtggctatactagattcaaatcaaagactacaagttactgcacaagcctttattgaaattccgttaagttatatagccgctttcgaagatatcgataatgagcttgacccaaaagtgttaaatgaccactacttgttatgtacatacgctataaccttattcgcatcctcgctatttgatctgaagctagaaaatggcaaaagagaaatgttactaggcattattgtcaaatttcaacaagttcgttcgtatctatcaaatttagcacaaaaacacaatttggtccaggcagttattacgacggaaagattaacgttgcccttactagttggtgctattggaagcggaatctttatttcactatattgtagtcgtggaaatacaccgcgtttattgaaggtatcgtgttgtgaatttttacactccctgagattttatcaaaaagttgtagggccattagacgagtactccatttacaatattgattttatagattctatggcccaagacaattttactgcctcagggtcagtcgctttccaacgtcgtttaaggaataacattttgacttacattaaaggatctgattcgatccttctggacgcgatggacgtaatttataagaaatggttttacttcagttgttcaaaagctcttacgcaggaagaattggttgatttcagaagccttgcaggcattttggcatcgatgtcaggcattctttctgacatgcgagagtttgagaaaaataaaaatgccacgactaataatgaaaccagatcatcatttgacttgcgaaatcctgtttatgatatacacaacgaacttaaatttgaacttaccaaaaaaatgaattactttgtttcaaaacaatgccaatggttgaataattcaaatttgttaacgagagaaaattcaagagatattttgagcactgaattgcatccgctttcttttgacttattatttgataatttgagagtaaagataaatgaattaacatcagttgatctttcgaagccttatgaggattcatctttcgtcttattagaacaaatcataatcataataagaacgatattaaagagggacgacgacgaaaaaacaatgctgctctttctcaacgacttacttgatgccgttactaaactaactgaaatagttgaaaaaatctcggtgctgtcatcaaagtattataaggggattattcaaatgtctaaaatgtttagagcatttgagcactctgaatcaaacttgggtatctcaaaccatttccacttgaagaatgagtggctgaaatcagttattggttggttcaaattgtccatcaacaaagactatgattttgagaatttgtcgaaaccactaagagagatggatctacaaaagagggatgaggattttctttatatcgacacctctatagaatccgcaaaagcattggcatatctgacacgtaacgttccgctagaagttccgccctcgagttcaaaagaagactggaatagatcctccacaatattatttggtaaccatttcactatactgttaaaaggtttagaaaaaagtgcagacctgaaccagtttccggtttcattgaggcataagataagtatacttaacgaaaatgtaatcattgctctaacaaacttatctaatgctaacgtcgatgtctccttaaagtttactttaccaatgggttattctacaaataaggatatcagaattgcttttttgagagttttcattgatattgtgtcaaattatccagttaaccccgagaagcatgaaatggacaagacactggcggtggacgatacgctgagatatgtgattaagaatccaatactcgcgttttttggcagtttagcttgtccacccgccgatgtagatctatacgctggggggttcttgaatgcttttgagacgcgaaatgcatcacatatcctcgtcaccgaacttcttagccaagaaattaaacgggccgcaaagtcagatgatatactgagaagaaacagttgtgcaaccagagtgttatcgctttatgccaggtctagaggtaacaagtatttgataaaaactttaagacctgtcctgcaagaaatagtcgaccataaggagtcgtttgaaattgaaaagatgaaagctgaatccaaaaactctgaggatatgttagatttgttcgaaaaaagtatgacaaaattaattgatgcaatcacaaattctatcggagatttcccgatagagttaatcgatgtctgtaaaactatttatgatgttacaagtgtcaatttccctgactacgcgtacattgcggtaggatcttttgtatttttgagatttatcgggcccgctttggtaagccctgattcagaaaatatcattattgtcacgcatgcccatgacaggaagccatttatcacattagctaaagttatccaaagtctagccaatggtagagaaaatatgtttaaaagtgatattttagcttcaaaagaggaatttttaaaggtctgtagtgataagatattcggattcttgtcaaaattatgcaagatacctactgataactttaccgttaatgtgagaaaagatcccacgccgataagttttgactattcttttctgcacaagttcctttatcttaacgatctcagcattcgaaaagaaatcatcaaagaatcaaatttacctggtgagttcaacttcttaaaggaaaccgctatattcaacaatagaatacttggagtaatgggccagccacagatggaaatcaaaaatgaaattccccctttcgtcgtcgaaaatcgagagaaataccccttattatatgaatttatgagtcggtatgcttttaaaaaagtggatttaaatgaagaagaagacgatgcaccatttgtgcatgaatcgatgacattggatggtatgcaaattatagttgtaacattcacaaattcccagtacaataatgtcgtgatggatttgctggtttataaagtattgcaaatatatgcgagaatgtggtcaacaaagcactatgtcattatcgattgtacgacgttttatagtggacaagctaattttcaaaagctaactacattattttttagtctaataccagaacaagcatcaaataactgtatgggatgctattatttcaatgtcaataaagtatttatggaccagtggaccgcatcgtatacggtagaaaacccctatttaatgggtgatattccccattgtttcatcaatagtagtagcgatcaaaatctgataaaatcattaggattgagtggaaaaagtactgaagttttaaaggatgtacgagttactttgcatgaaattactctttacgataaggaaaagaagaaattttgccctgtttcgttaaaaataggaaacaagtacttccaagtcctccacgaaattcctcagttgtacaaagctatggaccattcgttaagcgttaaatttaacaatgtttataagatatcagatttactttcagttgatgtctctagtactactggtgtttcttcagaatttactttaactttcgacaatgaagagaaattagtcttctgtagccccaagttcctagaaattgtgaaaatgttttactatgcccaattgaagatggaagaagaatttggcacagacttttcaaatgacgtatcactttcattgtcttcttctgcagttaacacttctgaccctaatgtgaaagaagtcggtgaaattatatcacatttatcactggtaatccttgtaggtctattcaacgaggacgatctcgtcaagaatatatcttacaatcttcttgtggcaacacaagaagcattcggcttggattttgggactagacttcacaaatccccagaaatatatgtgccagacgataccactacgttcttggctctaatattcaaagccttttcggaatcatcgaccgagttaactccatatatatggaagtatatgctggaaggtcttgaaaataatgtaattcctcaagaacatataccaacggttgtttcttcgctatcatattgggtgccaaacttatatgaacatgtatatttggcaaatgacgaagaaggtccagagacaatctcacgtataatttacagtttgatcagattgacggtaaaagagccaaattttacgacagcttaccttcagcaaatctggtttttactggctttggatggtcgtctcacaaatatcattgttgaagaaatagtaagccatgcgctggatagagattctgaaaacagggactggatgaaagccgtctcgatactaaccagttttccaacaacagagatagcttgccaagtgatagagaaattaatcgatatgatcaagtctttcttaccctctcttgtggtggaggcttcctcgcatagttggtcggagcttactattttatcgaaaatcagcgtttcgatatttttcgagtcaccgttactttcgcagatgtatttgccggaaattctttttgtcgtgtctttgttaatcgatgttggtcccactgaaatacgagtttcgttgtatgagctattgatgaatgtttgccactctttaaccaataatgaatcgttgcctgatggcaacagaaagaatctagatatggtctgcgcaacttttgcccgtcagaagttgaattttgtttctggttttagccaaggaaagggcaaaattttgccaaacttcaatgcctcctctttctcaagtaagttcgggacattagaccttttcacacaaaacattatgttactgatgaaatatggttctatttctgaaagcgcacaatgggaaactaagtataagaagtatttgatggattcgatttttggtcatcgatcgttcttctctgcgagagccatgatgattttgggtattatgagcaaatcgcacacatctctttttctttgtaaagaactcctggtggagactatgaaagttttcgcacagccaattgttgacgatgagcaaatgttcattattatagcgcatatcttcacatatagcaagatcgttgaaggactagatcccacttcagatttaatgaaagagctcttttggctggctaccatatgtgttgaatcttcccacccgttattatttgaaggaggtcttctgtttatggtgagctgtttgaagcaactgtatacaatacatttacaacttgattttaatggcaaatctttagcaaggaaattaatggaatcgagaaaatttgctgccactcttcttgtagagttagagtcatacaatggatgcatttggaacgaagacaattttccacatattatccttggattcattgcaaatggtttgtctatccctgttgtgaaagcagccgcgttagattgtttacaagttcttttcaagaatacatattatgaaagaaaatccgatccaaaatcttcagattatctttgttacctctttctgctgcatttggtattgagtcctgaacaactatctactttgctacttgaaatcggtttcgaagatgagttggtacctttaaataattcacttcaaatgccattaactttgatcaactggctaagctcagactcagagaagtctagtatagctttatatcaaggagctcttgtgtttagctgtgtcatgtcagatgagccatgcaagtatcgttttgccgtactgttaaagtacttactcaaagttaaccctgtttgtgtgttcagattttacacgttaacaaggaaagagcttagaaggctatcgacattagaacagtcgtcagacgcggtcgccctctctttcgaaatcatcagcctacttgtcacacatagcgagttcaactacctggaaaagtttaacgtcgaaatgacagacctcttgaaaaaaagaggtttgtcagttataaaaccgctcgatatttttgatcaagaacatgttgataagcttaagggagagggtgaacaccaagtggcaatttatgaaaggaaaagattagcaacgatgataatagcaagaatgacgtgcacctag

SEQ ID NO: 187 - DNA, 1014 bp, Saccharomyces pastorianus
atgcaatccaggagatcaaagagcatcactggcaagagaaagcaagtaggaaacagtgtggcgagggtgatcaagccgcaaaagacgagaaagataatacgaagattccaccatttaattaacaaacgagaatctatatgccagtttttatgtcttacggagggtttagatgaggccaatgagaagaaaaatgatacgattatcttagccagcactaagggtaatgcaaatctaagcaagtattatgaagacggcaaatcacaagccttcaatgaagttatggaagcacaactgttaaagttacattccttggtcaataatgaaacaaactcgaaagaggcatgtgatcttgctacaatgtacacattacttggttatataatgaatcaaatcgatgcgctgggcggattggaaacttatcaaattgccagtcaaaatggacagttgaagggacgtggaggagacacatccaaattactcgagaaatggacccgacccctgttaggaaaccgttctggggccatcgcgttggaaattggttcgctaagttcagaaaaccgtatatcacagtgtgggctctttcgagaggttgttcgtatagatttacaaaaccacgaaggcgttgcaaagcaagacttcatggaaagaccgctaccggaaagcgaaaacgatagattcgacttgatatcctgctccctagtcctgaattttgtcaagaaccacaaggaccgtggtgcgatgtgccaccgcatgattgagttcctgaagccacaaggctacatctttatcgttcttccacaagcctgcgtggcgcactcaaggtattgcaacgaatcactgctacagaagctcttcgcatcgattgggctcatactgctaaacagccaccagagcgacaaactatactattgcctgtaccagttgcagaaggctccatcacagctcaagggcttttcaaagagagttaaaatcaacgatggccctgggctgaacaattttggcattaccctctga

SEQ ID NO: 188 - DNA, 96 bp, Saccharomyces pastorianus
atgagcccaatcgatgcgaagagcttctgtagcagtgattcgttgcaataccttgagtgcgccacgcaggcttgtggaagaacgataaagatgtag

SEQ ID NO: 189 - DNA, 2379 bp, Saccharomyces pastorianus
atgggtaggaaaagactttctcaaaagaaaaagcctgctgcaaagccacaggaaatgatcgtagatgaatcaaaactaaattggaaacctgtagaagttccagatactctggatgattttggtgggttttatggcttagaagaaatcgatggtgtggatgtcaaaatagtcaacggtaaagtaaattttgtcgctagaaatgattcaaaagtggtcaaagataactctaaagaaaaaactgagactaaaaaggtaccagatgatactcaatctgtatcaagtcctgttttaagttcagattcagaatccgagctcctggaattcaagaacttggatgactttgaagaaggagagttgagtgcagcttcgtactcctcctctgacgaagatgaacaaaatgaagaaaaggatgctaattcaaatgatgacaacaaggacgaggatgaggataagaaggacgtggatgagaaggatgaggatgaagatgaggatgaagatgtcttgaaggaaaatgtcttcaaccaaaacattaatattgatgatatttctcctgtcaacctaccagaatggacaaagcttgctcctctatcaatgacgactttacagagtttacagaagttaaatttcctcagaccaacagaaattcaaaaaaaatctattccggtcattttgaaaggtaaagatgtcatgggtaaagcctctacaggttcaggtaagacattggcctatggtattccaattgtagagcaactggttactaatttttctcagaaaaacaaaaaacctatatcgttaatcttcacaccaacaagagaactagcgcatcaagtgactgaccacttgaagaaaatttctgaaccggtcctagaaaaatcccaatactctatattatctttaactggtggtctttctattcaaaagcaacagcgtctactaaagtacgacaatagtggtcaaattgttattgcaacgccaggtagatttttagaactgttggaaaaagacgccgacttaattaaaagattctcccaaattgacacattaattcttgatgaagctgataggttgttacaagacggtcattttgacgaattcgaaaaaattattaaatatttatcagtggaaaggaagaaaagcaaaataaaaaattctgaaaatgataacgtgttttggcaaactttaattttttctgcaactttctccatcgatctgttcgataaactatcttcgtctcataaggctagggaccagaaattcaaaaacaatgaagatgaattgaatgccgtaataaaccatttgatgaacaaagttcaattcaactcaaaaccagtgataatagacgcaaatccagagtcgaaggttagctcacaaatcaaagaatctctgattgaatgccctccgctagagcgtgacttgtattgttattactttttaacaatgtttccaggtacaaccttaatcttttgtagtgctattgattctgtgaagaaactgaccgtatacttaaacaatttaaggattccagctttccaaattcactcttcgatgactcaaaagaatcgtttgaaaaacttagaaaggtttaaactacagagtgctaaacaaaagacaataaatcattcaaatcctgattctgttcaactctccacagtgttgattgcaagtgatgttgctgcaagaggtctggacattcctggtgtccagcacgttatccattaccatttaccaagatctaccgatatttatattcatagatcgggcagaactgcaagagcgggctctgagggtgtttctataatgatttgttcaccacaagaatccatgggcccgttaagaaaactaagaaagacactggctgcaaaaaacggcgtttcagcagattttaatactaagccaacgagtagaaaggctatcaaatggcagaatactgtgcccttgttaccaatcgaaactgatattgtttcccaattaagagaaagaagtagattatctggtgaattggctgatcatgaaatagcgtcaaactccttgagaaaagatgacaattggttgaagaaagcggccgatgagttaggtattgatgtcgattctgatgatgatgacatatcaaaaagtaatacagactctttcttattaaagaataaaaataggaaaatacaaaagactataaataaggataaagtgagagcaatgaaagctgaattaaacgacatactatcagagcctatacgtaaagataggagacaaaaatatttaacaggtgggttagtaaatctggctgataatctggtcaaaaagagaggtcataatactatcattggctatgaaaggatggatgctttagaaacattaaaaaaaaagaaaaagggaaataattaa

SEQ ID NO: 190 - DNA, 1314 bp, Saccharomyces pastorianus
atggataacgaggttgagaaaaatattgaaatttggaaggtcaagaaattggttcaagctttagaaaaagctagaggtaatggtacttctatgatttctttggttattcctcctaaaggacaaatctcactttaccaaaaaatgttgacagatgaatacggtactgcgtcaaatattaaatccagagttaatcgtctttccgtcctatctgctattacttccactcaacaaaagttgaagctgtataacaccttacccaagaacggtctggttttgtattgtggtgacatgatcactgaagatggtaaagaaaagaaggttacttttgacattgaaccatacaaacctatcaacacaacattatatatgtgtgataataagtttcatacagaagttctttccgaattactgcaagcagatgataagtttggttttatagtaatggacggtcaaggtactttgtttggttccgtttctggtaacacgaggactgttttgcataaatttactgtcgatttgccaaaaaagcatggtagaggtggtcaatctgctcttcgttttgctcgtttaagagaagaaaagagacataactacgtcagaaaagtcgctgaagttgctgttcaaaatttcatcaccaatgacaaagttaacgtgaaaggtttaatcttggccggttccgccgatttcaaaaccgatttagccaaatccgaactatttgatccaagattggcgtgtaaagttatttccattgtagatgtttcgtatggtggtgaaaatggtttcaaccaagctatcgaactatctgcagaagctttagccaatgttaaatacgtccaagaaaagaaactactggaagcatactttgacgaaatttctcaagatacaggtaaattctgttacggtatagatgacactttaaaggctttagatttgggtgcagtggagaagctaattgttttcgaaaatttagaaactattagatacacattcaaagacgctgaagacaatgaggtcataaaatttgccgaaccagaagccaaggacaagtcgtacgccattgacaaagccacaggacaagaaatggatgctgtcactgaagaacctttgattgaatggctagctgctaactacaagagcttcggtgccactttagaatttatcacagataagtcttctgaaggtgcgcaattcgtgaccgggtttggtggtattggtgcaatgctacgttataaggttaactttgagcaactacttgatgaatctgaagatgaatattacgatgaagatgatggatctgattatgatttcatttaa

SEQ ID NO: 191 - DNA, 1056 bp, Saccharomyces pastorianus
atgtcttctcaacccatcccggaaacccaaaaggcaatcgttttttatgaaacagatggtaagctggaatacaaggacgttacagtcccagagcctaaggccaatgaaattctagttcacgtcaagtactccggtgtttgtcatagcgatttacacgcatggcacggcgattggccattccaattgaaatttccattgattggtgggcatgagggtgcgggtgttgttgttaagctgggctccaacgtcaagggctggaaagtcggtgatttggctggtatcaaatggttaaatggtacgtgtatgtcctgtgaatattgtgaagttggtaacgaatctcaatgtccccatttggatggtactggcttcactcacgatggtacttttcaagagtatgcaaccgccgatgctgttcaagctgctcacatcccaccgaacgttgacctagcggaagttgccccaattttgtgtgcagggattacagtatataaggcattgaaaagagccaatctaattcccggtcaatgggttactatttctggtgcttgcggaggattaggctctttggccatccaatatgctttggctatgggttacagggttattggtattgacggtggcgaagctaaacaacagctatttaaagaactaggtggagaaatatttatcgattttacaaaagaaaaggatatcgttggtgccgtcatcaaagccactgacggcggttcccatgggattattaacgtgtctgtttctgaagcagccatcgaagcttcaacgagatactgtagacccaatggtactgttgtcttggttggtatgccggctcatgcctattgcaaatctgacgtcttcaatcaagttgttaaatccatttccattgtcggatcttgcgttggtaacagagctgacacaagggaagctttggactttttcgccagaggattgattaaatctccaattcacttggctagcctatctgatgttccagagatttttgaaaagatggaaaagggtgaaatcgttggcagatatgttattgacacttctaaataa

SEQ ID NO: 192 - DNA, 837 bp, Saccharomyces pastorianus
atgttttcgaggcttgctttttttcgaagggcaactcttgctcctgcttctatgagaatgtgttttaggaccatatatcaaaaagcagagagtgacttgcccaagaggatcgtccccaaattgccaacattttactcggcgaaccctaaccatgaagaccgtattaatcgactggaaaggcttctgagaaaattcgtaaaattaccatctcagaacaacaatgaagtacaacaaacaaaagctccttggatttcttttgacgaatatgctctaataggtgggggtacgagattaaagcccacccaatacactcaattactgtacatgttgaacaagctacacaatgttgaccctcaactgactaatgaagaaatcacatccgaactgtcccaatattacaagaaaagctccatcctttcaaatcagatcaaggtaaaaaccttggatgagttcggaagaagtgtagccattgggaaaaggaaaagctctacttctaaagtctatgtcgttaggggaacaggtgagatattagtgaatagtcgtcaattaaacaattacttccttaagatgaaagatagagaatccatcatgtatccactccaagtgatcgaatccgtcgaaaagtacaacgtttttgcaacaacatctggaggcgggcctacggggcaagcagaatcgatcatgcatgccattgctaaagctttggtcgttttcaatccgttattgaagtcgagattacataaagctggtgttctatcaagggattacagacacgtggagagaaaaaaaccagggaaaaagaaggcaagaaaaatgccaacatgggtcaagagatag

SEQ ID NO: 193 - DNA, 924 bp, Saccharomyces pastorianus
atgcagctggttccaaccatttttaattctaagaatataagcggaattgcagggtccatatcgatatcctgctggattgttgtatttgtaccacaaatctatgaaaactttcgaaggaaatctgcagaaggattatcacttcttttcatcgtgttatggctattaggtgatatatttaacgtcatcggggctatgatgcagaacttgctgccaaccatgatagttttggccgcttattatacattagcagacttggttttactgatacagtgcatgtggtatgttaaggacaagaagggccttttagagcaagttaaaaaaaatgtcgatcctgtacatctatctccagcaaacccgatagacgagtctgttttacaagacgtttttaacgagtatgagccacttcttccaagaatagaggaagaggataatcaatcatacaactcgctcgagcttggggcagatatagttgcaaaaaaaaaagaaaatatttttaatgaccttctgattgtatcaggtgtaatatttgccgggtttttttcgtggtacatatcctactgttctgggctgactaaaggcccttccgaaaaggatcctaacttagcaaaaattaatctccctgcacaaattttgggatatttgagtgcggtactatacttgggctctagggttcctcaaattattctcaacttcaaaagaaaatcctgcgacggtgtgtcgtttctattctttttatttgcatgtttggggaatactgcattcataatatctgttatttcgatgtcagtagaccctaaataccttattttaaacgcatcttggcttatcggtagcgcaggtacgttgttgatggactttacggttttcatccagttcttcctttatgcaagacctaaatacgagaaactaactatagatgattaa

SEQ ID NO: 194 - DNA, 1845 bp, Saccharomyces pastorianus
atgtccaatttatctgatacagcgaatggtaacgataccaaacgcggcaggttttctaattttgctttcacatctgaaaacagtattctacaaaaaaacagcacgctaagaaactggtttctaaagccgacaaccgataacaaagaggcgtattgtggtaaaggtgaaagtaccatcaaagtcgcacaaccaaatgatacaaactcccaacactctgttgaggagaaaaaaattggaagaagagtcaaatccttttttaagcaggcgaattcaaatagatacggaaacatgtcggaggatgaagacgatgcttcgttttggaaaaggacagacagcaaaggcccaaagcaagaaaatacttttattaatggggagaagcaaaagggaagcttcaaaaagaaaatccggaatagttttttcaagggatctattgaaagcaacgagaaaacttacgctaatgagaaaaaaccttcacagattgaattctcgtcagatgatgaaaatgagtctcactttacagatgcaaactcacatgttatacaatccaagagccctgagaaaacttctcctggaaagcaatggccaactaaaagcattgattataaagatcacaatgtaggatctggtgaaaactctgaggaagaggatgaagatgacgatgaagatgaattttgcccactcactccaccagaaaatgttttagaaggtccatataaatttgtatttcaaaccccaaatacatttacatcccagccacacttatcgaccgaaaaagaataccataaaggcggaaaatacacgattgagtatctcagcaaaagcttaactactttgaacattgatattgattttggggcaaaggaggaacctgatttctattcagagaaagaaatacaaaaaaaaatcgaaagtattattcaaaacattgccgttgaaatgtcaaagaataaaatagccaataacaatgaacaaaatgagcttgaaaagttgaaaaaagaaaacactaaattgctaaagttcaaatatgaacattctatacagaagcaagaacttatctctctaaacactaggctcgaatctttaaataagaaaaacaaggatcttattatcgaagtgaaaaaattgaagaacaattcggaaaatgaggaaatgaaagaaagcacatttacggatgagaacgaaaatgaaagttttactaaatctaaaatagggccgggtgttttaacgttgaacgtcaatgaaactcgaaaagagccacaacaagctacaaccaaaccctcaaaatatcttccaagagaaataagaaacaatgagacaaaactaaagcacttagaaaagaaaatattcggcttagaaaaaactcttgaaaaaaaaagaaaacagatgaagactaacgaagttagattagatttgaataaatatactattgctcagtttttaaacttaatgaaaagtctcaacgcaattttacaattttacaatgtctatggaaacgatttgaaagattacaacgacaacatcatcagagtagaagcctgttgtagcgcccttaacacaatgcactctttcgaagaatcctcactgcgtctgcaagaacatagcttcatgagacaaatgagtccattgttcacaaacatcaacttctcgttaatcgaccaactaacaatgaacttcagattctacgaaagatctgccaacttccagaaggaaacaataagcggactaagaatgatactggaagagaaagatgattacattaaaacactgatgcaacatttgaaaaaaaggcagagcacaaaattgatagaagacgctcagaagggtgtttccgctatacaatcttag

SEQ ID NO: 195 - DNA, 1035 bp, Saccharomyces pastorianus
atgtcttctgctacagcttcaactgagagtattgtggaaaaaatgttgcatccaaagactacagaaatatattttgcgcttaacaatggggttcgtatcccagctttaggattgggtaccgcaaatcctcacgaaaaattagctgaaaccaaacaagccgtcaaggctgctatcaaggcaggttacagacacattgataccgcttgggcatacgaaacagagccatttgttggcgaggccatcaaagagctattgggagagggatctatcaaaagggaggatcttttcattactaccaaagtgtggccggtcttgtgggatgaagtggaaaggtcactgaatgaatctctaaaggcattgggtctggactacgtcgatttgtacttgcagcactggccattatgttttgaaaaggtcaaggatcctaaaggaatcagcggattagtgaaaactccagttaataagtccggtgaaacaatgcatgcttccaatggtgattggatggaaacttacaagcaattggaaagaatctaccttgaccctaacgatcaccgtattagagccattggtgtttccaatttttcaattgaatatttggagcgcctcgtcaaggagtgcagagtcaagccaactgtgaaccaagtggaaacgcatcctcatttaccacagatggaattgagaaagttctgctttatgcatgatattttattgacggcatattccccattaggttccaacggtgcgccaaacttgaagattccattagtgaagaagctagctaagaaatacaatgtgacagggaatgacttattgatttcttaccatatcagacaaggaactattgtaattccaagatctttgaatccagttagaatctcctctagtatagaatttgcctgtttaactaaggacgaattacaagaattaaacaagtttggtgaaaaataccctgtgagattcatcgatgagccatttgctgcgactcttccagaatttactggtaatgggccaaacttagaaaatttgaagtactag

SEQ ID NO: 196 - DNA, 951 bp, Saccharomyces pastorianus
atggctcttttgaacatatttaatagaaaaagcgctgatgaggcttcacaactgactacaaagggaaggcaggaaatatctcaagccatcacgatatgtaaaggcgacgatgccgccgaccaacaagactgttccggtgattgtaaagagaatattgaagacggggagcaagcatttgctaggctgaagatagagcacgaaactcccttgttgaattcttcaaagacaccgaaaatccattttgttgtgccgacatctcaaagcgactggcagcatgatgcttgctcagaggacgaaaaatctgtccagtacaaaatttcccagtggtgtgataagaactctagcaaattttcaagcgtgggtgcaggaaagacattaaattgtggggtttcatctttacctaaagatattatggacatcgaagttatgcggggaactaagaacaatgttcttgttctgccttattttatttggttgaatgatctcaggtcagataacgttgaagaaacactagatgatgtagttcccattttgttgaatggttctatttccagggataagttgctagaaacgcgacgggacataacagacgcacgggaacgtgcctttatattcttatgttctcacactacaagggacaaaaggtgtgggattacagccccgtacttaaagaaagttttcgataataaattgcaagagcatgcgctatatagagataattcagacttcagacctggcggcgtcaagattgcgtttgttaatcacgttggtggacataagtttgcatcaaatgttcaaatatttttgaagaatccgaacacgttaatctggctgggaagagtaacgccagttatggtaccttccattgtcgaacatctgataattcctgaaaaacctactcttccatatccggagaaggtgcgttgcataaaaaaatatgagaactggtaa

SEQ ID NO: 197 - DNA, 879 bp, Saccharomyces pastorianus
atgagttttaggcattttaaaaggagagctgttacgagctcagagaaagaaagctcttcagcggatgaacacgatttcgatgaggacattcatgtactgaagaagtcagtctctgtaaaagagaagtcttcaacagcagaaagtatagaagagacaccaaagaacgacacgaatcaggacgacgaagaatcaaacgatggtgaaaccgaagccggttctgaaagtgaggagagtagtgattgcagtagtactagtgaaaatggagatataattcctttacagagacctttgtttttgaaaaaagtaaacaaaaacaaacaacgagctcctacaatcgataaagatcaaaacgaaagtgatacgcatgctgagcagaaaaagaaatttactgtgatgaaaagaattgacaaagctaaccaagcggcacagaagcatgaaataatgaggctgcattttgacaccaattacagtaccaatgaggaattgatcaagcaatgtatgcttcttaatgataacgattatgtcgatccagaaaaagagagactcgcgtggctaaaaagacaagaggaacgtagtcaaagatataggaatgcccaacttgccaaacaacaacttctggaacagtatgaagcaaacaaattcgcctcaatgcaaaaagataaagacagacattccaggtttgaggtcgccacagacacaggcaaagagcaggtgactactatgaaacaaacgtcgactgagaaatctaaaaaatcatacgacaacaatcgctacaaagtcacaagagctaaaaatattgagttccgcaaaaatagtgcacatgaaaatgaaaatgacaaaaacgatgcagaatctgaatctgaatattctatcatataa

SEQ ID NO: 198 - DNA, 735 bp, Saccharomyces pastorianus
atgtctttagtaccattgtgttcggacctaccacaattcttgcaaggttacctaccaaatgccaccaaaaaagaaaccagcattcggcctttcattacgttgacgtatgcgcaatcgctggacgcgagaatatctaagggtcctggaataagaaccactatttcgcatcctgagacaaaaacaatgacacattatctacgatatcatcacgatggaatacttatcggaagtgggacagcactaattgatgatcctggattgaattgtaaatggggtcgagattcgcttgcaaattcaccaaggccaataattttagacacaaagcaaaaatggagattcggcggttcaaaaatgcaagaactttacaataagggattaggtaaaccaccgattgttgttgtcgcaaatgatccagcaataaaagagcaccatgttgagtatgcaatatgcccaatggataaagccacaaaacaaattgattgggagaagctgtttgaaaaattaaagaaagactttaatatacagtcagttatgattgaaggaggagccaaagtagtaaatcagttgttactaagaaatgacatcatcaatagtctcataataactattgggtcaacatttttgggcagatcaggtacggaagtgagtccgctacaatcagttaatttgaagggtataacatggtggaaaggtaccactgatgtagtgatgtgtgcgaaactagacaacgaatag

SEQ ID NO: 199 - DNA, 648 bp, Saccharomyces pastorianus
atggatcaagaaaatgaaagaaacatctcaagattatggagagcatttaaaacagtaaaagaaatggtcaaagacagaggctacttcatcacccaagaggaagttgaactgccattagatgattttaaagttaagtattgtgattccatgggtaggccacagcgtaaaatgatgtcattccaagcgaatccaactgaagaatctgttgcaaagttcccagaaatgggttccttatgggtagaattttgtgacgaaccttctgttggtgtaaagacaatgaagacctttgttatacatattcaagaaaaaaacttccaaacaggtatcttcatttaccaaaataatattaccccaagtgcaatgaaattagtaccttctataccacctgccactatagaaacatttaatgaagccgccttagtggtcaatataactcaccacgagttggttccacaacatatcagattaagcactgatgaaaaaagagaactattgaaaagatacagattaaaggaatctcaactaccaagaattcaaagagctgatcctgtagccttatacttaggtttgaaaagaggagaagtagtaaaaattataagaaagagtgaaacttctggtcgttatgccagttacagaatctgtatgtaa

SEQ ID NO: 200 - DNA, 897 bp, Saccharomyces pastorianus
atgagcggtgagttagcaaattataaaagacttgaaaaagttggtgaaggtacatacggtgttgtttataaagctttagatctgagaccaggacaaggtcaaagagtggtggcattgaagaaaatcagattggaaagcgaagatgaaggtgttcccagtaccgccatcagagaaatttcattgttgaaggaattgaaagacgaaaatattgtcagattatatgacatcgttcattctgatgcgcacaagctatatcttgtctttgagtttttagatttggacctgaaaagatatatggaaggtataccaaaaggatcagccactaggatccgatattgtcaaaaagttcatgatgcaactttgcaaggtattgcgtactgtcactcacatcgtatcctacatcgtgatctgaagcctcagaacttgctgatcaataaagatgggaatcttaaattaggtgatttcggtctagcacgtgcgtttggtgttccattaagagcctacacccatgaaatcgttactttgtggtacagagcgccagaggtcttactgggtgggaagcagtacagtacaggcgttgacacatggtccatcgggtgtatatttgccgagatgtgtaatagaaaaccaatattcagtggcgatagtgaaattgaccagatcttcaagatattcagagtgttggggacacccaacgagggcatatggccggacattgtctacttgcctgattttaaacagagctttcctcaatggcacaggaaggacctgtcgcaagtggtgccaagcctagatccacaaggtattgatctgttggacaagttactagcatacgaccctattaaccggatcagcgccagaagagcagccatccatccctactttcaagaatcataa

SEQ ID NO: 201 - DNA, 1380 bp, Saccharomyces pastorianus
atgttgcaaaagctttcaatcaccgcgttgattgggttgttgtcttcggcagcatctttcgccaacgccgattgtacttactctggtggtaattactactgtgctcaaaccgatgccatcgtttactctaacgttggtttatctgctacttaccaggatgtcaccaacatggatgaatcttcttgttcttgtacccaggccgactttacttcttccggcagtttggctccattcaacgaagagttatccgtccatttcagaggtccaattgaattattgcaattcggtgtttactatccaaacggagaatccaaagccttgaagaagagatccgaggcacagctaattgaatcttgtaacgagcaaggtgaagctgtcgtctccagacacaaacatcagcacaggagagacgttgctgtcgaatatgtccaagtcacttctaccgtttacgtcgatggtagcggtgaaaccgttactgctgactccaccaacactgttgtcggtcctgccgttccatctgcttacactcaagtttctaccgttttgtccaacaccgctcaaacgactgaaaccggtgcaagtccatcatctgcttcctcttccaagactaccaccaccacctcctcttctgctgctgctgctgcttcgtcttcttcatcttccaacaccaacggtgactggtcaaggggctcttactttgtcccaggctctaccagtaactgtactttcatgaacagccagggtggaagtgccggttctggtgtatggtctagttgtttcggtaactccatctcctttgctgcttctgacggtacttccggtgccgcttctcctcaagcccttggtgatgttaccttggcatccggtaatgaatttatgattttctctggtgatgaatgttctggcaacaatgctgaatgtggttactacagggaaggtatcccagcttaccgtgggtttggtggtgctgacaaaatctttgttttcgaattttccatgccaagtgacactagtggctctgcttacaaccaagacatgccagctatctggctgctgaacgccaaaatcccaagaactttgcaatacggtgatgcatcttgttcttgttggaagactggttgtggtgaaatggatctcttcgaaatcttaaccgctaattctgataaattgatctcccatattcacgacggtcaagacggtggtactcaagactatttcaacagaccaactgatggttctttgaaagctgctgtcattttcaactcaagtgatgaaactattcatattattgaagtcgatgagagtttcgatgaatctttgagcgatgatgtcgttgaccaatggttaagcaaagctggttcttctgccgctctgccatga

SEQ ID NO: 202 - DNA, 201 bp, Saccharomyces pastorianus
atggccgtacagataccaaaacaaagactggccaatgccaagttcaacaagaataacgaaaagtacagaaagtacggtaagaagaaggtagacaaggccgacaagaaggctgctcctttgatatccaagacctggttgggcatccttattttcctcctggtgggtggtggtgttttgcagctgatcagctatatcctatga

SEQ ID NO: 203 - DNA, 552 bp, Saccharomyces pastorianus
atgggtaacattttcagctcaatgttcgacaagctatggggctcgaacaaagaattacgtatactgattttgggtttggatggtgccggtaaaaccaccatcttatatcgtttacaaatcggtgaagtggtcaccacgaaaccaaccattggcttcaatgtggagacactaagctacaaaaacttgaaattgaatgtttgggatcttggtggccaaaccagtattcggccctattggaggtgctactatgcagatactgccgcagtcatatttgtggttgattcgactgataaagatcgtatgtctacagcctctaaagagttgcatttgatgttacaagaagaagaattacaagatgctgcgctgttagtcttcgccaataaacaagatcaacctggcgcattgagcgcaagcgaagtgtctaaagagttgaatctggtagaattgaaagatcgaagttggtctattgtagcttcaagtgccataaagggtgaaggtattacagaaggtttagattggttggttgatgttatcaaagagggacagttataa

SEQ ID NO: 204 - DNA, 828 bp, Saccharomyces pastorianus
atggcttactcattaaccagaaaattgcttaaggattggaaatatttgatgcgccatcctgaaaagactctgggcctatttcatgtaagaccacatgattcggacttacacctttggcatgtgttattttgtgagcccaggactagtttggagatgtacctgttgctttatattgctggtgatgaccaggatccgtatataatcatgaaatgtttgtctccaaattctcgtttccccattaacaggaccgtttcgatgacacatttgaattatctgttgttaagagagttggggtttcaagatttactttcccatatatggcaacccttttttcacattcaaccaatagacgattttcaattctccccctcaatggtaaaattcaacaaggcatggaatagaattatatataaagacttcaagtcttatttcccagagctaataggcaccttacaaccaggtgactatgctatagttaagagctacactaaaaatcataatatcagtaattgcaatagtaacactgttaatgagttcatatcattttataacgctcaaaatcacaattcccactgtcaggacaagaaaagctttagcagtaacagcataaatagtagcggcatatcatctactttcaacaacaatagcaataacaagaaaacacatacctacaaagcgatcgatttcatgggcaggaatctacttgcatgtgatgacgacagtatacacgcagtaataagtcccaaaagatcaagatcgtcgttatcctcggatggaatgagtgataatagtaacaatgggcattgcacgaagaggaaaagagtctaa

SEQ ID NO: 205 - DNA, 423 bp, Saccharomyces pastorianus
atggcaactaaagagagcaccaacggtcgtacgtctaagcgagtaagaaagcacccatcgttgaagactttaacacataagcaaatacacacaacaatcttcgttaagtcgacaacaccatatgtaagtgcactgaaaaggattaacaagtttctagatagtgcccataaacatggatcatcttatgtggtagttttgggcatgggcaaagctgtggaaaagacgctggcattgggctgccacttccaagatcagaagaataagaaaatagaagttttcaccaaaagcatagaagtcctggacgaagtaatagtagagcagcaagaaggtatcgaaattgagagcgatgtcgacgatgaagataaagaaacccaattgaagaaaagaattgtaagcggcatagagttgcgtatttatgtatag

SEQ ID NO: 206 - DNA, 1236 bp, Saccharomyces pastorianus
atggacacaaattctaaagccagtgttctcagtgaaaacaaaaaatttaaggcaaggtttattcataaccatggtcagaagccctcttttattcaaattactcctccgatgatatctagtgttctctttcacgcatatccactattgataataattgataatgcacttgccaatataatgtggttatctgacgataaatgtttgccatttatatacttgacgagcatatggctaatcataagttcgttcatcccgaccgaaataaatgctagtcgagtttcaccgtttaataaactcttgagtttatggttaggttttataagtggaatcttcctgtttctgtcattcatgtattatgttatttcattggtgacttctttaagagaagcagaacctcctacattggatgaaatcgttgtgttactagagtctgtactgggcaaactagaagtactaagagatgagctgaacgtttggaagaaactaaaaacttcattcaatggcgtcaataaaaagtgctctgataagaggctgtttttgaggttattcctatttggtacaatctttcaaactatcatcataagatacatatcggtgggggcttatgttagattttttattatcagtgctctggtataccattccactagctttcaagctactttaaggctattctggagatttaccctagttcgaaatttctatcacatgggaattaagaattttaaaatctcaaactggttatcaaattgtttgaggatgtatcaaatcatcattttaactgaaaactcttctattatagtacctttgaaagaatttttgccgatactactacaaaacaagaaagatgaggatcacattaaaattttacaactactaaatgaacaaaggaactttgaagaccgtgggctcaaaatattagaaattgaagtacacgaaaaccaaaggaaatggcgtcgaaataaacattggagtacattattactgccctatgaaagacaaaacttttcaatagaaatcaaaaatgctgatgggtcatcaactatgagaagctgtctatcaacgcatgaccttgacaaagaggaactgcccaatgattggcattggattaataatgactgggatggggccgattgggtatactcggattcatcttggaaagaaactggaagatacgattctttggaaagtttcacgaggtcaaggagatggagaagacgcctctttcatttgtaa

SEQ ID NO: 207 - DNA, 1743 bp, Saccharomyces pastorianus
atgcttatcagattcagatcgaaaaacggcattcatagagtctcctgcgaagatagcgagctttttggagcagtaattaaaagattgttgggtaatctggatgccaatgccgatgccaatacatttactgttagtgagaagcctgggcaggatgtccatactgtttctgaactggctaatcgaacagtggcagatctagggctgaagcatggtgacatgctgatatttagttattcgaatcagcccaacaccgagacaattgacaccagcgtcggaactggatccgtagacattggtgttaagaacggtcgtcagaaaagtttgggcccgttgaaaattaaagaacttgatgttgacgaggaactagagaaagagaaagggttaatacctcgccaaaaatcaaaattttgtaagcatggtgatagaggtatgtgcgaatattgctcgcctttacctccttgggacaaagaatatcacgaggcaaataaaatcaaacatatttcttttcattcttatttgaaaaaattgaatgagaatgccaataagaaggaaaacggtagctcttacattgcgccgctctcagaacctgactttaggattaacaagcattgtaataatggacatgaaccatggcctcgaggaatttgctctaaatgtcaaccatcggcaattactttacaacagcaagaatttagaatggtggatcacgtcgaattccagaaaagtgaattaattaatgagtttattcaagcgtggcggtgtacaggtatgcagagatttggctatatgtatggctcttatgctaaatacgataatacgcccttggggataaaggccgttgtggaagcaatatacgaaccacctcaacatgatgaacaagacgggttgaccatggatgttgaacaagtcaaggaggagatgctacagatcgatctacaggctcaagaaatggggctttcacgtattgggttaatatttacagatttgtctgatgcaggagctggagatgggtccgtctactgtaaaagacacaaagattcatttttcctttcatcaatagaagttatcatggctgctggacaccaaaccagatatcctaatgtgagcaagtttagtgaacaaggaatattttcttctaaatttgtcacctgtgtcatatcaggaaatttggaaggggaaattgatatatcgagttaccaagtatccactgatgctgaagcattagtcacggcagacatgataagtggatccacgtacccttcaatggcatatatcgatgacaccaccgatgaaagatatgtacctgaaatattttacatgaaatccaatgaatatggtataacagtaaaggagaatgccaaacctgcattccctgtggactatcttttagtaacgttgactcatgggtttcctaaaaataacacggataccaatccaaaattcgctacatcgactgagtttccgtgggccaacagacaagctctggggcaatctcaagattatcaagaactgaaaaaatatttgtttcaggtggcttcaagtggagttttcaatctcttacacgagaaaatctcgaattttcacttgttgatatatataaacactttgcaggtactttcacccgaggaatggaaattactgatagagtctgctataagaactgaatgggaagagcccctattgaaacttgtctcctcagctggttggcaaacactagtcatgatccttcaagaaagtggttaa

SEQ ID NO: 208 - DNA, 447 bp, Saccharomyces pastorianus
atgaacatcgtcccacaaggtaacttcaagtcccaggtctccacggatcaagataagaccactctttcctccgcggtgccctcacttccagacacgctacgccagcaagaaggtggtgcggtacccctttccacacagatgaacgacagacacccattggaatcaaagctgaagcattgggagaccacacagcgccagagacagatggagcagtaccgacagatattcggcatagccgagcccatgaagaggacgatggagctggaaatcgtcaatcgcactgatttcagtcctctctcagcggacagcagcatgcaccgcgatatattgcttaacaaggactgcagcattgattgggaggacgtctatcctggcaccggcttgcaatccggctctatggttggcgacgatctccacagcaaaatcgaaaaacaattgggcatttaa

SEQ ID NO: 209 - DNA, 939 bp, Saccharomyces pastorianus
atgaatatagcgaaaagatcattaggcgctttctccaaacgattttattcctcttcaaagatcgttccaaaacataatacgatccaggatattagagacaaatacaatgctggtactcctttgtccatgtgcacagcatatgacttcatcactgctacatgggtgaataaagctaattgcgatctactcttagtcggagattcattagcaatgacctccttggggtatgatagcacaattacgctctcattagatgagttcaaatatcacgttagctctgtgtgcagagctgaaggtccttctttggtagtcgcagatatgccatttggtacttttgaatctgatatttctgatggcttgaaaaatgccatagatattatgaaattgcatagcaaagttacctctatcaaagttgaagtgggttcgtacattaaagacaagtatgcaatgaggtttatccaagaactgtgctcaagaggtatccccgttatggcccatataggattaacaccgcaaaaagtacattcacttggaggttataaagttcaaggtaacaagagtctgttacaaatgcaagagttgttcgaaacagccaagcagttgcaaaaaattggttgctggtccattgttattgaatgtgtcccccacaaaatggctcaattcataacgtctaaactttccattccaacaataggtatcggtgctgggaatggcaccagcggtcaggttttagtgatatcggatcttttgggcatgcaaggtgaatccgttccaaaatttgtcaagcaaactgtaaatataagagatattgcgactaagggcttgaaagaatatattacaagtgtagaggatagaacgtttcccgaaaaagattctcacactttcaaagtcaaagacgatctgtggaatgaattcctttcgtcgactaaccacaaataa

SEQ ID NO: 210 - DNA, 1725 bp, Saccharomyces pastorianus
atggagggcagagattttcagaaaaataatttaggcttgcaaatcaattcacaagatagtggaacgagccgtacaaccttccattcactacaagacttaggagacgatataatgaatgaaagctgggatcgtgtaaatcagaagaagattagtgcaaaagatgatgttttccctgaaatacctcttccatcaccatctttatcggcagagaaggtaaatacaaaagaagaagaagaagaggtagtgatcaagtcatcaaattcacagtcaaaagaaccgtcacagaaacctccagtagatattccttacacatgttttaccaaggatcgaaggctagtcatttttggaattattatttttatagggtttttgggcccaatgtcaggaaacatatatattccagctctgccacttttgcaaagggaatttgatgtgagtgcaacgaccataaatgccacagtttctatttttatggcagtgttctcggttggaccactgttttggggcgcactcgcagattttggcggaagaaagtttttatatatggtatcattgtcattaatgttaaccgttaatataatactggctgctgtgccagcaaatattgccgcacttttcgtcttaagagtttttcaagcttttgcatcaagttctgttatttctttaggggctggtacagtaacagatgttgttcctccaaaacatagagggaaggcgattgcgtattttatgatgggcccgaacatgggaccaatcatagcaccaatagtggctggattgattttgatgaaaggaaattactggaggtggctctttggatttacttctataatggcgggaatagcattgatcttagtgagcgcgctacttccagaaacacttcgttgtatagttggaaatggggatcccaagtggtgtgaaaagaagaaggaagaaaaaggaacagtacccccatcctctcagagaaagggactatcgcgttggcatttgttcccagatatgggtatccgtaaaccagttactaatgaccctttcttccaacaaaaatttccaaaaccaccaaaagcaggctttacgctatactggaagatggttaaatgtcccccagtaataatcacatctattagcactgctctcttattttctagttattatgccttcagtgttacgttttcttactacctcgagaatgactaccattttaccatgctagaaatcggtgctgcttacgtctgcccaggagtagccatgctgttaggatctcaatctggtggtcatctctcagattatcttcgttcacgttggatcaaaagtcaccccgaaaagaaatttcctgcagagttccgtttaatactaaatctggtcggaattgtactaacactgggcggtacagttggatatggatggtccattttctttcatcaccactttgttgtgctcttggttttttcctcattgatggccttcggtatgacctggtgcagcaatacttccatgacatatttaactgagctattccctaaaagagctgctggaactgtcgcggtgagcagtttctttcgaaacattggtgcggctataagttccgctattatattgaagctttgcaaagcaatgggaacaggatggtgtttcacaggactggggttgtgtagtctgtttacgctaattggtatattatatctaatcatttttcagagaaagtatgttactgaagagttttga

SEQ ID NO: 211 - DNA, 861 bp, Saccharomyces pastorianus
atgaaacatattataaagaaggcatccgtacttactctgctaccacttatcgccgcagccgcagccgcagccacctcagctacctcagttgataatgcagagactcctgtggacactgaaggcccagcacatttaaaatcctttttaatgtccatttctatgattgggctttctgaaattggtgacaaaacctttttgattgcagctttgatggctatgcgtcatcaacgacttttggtgttttcagcagcagccacatctcttgcgataatgactgttttgtctggtgtagtgggccattccgttgttgcctttctctccgagcgctatacagcattcttggctggtatgctgtttctggtgttcggttataaattgaccatggaaggtttggaaatgtctaaggacgcaggagttgaagaagaaatggctgaagtcgaggaggaaattgcagtcaatgacatcaacaagggtatggacgatgttgaaaaaggtggtgaagctactcacgctaaacagttgaggaactcttcgacagttacaaaatttttacataaattccgtgagctagcatcgtttatgttttcaccagtttgggttcaaatatttttgatggtctttttgggagaactaggcgaccgttcacaaatcagtattattgccatggctactgacagtgactattggtttgttattgcaggtgccgttgttgggcatgctatttgcagtggtctagccgtggtaggtgggaaactattggctacaagaatcagcataagaactatcactcttgctagttcatttttgttcttcatttttgctcttctttatatttatcaagcattcacaatttcaaattga

SEQ ID NO: 212 - DNA, 1134 bp, Saccharomyces pastorianus
atgcctaaaaagtctattgaagaatgggaaggtgatgctatcgaatcggtcccttatttggcaagtgatgaaaagggttcaaactataaggaggccacacaaatcccattagatccaaaacaaattgaaattgaaaatcatccaacagtaaaaccatgggtacattttgttgctggcggtattgggggcatggcaggtgctgtggttacttgcccctttgatttggtgaaaactcgactacaaagtgatatatttctgaatgtgtacaagtcgcaggccgccaatataagtaaagtgtctactcgtccgaaaagtatcaattatgttattcaagctgggactcacttcaaagaaacactgggaatcattggcaatgtgtacaaacaggaaggtttcaggagcttgttcaaaggtttgggtcctaatttggttggggttattccagcgagaagtatcaatttctttacctacggtactaccaaagatatgtacgccaaagcgttcaataatggtcaagagactcctatggttcatctcatggctgctgcaacagcgggttgggcaacggcaacggcaaccaatcctatttggttgattaagactagagtacagcttgataaagccggaaaatcatcagttagacattacaaaaactcctgggattgtttgaagagtgttctcaaaaatgaaggtatcactggtttgtacaaaggtttaagtgcttcgtatttgggatctgttgaaggtatcctccaatggctgttatatgaacaaatgaagcacataataaaacaaagatctattgaaaaattcggatatcaatctgaaggtgcaaaaagcagatctgagaaaattaaggaatggtgccaaagatcaggaagtgctggtcttgcaaagtttgtagccagtatagctacgtacccacatgaagttgtaaggacaagattaaggcaaacacctaaggagaatggtaaacggaagtatacaggtctaatacaaagtttcaaaatcataatcaaagaggagggcctattttcaatgtacagtgggttgaccccacatttaatgagaacagttcccaacagtataataatgtttggcacatgggagattgttatacggttattgtcatga

SEQ ID NO: 213 - DNA, 1665 bp, Saccharomyces pastorianus
atgtccagtaactccttcactaacttcaaattggccactgaattatcagcttggtctaaattgcaaaaaatttacgaatcccaaggtaagactttgtctgtcaagcaagaattccaaaaggatgccaagcgtttcgaaaaactaaacaagactttcaccaactacgacggttctaagatcttgttcgacttctccaagaacttggtgaacgatgaaatcatcgctgccttgattgaattggctaaggaagccaacgtcaccggtttgagagacgctatgttcaagggtgaacacatcaactccaccgaagaccgtgccgtctaccacgttgctttgagaaacagagccaacaagccaatgtacgttgacggtgtcaacgtcgccccagaagtcgactccgtcttgcaacacatgaaggagttttctgaacaagtccgctctggtgcttggaagggttacactggtaagaagatcaccgacgttgttaacatcggtatcggtggttccgatttaggtccagtcatggtcactgaagctttgaagcactacgctggtgtcttggacgtccactttgtttccaacattgacggtactcacattgctgaaactttgaaggttgtcgacccagaaaccaccttgtttttgatcgcctccaagactttcaccaccgctgaaacaatcaccaacgctaacaccgctaagaactggtttttgtcaaagactggtaacgaaccatctcacattgccaagcatttcgccgctttgtccaccaacgaaagtgaagttgccaaattcggtattgacactaagaatatgttcggtttcgacagttgggtcggtggccgttactctgtctggtctgctattggtttatctgttgccctttacattggttacgacaactttgaagctttcttgaagggtgccgaagctgtcgacaatcacttcaccgaaaccccattggaagacaacattccattgttgggtggtttgttgtccgtctggtacaacaacttcttcggtgctcaaactcatttggttgctccattcgaccaatacttgcacagattcccagcttacttacaacaattgtccatggaatctaacggtaaatctgttaccagaggtaacgtcttcactgactactccaccggttccattttgttcggtgaaccagctactaacgctcaacattctttcttccaattggtccaccaaggtaccaagttgattccatccgatttccttttggccgctcaatcccacaacccaattgaaaacaaattacaccaaaagatgttggcttccaacttcttcgctcaagctgaagctttgatggttggtaaggacgaagaagaagtcaagtccgaaggtgccaccggtggtttggtcccacacaaggttttctctggtaacagaccaaccacctctatcttggctcaaaagattactccagccactttgggtgctttgattgcctattacgaacatgttactttcactgaaggtgctatctggaacatcaactctttcgaccaatggggtgttgaattaggtaagagtttggcaaaggtcattggtaaggaattagacaactcctccggtatctctacccacgatgcttctaccaacgggttgatcaaccaattcaaagaatggatgtaa

SEQ ID NO: 214 - DNA, 2403 bp, Saccharomyces pastorianus
atgtcacagaagcaaggtacgaatcagaaccggaatggcgctcaccagccacagcccgcaaagaaccagcgatctaataatgccgctggcgctaattccgcgcaaccgccacaacagcagagccaaggccagtcccagcagcaggggaaatccaatggcccgttttctgcctccgacttaaatagaattgttttggaatatttgaataaaaagggataccaccgcacagaggcaatgctgagagccgagagtggacgtacgttaacacctcataacaagccagcaaacactaaaacggggaaatttcctgaacaatcggtagcccccccaaacccgggaaagactgccaagcccataagtaatccaacaagtttatcatccaagagagatgcagaaggtgggatcgtctccaatgaacggctggaagggttcaatgcgcccgagaactacataagggcatactcaatgttgaaaaactgggtggattcatctttggaaatttataagccggaattgagctacatcatgtatccaatattcatttatttattcttaaatttagtggcaaagaatcccgtgtatgcccgtcgtttttttgacagattttctccagactttaaggatttccatggttcagaaatcaacagactctttagtgttaattctatagatcacatcgaggaaaatgaagtggctagcgcgttccaatcccataggtatagaatcaccatgtctaaaaccaccttaaatcttctcttgtattttctaaatgaaaacgagagtgtaggagggtcattaataatcagtgtcataaatcaacatctggacccgaatatcgtggaatctgtaactgcaagggaaaagttggccgacggtataaaagttctcagtgatggtgaaaacgggaatgggaaacaaaacctagaaatgaattctgtccctgtcaagctgggacctttccccaaagatgaagaattcgtaaaagaaatcgaaacagaattgaagattaaggatgatcaagagaaacaacaaaatcaacaaacctcggatgaaaataattccgaggcaaacagtaggactttattgcaagaatataaagccatgaataacgaaggatttgaagaatacgctggcgaagaggataaagataaagttaaagagaaaaccgccaaagacgaggagaagaaggaaattgagttgaaagtggacaataagaaaacagacagcaatttatattctcctgcaagagatatattacctcttcctccaaagacggcattagatttaaaactggagatccaaaaggtcaaagaatcccgtgacgctatcaaattagataatctgcaattggcattgcccagtgtatgcatgtacacctttcaaaatacaaataaggacatgtcatgtttagatttcagtgatgattgcagaatagcagccgccgggttccaagacagttacatcaagatctggtcacttgatggttcatctttaaacaatcctaacatcatgccgaacgataacaatagcgaacacagggatactgatgatccaacttgtaaaaccctagtcgggcatagcgggacagtgtatgccacgagttttagtcccgataataaatacttgctttcaggttccgaagacaaaaccgtcaggctatggtccatggacacacacactgcattagtaagttacaaaggccacaatcatcccgtttgggacgttaacttctctccgttgggccactatttcgccactgcgtcgcacgaccaaaccgcacggctatggtcatgtgatcacatatacccattaagaatatttgctggacatttaaatgatgttgactgtgtgtcattccatccaaatggttgttatgtatttaccgggtccagtgacaagacgtgtagaatgtgggacgtctccacgggtgactcggtcagattatttttgggccatactgcacctgtcatctgtatcgccgtttctccggatggcaggtggttatctacgggtagcgaagatggtattataaacatatgggacattggcacaggtaaaaggctgaagcaaatgcgtggacacggtaagaacgccatatattctctgtcttatagcaaagagggaaacgtactgatcagtggaggtgccgatcattcggtccgtgtatgggatttgaaaaaagccactaccgagccaagcgccgagccagatgagccattcatcgggtacttaggcgacgttaccgcgtcaataaaccaggatataaaggaatacggacgcagaaggacggtcatccccaccagcgatttagtggcatcgttctacaccaagaaaacacccgttttcaaagtcaaattcagcagaagcaatttggctcttgcggggggcgccttcagaccataa

SEQ ID NO: 215 - DNA, 1392 bp, Saccharomyces pastorianus
atgagatttttttcaaggagaatgctgaagactctgacttcaatgtgtattttgatattggttgtcgtgaccgttgcattctacataatatcctcgaacgaaaattattctcaagcggtcaaggatgctgcaaagtctcaatatgacactctgagggatagctacaatagcttaacaggtaacactggaaaccccacgaaattgcctgagcatgaatctgaggtggacgaaatattggaaagactacatgagcctctctatgccaaagactcttttgacgtaaatgatgtccttgctgaaaatattcaattttacgatgagattttatcccaagaaatttcagagcccaaagtagacaatttggtacgcagcggggatccactttcgggcaaggcaaaaggcacgattctaagtttggtgagaaacatagatttggaggacatcatatcatccgttcgacagttggaggaagagtataataagaactttggctacccctatacattcttgaacgatgaggaatttacggacgaattcaaagacgcaattaaaagaatattgcctaaggaccgtctagttgaatttggtaccatcgatcctggtaaatggaatattccggatagcattgacaaggataaatatcatgagaagagcgctgaaatggcaaaggaaggcattcacggcgctgaagcggtatcctatcataatatgtgccgtttctattccaaagaatattaccaccatcccctgctatctaagtataaatatgtgtggagattagaaccaaaagttagtttctactgcaaaattgaatacgatgttttccaattcatgagcatgaacgataagatttacgggtacgtcttgaatgtttatgaaagcccaaaaactatcaaaacgctatggacctctactatggattttgtcaaagaacatccaaactacttaaacgttaatggggctttcggatggctaaaggacaactctcaaaacccgcagaattatgaagatactcaagggtactctacttgccatttctggactaattttgaaatagtcgatctagactttttaagatcagaaccttatgaacaatacatgcaatatcttgaagagaaagggggattttattatgagagatggggtgacgcccctgtaagaagtttggcacttgccttgtttgcggacaagtcgcgcattcattggtttagggatataggttactaccacattccttacacaaactgtccaacctgtccaaaagattcggatagatgtaacggggactgtgtaccggggagattcagtatttggagtactttaaacgaccagaattgtcaggcaatatggatcaaacactctatgacagatgagcagttggatatgtattga

SEQ ID NO: 216 - DNA, 1659 bp, Saccharomyces pastorianus
atgttgaaaaactttaaactttctaaaagagatagtaatggatccaaaggcagaatcacatcggcagacatttccacgccttctcgtgataatggaggtgttatgaaacacattaaaacggtacctgttaggtacctttcttcatcctcttctactccagtaaaaagccagcgagattcttctccaacgaaaagacatgactctaaagatattacttctccagagaaagttataaaggccaaatttagttatcaggctcaaaccgcgaaggaattatcctttattgaaggagaatttttttacgtatccggagatgagaaggattggtataaagcttctaatccatctaccggaaagcaaggtgtagttcccaaaagctatttcgaagtatttgatagaactagaccttcatctgtaaacgggactaatagttcgagtcgaaaagttacaaatgaatcgttaaatatgggttcattatacgccattgttctttatgacttcaaagcagaaaaggcagatgaattaacaacttacgtgggagagaatctgttcatttgcgctcaccataattgcgaatggtttattgctaagccgattggccggcttggaggtcccgggcttgtccccgttggatttgttagtatcataaatattgccacaggttatgctacaggtaacgacgtgatagaagatatcaagtccgttaacctaccaacagtccaggaatggaaaagcaacattgcaaggtataaggcgagtaatattagccttggtagtgtggaacaacagcagctgcagtctactacaaaatctcctaatcagagcgcaaaactagtcgatagcgagctattattgaaagcctctgttgaatcattcggattagaagatgaaaagtactggtttttagtttgctgtgaattatccaacggtagaacgaggcaactgaaaagatactatcaggatttctacgatcttcaagttcaattattagatacgttcccggcagaagctggtaagttgagagatgcagatgggcaatggtccaaacgtataatgccctatatccccggacctgtaccatatgttaccaatagtataacgaaaaagaggaaagaggacttaaacatctatgttgcagacctggttaaccttccagattatatatctcgttcagaaatggttcattccttatttgttgttctgaataatggttatgacagagaatacgacaatgaagaaaattcaaataatattaaaacgttgcaagaaaacgatacagccacgtttgcaactgcatcgcaagcttctatgttagcttcaaacaatcaggataatacattgaccggtaaagatttgaagttaaatgtcaaactctcagaattgtctctttctgcttcccagcagccatccgtagcacaggtttcagattcgaaaacaacgaaaataaagttttattataaggatgatattttcgcgttgatgctgaagagtagcacaagctataaggaacttctcgataaaatcgctccaagaatcgacgcagatgactttaagctacaagtcaaactagcagatggtaacggggaggagataaaaacagattcacaggtaaacagtgttatccaggccaaactaaagatctcggtccatgacatttga

SEQ ID NO: 217 - DNA, 636 bp, Saccharomyces pastorianus
atggatgctgtaatactgaatatcctaggggatatccctgtggtgacgagattatggaccataggctgtctagtactgtccggtcttacaggtctccggatcataaacccaacaagcgtgctgtataattatgacttagtgttcaaaaagggacagtatggcagactaatttattcaatattcgattacggtgggttcaattggatatctatgctaaacatttttgttagcgccaatcacttgtcgatgctagagaactcgtttagtttgaaaaggaagttctgttggataatacttttactcttggtgatgctggtcaagatgacgagcattaaacagccagtcgcgtcgcttggggttcttttgcatgaaaacctggtatactatgaactcaaaaagaatggaaaccaaatgaatgtacggctctttggtggtatcgatatatcgccttccatatttcccatttatatgaatgcagtgatgtactttgtatataagcgggattggttagaaatcgcgatgaattttatgcccggccatttcatttactacatggacgacatagtaggaaaagtatacggcattgatttatgcaagtcgccttacgattggtttcgtaatggcgagacaccatag

SEQ ID NO: 218 - DNA, 2538 bp, Saccharomyces pastorianus
atgagtgcggcgcttccatcaatccagcttcctgtcgactataacaacttgttcaacgagatcggtgatttcttggtgactttcaagcacgacacgttatctgctcaggagccacaacatgatgatgaagacgaaaacatggatgctgaaaacattgagcaagatctattagaaaagggtcctaaatatatggccatgcttcagaaagtcgccaatagggaattgacttctgttgtcgtcgagttggacgatattttgcagtttcagaacgagaagtttctgcagggcacacaagcggacgatcttgtgtctgtcatccagcaaaacgccagccacttcactgagctattttgtcgcgccattgacgataacatgcccctgccaacaaaggaaatcgactacaaggacgatgttcttgatgttatcctgaaccaaagaagattgaggaacgagaaaacgctctcggacaggaccaatgaaatcagaaatgaaaaccttatggatacggcttcggatccaccttcctccatgaatgatgcgttgagggaagtcgtcgaggatgagactgaattgttccccccgaacttgactagacgctatttcttttatttcaaaccactgtcacaaaagtatgctcgtcgttacaggaagaaggcaattagctctaaaccactatctgtcaggcagatcaaaggtgacttcctaggtcaactgataaccgtcagaggtatcatcaccagagtgtcggatgtcaagccgtctgtcgaggttatcgcttatacgtgtgaccagtgtggctatgaagtgttccaagaggttaattcccgtactttcactccactgtccgaatgtacttctgaagaatgttcgcagaaccaaacaaagggccaactattcatgagcacaagagcttccaaatttagcgccttccaagagtgccggatccaggagttatcacaacaagtcccggtgggccacatccctagatccttaaacattcacgtcaacgggacactagtgagatcattatcgcctggtgatatcgtcgatgtcaccggtatcttcctacctgctccttacactggtttcaaagctttaaaagctggtctgttaacggaaacttacgtggaagcacaatttgttcgtcaacacaaaaagaaatttgcctctttcagtttgacctccgatgtggaggaaagagtgctggaactaattgcctctgggaatgtttataataggctggcgaaatctattgcaccagaaatttacggtaatttggatgtcaaaaaggcgttgcttctgttactagtggggggtgttgataaaagagtaggtgacggtatgaaaatcagaggtgatattaatgtctgtttaatgggtgatcccggtgttgctaaatcgcaattgttgaaagccatttgtaaaatatcaccaagaggtgtctataccaccggtaaaggttcttcaggggttggtctaaccgcggcggtcatgaaagatccagttacagatgaaatgatcctggaaggtggtgcgttagtgcttgccgataacggtatttgttgtattgacgaatttgacaagatggacgaaagtgacaggactgcaatccatgaagtcatggaacaacaaaccatctcgatttccaaggctggtatcaacacgactttgaatgcaagaacctcgatcctagcggcagccaatcctttatacggtagatacaatcccagactatcgccacttgataacatcaatttacccgctgctttgctttccagattcgatattctcttcctaatgttggacatacccagtagggatgatgatgaaaaattagccgagcatgtcacatacgtgcatatgcacaacaaacaacccgatttggactttactccagtcgaaccctccaagatgagagaatacatcgcctatgccaggaccaagagacccgtgatgagccaaagtgtaaacgattacgtggtgcaggcatacatcaggctaagacaagactccaaaagagagatggactctaagttctcattcggccaagccactccaagaactctgcttggtattattagactatctcaagctctggccaagttgagactggctgacatcgtagacatagatgatgtggaagaggccttgagattggtcagagtatcaaaagaatcattgtaccaagaaactaacaaatccaaagaagatgaaagccccaccacgaaaatcttcacaatcatcaaaaaaatgctacaagaaactggcaaaaacacactatcatatgaaaacattgttaagactataaggctaagaggattcaccatgttgcaattgagcaactgtattcaagaatattcgtacctaaacgtttggcatttgatcaacgagggtaataatttgaagttcgtggacgatggtaccatggacactgatcagggagattcagatatgggcacgccaaaactcgccccacaggcggccgcttccgccggcattaccgccccagattccgatatcgatctacaggatgcttaa

SEQ ID NO: 219 - DNA, 2775 bp, Saccharomyces pastorianus
atgacaagcgcctccgtgagactccagaacgtcaacattgagtctaacaactattctcgttacggtacctctgtctacgagaagctgtaccataatagaaacggtaatagcaataatgccggtaaaaacgttgctacgatttccaaactgccatcaatctcacaaaagtcgaggaacaggcaatacaatagttcaaattgctccaggtcgacgactcaatcgcccatatccacgttaaaatctccactttctaaccaaaatcaagctagcgctccagatgatctgggctgttcaggccaaagacgcagtgatgatgttgcctctttagataacgagactattgtgaccatgaactcaagaaaatccaggattaagaagaaatataagtctttaatttccacctcgtcaaagaaacttatgaacaaattgtacgaccatggtgcttcatctgattcattctccattttttctttgaaaacgtctcattctggtaaacatgaaaattccagacatgaaaagctaagaaaaagaaaataccatgtttttggcaaatttgctgatattaatgatttgccaatagagttagttgctaaaatactttctgaattggaattgggacatgatcaaaaaacgctggttagatgtctttatgtttcaaaaaaattctacaaggcgaccaagatcgttctgtatgaacagccttattttacttccacttatagagtggcacagtttgtcacctcgctaagatcgcaccccgaaaatggtgcatacgtaagagtattggatctgtcacttttgaaaccaggcataatcggtcaagatgcaaaggattctcaaggtctagatgaggatggtcactcgaggcgccatagacgccaccgccgcagatccactaacgcaagcttgaatttgcctcctactaccccgactactactatatccgacgacgacgatgctactaacgcattattaaaggacgacgtgtcaggtactggtggttttgaagacttggcattagccggttggagagattggagatatagaaatgagccgctttatagctctcccttgttgaacagcttcaaattgaaaaaagtcgtttctcgttcttcttccattacttccacgtcttctggaaactctaccggagtgcattccacaagaagacaacgttcaaatagttcggtcgcttccattacgaccagcattatgtcgtctatttacaatacttcccacgtctcactttcttcgacaacctcaaacaatagtaatggctatatgtctcccgggagtaatctatcgagagtctctaccgctagctcactaaaaaagtcctctgttaaatctaacatgtcatctccacagaagccaaaaccgatgtctgacataacttcgtcttcatggtttagaatgaaattgagttctagaaatagaaagacaagaacatcaactacaacagctggtctgaaaaactcaaagactaagacggttgatgttacaaagcaagattcggaacacccatctagttatcgtccttcaaagttgaaatttagtattgaacaaccatttagcacgcaccatccatatgccaacaaatttcttttgaaatatgctccttacagagatttacctttaggttatattctacatatgttgaatttatgtcctaatcttaacgagttgaacctatcaaatttggttatttgtacagatttcaagctaattaaccaaaaaaccgaaagaagaagactaacttcttcattgttacctgccgttcaagagtcgagtatttctgccggtccagaaagagacttggaaatcgtctatatgaccgattcaggcaaaggctacgaatattatgagggattgaataagcgacattcacgttcttcaagtttaggtaccaatcccaccagttggattgctgtacaggcaaactggggggattatccgcctcctattgatgcgcaaactaaaacaagagaagaacacaggcgtaactatactttgagcccaaacaaaaatgtcgaattacagaaactgaacccgctagagatttttgaactgatttgcaacagaaacgaaaagaaaagcggctacagcgccttgaccaaggtgaagatggacggcattgtttggtgtaggcaatacatggttaagtatttcgtattaaaaacattcagccagcatttgcattataaatctatggacaataattcctatgaacatcacatgttcagtttccgggactcaggattggatagaaacttttcctgggcttgtgatgctaaattgcatgaatttgttgccttgatgattatggatcatctctccaagctggacgacttgggtttagaagagcttttcaatatcaaatccgaaaagctatatattaaagattactgctctcgtgatcctgatattctcgaaatatcaaatttgtttgatatacagtatggcttaagatcagaatctgatgcaccctcagattccgattccgtaacagaatctttgcaatttaggctgaccgtattaaaatctgggaaaccaacatcattttggcttagaaaagtttccaagaattatgtttcgctggttgttaaattatgtgttgacgacaaccttgatatggacaaagctgaagtaggaaaaccaactttgaggatagatagcatcacacatgatttgatcagtaaattaaaggagttgagacgggttgatttgagaagaaatgttggggagaataactactacgccgaaagtatcatttaa

SEQ ID NO: 220 - DNA, 1215 bp, Saccharomyces pastorianus
atgtctgcgcaccacaagaagaagcttatgcccaagtcggcattgctgattagaaagtaccaaagggggatcagagcatccttcgtcgggttaatcctggtgttgtccattttgttcctgatgagtggctcgaactccccagaggcgctaataactcagggcactagcatgagccaagtggccaagaaggactacttgatgccgtttactgacaagtcacaaggtgttatccatcctctggacgacggcaaaaaggaaaaggccgtgatggtcacattggccagaaactctgacttatggaatttggtaaagtccatcagacatgttgaagatagatttaaccacaggtatcattacgattgggtgttcttaaatgacgagcgattcagcgatgagtttaagcgcgtgaccactgcgctggtttctggtaaaaccaagtatgggctgattccaaaagagcactggtccgttccatcttggatcgataccaaaaaatttgaagagaagagacacgaaatgggtaagtcggatattccgtacggtgattctgtgccttaccgacacatgtgtcgtttccaatctggattcatatggagacacccattgctagatgattacgaatggttttggagagtagacaccgatatcacattattctgtgacattcagtacgatatattcaagtttttgaaacaaaacaacaagaaatatgggttcattctttccgtaagcgaatacgaaggtacaattccaacattatgggaaacagtaaagacgtttgttaaaaaaaacccaaaattcttgaacaagaacaacctcatgaaattcatctccaatgatgatggtgagacatacaacatgtgccattattggaccaacttcgaaatcggctctttagacttcttcagatcggatgcgtacactaaatatttcgattacttggacgagtcaggaggattcttctacgaaagatggggcgatgccccagtgcattctatcgctgcctctttgtttttagacaaatcagagatccatttctttgacggtcttggattccaccatccagatttcatgtcttgtcccgtcgaacaggatattagactacaaaacaagtgtacttgtgaaccaggcaaagacgttacctggtaccctagctacttctgcactagaaagtacttttcggcagggaattacaagcttccccccggaatctga

SEQ ID NO: 221 - DNA, 1401 bp, Saccharomyces pastorianus
atgacttttgaaaactatttctcgttccagatattttttatcttcttaagggaatccttggaaatcgtcgttatcatatcgattttattgaccattgtcaagcaaggtctgtctgttgatgacgacagctcggttgatggaagctcttcgacggcgctcccaagtcctagtacaaatgtgaacgcagactcgaccactgcatttttacagcatggacacacaaacgctagtgtcgaagggacttctgccacaactcaaagcgacgataatgtcacgaagccacttaacgtggaagaagaagaggaaatttacgactatcccaatgagttaagagagcaagaccgggagcccaacgaacatattgctgataacgtgaaattatatcagaaattaaagatccagatccttgcgggtggtgcgtttggtttgttgctctgtatgctaatcggtggtgcatttgttagtatattctatcacataggtacggacttgtggaccttgagtgaacattattatgaaggtgtcttgagtcttgtcgcatctgttattatctctgttatggggctgttcttcttaagaatggggaagttgagagagaaattcagagtgaaactggcctctatcatttactcaaaggacaataaccttttggggagcaacgctacaaagagcgtcaaattcagtgaaaagtattcctttttcatattaccatttatcacgactttaagagaaggcttggaagctgttgtgttcatcggaggtatcggtattgatcaaccgttaacgtcaatccctctatccatgttgctcgccacagctatcagtactgttttcggtatttttttcttccagtactcgagctctctttcactaaagatatgtctggttgtcgccacatgcttcctttatttgatagcagctggtttattttctaaaggtgtttggcagcttgaattgcaagactatgttaacaaatgtaacggtcaagacatgagtgaagtgggaaatggacctggttcgtacgatatatcccgttccgtttggcatgtcaattgttgtaatggtgaaaaggatggaggttggatgattttcaccgctatttttggttggaccaacagtgctaccgttggctctgtaatcagctataatgtttactggttagtattaataggcgccttgaagctgctaatgatagaagaaaaatacggctacattccttacattcctgtcaactggcaaaagaaacgtattatgaaaagactaaacatagcaaaggcctcgctagctttaaaacaaaatgcttttgaaccaaactcaagtacgtcagatccagacagtcaaaggaagtccagagatagttcagtgcccttaatacttgagagtcatggctcaactaactga

SEQ ID NO: 222 - DNA, 825 bp, Saccharomyces pastorianus
atggtaaaatcgttgcaattagcgcaccagttaaaggacaagagaatacttttaatcggcggtggagaggtcggcttgacaagattatacaagctaatacccacaggttgcaagctgactttagtttctcctaccttacataaagccatcgttccgaagttcgggaaattcatcgacagggagaaccatcccgaatacagagaaaccgccaaacgcatcgtcaattccaactgggatttttccaagaacgaaatttacgagtatattcacgacgaattcaaagatgaatacctcgacctagaggaccatgacgacgcgtggtacataattatgacctgcataccggaccacccggaaagtacaagaatatacaacctcggcaaagaaaggttcggcaaccagcagctagtaaacgtggcagacaagccagagctatgtgacttctacttcggcgccaacctggagataggcgaccgtctgcagattcttatctcgaccaacggactttccccacgcttcggcgccctggtaagagacgagatcagcaacttgttctcacagatgggagacctagcgctagaagatgccgtggtaaagcttggcgaactgagaagaggcatcaggctcctagcgccaaacgacaaggacgtcaagtaccgtatggactgggctaaacgctgcacggacctcttcggaatccagcactgccacgaaatcgacgtccagcgcttgctaggcctcttcaagaccatgcttcaagaacagaaccgctcgctgcagttccctcccagagatcagatgctcagctattactgctcgtcctga

SEQ ID NO: 223 - DNA, 1587 bp, Saccharomyces pastorianus
atggcttctaccccgaacacgttccctccaagccagaacagttcctctggaaaccttcccacatctagacatgcgtctatcgtcgagatgctgtccactccaccattgctgccccaggtgcaggtgaacgaggcagacgacaaagagcagccggaagagctcacgccgccaaaggcagccggtgctcccggacctgctcctgctgccactcccgcacccctccgcgatgaaaagccccaattcaaactgtcagctgtgcccatgacacagactccatcgcaatgcctatcctctgtgcatgctcaaaagtggcagcacattcagctgtcgcaattgattgaacaaaacaagcttatttttgttccgggttccatatcagtagaggaagcctttaacactctgatcaagtaccacctgaactccattcccgtggagtccgttcctggcgacatggactgtttcacttttgactataatgacctgaattcgtacctgttgctggtcttgaacaagatcaccgtcagcaacaaaaagctcaccacagactgccaaaatggaaagcccgtccctgtgggcgagatggtcaaattgactcctaagaaccccttttataaactgccggaaaatgagagtttgtccacggtaatgggaattctcggttcaggtgtacaccgtgtagccatcacaaacgaagggatgaccaaggttaaaggtatcttgtcccagcgtcgtttgatcaagtacctctgggacaacgctaggtcgttcacgagtttggagcccttattgaactcctcgctacaagatttacatataggtgttcttaacatccagtccaagccaacttcaagacaatctcgtgttatctccattcaaggagaggagccgttgattatgggtctttacaaaatgcatgtagaaagaatatcatccattgccgtcatcgataaacaaggtaaccttttaggtaacatatcagtgactgacgtgaagcacgtcaccagaacatcccaatatccactattgcacaagacttgccgtcattttatttcggtcatcttgaactcaagaggactggaaacgggtaaagattccttcccaattttccacgtatacccctccagctctctagcaagaacactagcaaaactggtcgccacaaggtctcatagattatggattgtgcaaccgccagagtcgtccaattccgcatcggcatcctccacgaacttaaccgcatctaacaccgcagctaatgcagctaccggtaccgctcagtcgtcaactaatggtagcgcttccatgtcgaaatcatcttcttcggcatccatcaattctcactctcctttaatgacggcaatggaagatccgccatcgccacgttcctcggccatcgcgatcccaccaccaagtcccgtttcctcaacaagcactccaaacctatttgaaaaagaatacagaacaggaaaactgatcggtgtagtctcattgaccgatattatcaacttactgtcaagaaaacaaaccggaaacaaggcagtggatcctcaatccgcaagaagacaaagaggcagtattgccatgtga

SEQ ID NO: 224 - DNA, 582 bp, Saccharomyces pastorianus
atgagcagaattctagagagcgaaaatgaaacagaaagcgacgaaagctctattatatcgactaacaatggaacggccactgaaaggacaagaaatcatccagaaataaaatcatcgacacacacagttcaaaatagactagaactctttagtaggaggctatctcaactcggattagcaagtgatgcttctgtggaccaacaactggacagctcagctagtagcacttatgaacagaaggagatgaataagacaaatacatcgacagcagagcaaaagaatattgcaactgaacaaaagagtcgcagggaggagcaggatacgcaaaagatccagataaaatttcaaccaattgggtctattgcgcagttgaaaccatcggtttgtaaaatttcaatgtcacaaccttttgctatggtaattctatttctcaaaagacgactgaagatggattatgtttattgttatataaataattctttcgcacccaccccacagcaaaatatcggagaactttggacacagttcaaagttagcgacgaactaattgtaagttattgtgcatcggtagcatttggctaa

SEQ ID NO: 225 - DNA, 1680 bp, Saccharomyces pastorianus
atggaacctaagcgaaatagcgggtccctggccaagcatgacctgccacaattctatcttttgatcatgctatatctggttcaaggtatacctgtaggcttggcgtttggtacggtaccatttttactgaagtcgatggcaaaggagacgtcgttcacatcattgggcattttttctatggctacatatccatattctttgaagattctatggtcccctatagtggattcactgtataataaacgcatcggcagaagaaggtcatggatcatcccagtgcagttcgttagcggatttgtactatgggttttgggttggtgtatatcgcaaggcataatattcgatggggtggacgatgcgttccacggccgcgggaacggttctctgcatagcgttaacataaggaacttgacgtggtggtttgggctcttagttttcctatgcgccactcaagacattgcagttgatgggtgggccttgaccattctgtcgaaagagtctttatcttatgcttccactgcgcaaacgatgggtttgaacatcggctatttcatgtcattcaccattttcctatcgttgaactcgtctgattttgccaacaagtatttcaggaaacttccattggattacggatttatcagtttgggtggatacatgaaattctcggggatactgtacattgtgataaccgtatacatcatattttgcaccaaggaaaaaccgtatcaggagtacttgcccaaagtggagccagccaagtcggaaaatggcgaacctaaaatcctagctatcaaatacgacgatggcgatgtggtgtctgcccagaatactagtagtgtaaggtatatttatcattgtttcataaaagtgttgaagttgaaatccgtgagaagtttagcctttatccacatgatttccaaattcgccttccaatgtaatgaggcagctacgaatctgaaactactggagcaaggtttcaagagagaagacctggctgttacggtgctgatagacctgcctttcgaattaatattcggatattacgttgtcaagtggagttccaacaaggatccaattactcgtgacaacagaagactaagaaacacgggcactaataagtttgtcaagttcttggtgggggatgctggtgtgctgacgccgtggctgtgggggtttctgggtcgtttgattgcggcagtcttgggcagctacgtggtgaagcggttccccaagggcggcgagatctccaccaagtacttctgcctggtgatatttcagcacctgctgggctcatttatgaacaccgtccagttcatcgggatctcggcatttcacacacgagtcgcggaccctgttctgggcggtacgtatatgacgttgctgaacacgctaagcaatttcggcgggacatggccgcggctgatcataatggcgatgatcaaccacttcaccgtatacgagtgtgtcatcccggacactaacaaagtgtatgtgacccacggcggtaacatgcaagcgtgcaccgacgtcctgaaaggctccgtaaccgtcttgcgcgacggctaccacatcaccaacatcgtatgtatcacagttgggatcctcctgtactttggatacctgaagaaaaagatcctccacctgcaaagtctgccgatcagctcctggagatgtacgtaa

SEQ ID NO: 226 - DNA, 1095 bp, Saccharomyces pastorianus
atgttttctagattgccaacctatttggccagaaatgtctcacgtcgtgctccaacctcttttgttagaccctcagtagcagctttgaggttctcttctacaaagacaatgacggtcagagaggctttgaacacagccatggcggaagaattggaccgtgacgacgatgtcttcctcattggtgaagaggtcgcccaatataacggtgcttacaaagtgtctaaaggtttattggacagattcggtgagcgtcgtgtagttgatacacctattaccgaatacgggttgacaggtttggccgtgggtgctgctttgaaaggtttgaagccaattgtggagttcatgtcgttcaatttctctatgcaagccattgaccatgttattaactctgctgccaagactcactacatgtctggtggtactcagaagtgtcaaatggtctttagaggccctaacggtgctgctaagggtgtcggtgcccaacattcgcaggatttctctgcttggtatggttccatccccgggttgaaagtccttgttccttactctgctgaagatgccagaggtttgcttaaggccgccatcagagatccaaaccctgttgtctttttggaaaacgagttgttgtacggtgaatcctttgaaatctcagaagatgttttgtcgccagatttcactctgccatataaggctaaggtcgaaagagaaggtactgatatttctattgttacatacacaagaaacgttcaattctctttggaagccgccgaaatcttgcaaaaggagtacggtgtctctgcagaagtcgtcaacttgcgtgcaattagacctttggatactgaagccatcatcaaaacagtcaagaaaacaaaccacttgatcactgtggaatcgactttcccaaccttcggtgtcggtgctgagatcgtcgcccaagtcatggaatcagaagcgtttgattatttggatgctccaatccaaagagtcactggtgctgatgttcctacaccatatgccaaggaattggaagatttcgcctttccagatgctccaactattgttaaagcagttaaagaagtcttgtctatcgaataa

SEQ ID NO: 227 - DNA, 1632 bp, Saccharomyces pastorianus
atgtcaagtgccgctactgttactgcttcgtttaacgatactttcaaagtatccgacaacattgctgtcattgttcctgaaacggacacccaggtgacctaccgggacctgtcccatatggtaggccactttcagaccatgttcagtaacccttcttctccgctgtatggcacgatcttcaggcaggacactgtggcaatctccatgcgtaatgggctggagttcatcatcgccttccttggggccaccatggacgccaagatcggtgctcctttgaactccaactataaggaaaaggagttcaatttctatttaaacgacctgaagtctaaagctatctgcgttcctaagggcactacaaagttgcctgactccgagattttgaagtccgcctctacattcgggtgtttcatcgtggaattgagctttgatgcagccaggttcagggtagaatatgacatctactctccaaaggacaattacaagaacgttttttaccggtcgttgaacaatgccaagtttgtcaacacggaccccgtcagatttccagggtttgctcgttccagcgatgttgctctgattttgcataccagcggtaccacgtccactccaaagactgtacccttgttgcatctgaacattgtgagaagcacgttgaatatcgcaaacacttacaagttgacgcccttggaccggtcctacatcgtcatgcccctgttccacgttcacggattgatcggtgttttgctatctacctttagaactcaaggctcggtcgtggtgcctgacgggttccacccaaagctgttctgggatcaattcgtcaagtaccattgtaactggttcagttgtgtgcccacgataagcatgatcatgctgaacatgcccaagcccacgcctttcccccacattaggttcatcagatcgtgttcttctgcgttggcacctgcaacgttccacaagctggaaagggaattcaacgctcctgtcttggaggcctacgcaatgaccgaagcatcgcaccaaatgacctcgaacaacctgcccccgggaaagagaaagcctggcaccgtgggccaaccacagggcgtcattgttcttatcctggacgataaggacaacgttttgcccccaggcaaggtcggggaggtctccatcagaggcgaaaacgtcacactgggctatgccaacaacccaaaggccaacaaggagaactttaccaagagggagaactacttcagaaccggtgaccaaggctacttcgacccggagggtttcttggttctcacgggcagaattaaagagctgatcaacaggggtggtgaaaagatctcgcctattgaactggatggtatactgctgtcgcaccccaaaatcgacgaggccgtggcctttggtgttcccgacgacatgtacggccaggtggttcaagccgccgtcgtcttgaagaagaacgaaaagatgacctacgaagaacttgtttccttcctgaagaagcaccttgcagccttcaaaatccccaccaaggtgtattttgtcgacaagctgcccaagaccgccaccggtaagatccagagaagaatcatcgcggagaccttcaccaagagcagcaaaaacaagagtaagttgtga

SEQ ID NO: 228 - DNA, 2703 bp, Saccharomyces pastorianus
atgtgctccactaaggacgcaaagaatactgagaacaaaaatgataagagctcaacaagtgttcctagcaacaaatttgcaaatttaaaaccacatgattattgtacgggtccgggatcagtcaccactgaacacaaaaacaacgacaaagaaaaagggaagcaggaaaaggagaacaaagatggaacccctcattcaaatgcttctgcagaatcacgctctccgcaagtcagccatcattctgagaaattcccctcttttgattcacctttacattttccaagcctgaggctgccagatgacttgttatcaaacacgtcaagaagatcatcagattccacagcatcatcttctgtatccagactaaaacctgtccaaatttccaaagctgctttgcacccttgtcatataacgaataaactggacagtagagacggaactccggggtttgagtcgagggcaaacccctcatctgactcctctacacctcgattcatcgtatccaatatggtcgggaatggtcgtggaggaggcggcctacatggcgctacctcaaacgttgttcaaaaacttcactccaggaaaagatgggactggaacagcttgccaaactctgattcctctcttttaattagatcagcctcaggaaaccataatttcattaatatttgcatagacggtgaattcaaacaaataaagtacgatccgaatcataatgagctctttaatagaatggaccttttcctatcttttaatatggattcttcgccaaaagattcactaatttttgctaaaaaaaggttgaattcatacattgaatttttaacaacatacctaaagtccagaaaatacgcatttgagtgttatccatttaacattgaaagtatcataagcatcgaaactgaagttaaatctttcccgtcgtttgacccatcaaaggactattctgagattgaatcgcttattcaattatggctggcccaggcccagaagtttttattacaatcaaactcgttttttttttcatccgaagtggtacaggaattaatcaaaaggaaaccaactacaaggcaacattccaatcctataatcagttcgaccagcaataaactcagtgatcccacattatatattcaacaactagatatagagcaaaactccccgagaccagtattatcggatccattagatgaaattgacatcttgctaataagaccactgcataaaaccctggcaggttggcagctagcttacgacgagccaagcttaaacattgcggacttcccattggatttgtctcccttgatggttgacaatggcaacaaagatactcaaaacaacagaacagatgacaatagtgacctgcctgaagatttgacgaatttgcagaattatctccccaggaaaggctccaaagtaaaaattgtttccgatgagcgagaaatcattgagttaaactcttccaacgcttcagaatatatgtttgattgcatgaatagaaaattttttactaatgacgcaaaagagcgtattttgagaaacaactttaatcaaggcattgatgaagattactcaaatgatccatttgcttcaactagatctttatcattaccatcctcagcggcagaaataagcaagagaaagaaaagtcccgccaagggcaacaaaaaatcagggtttgttaatttttttaagagaaaacactcccaattcgcatcgacttcccatgctacgagtccttcaacttcgcctaacatatcttcttcttcttccccaaagatgcaaccacaatcacaccttcctagcaatttccgggcagacaaagtccatcataccaagtcaaccagtcaaacacttcagaacgaatggctagaaaactttttttgccgaaccttgaataactataaagaaattgatttgccaacacaatttatcctgccaaaggaaatcaagaatcctttgaattcacagccccaatcccaaggcgagtcacttatatcatcaccagcttctactgatacagaagacattgttccaaatgaaggattagatagagcaaagagtgcagccacctacggcaaagaatatctacaattaagattaccgttcgcttctgatactatacctgccgtaatatgcccttgggtttggacaagtttaagttattataaatggaaggctctactgagggagatatacaggtcaattattcctggcggttacgctcttgcaattgttccagacttaagaatatcgaatacctactataatgcaaatcctggcaatgacgacactaataatgctggagatgagtttttgacaacaaaagaaagagaaaagacattcgatgctatgtctattgatgcaatcaacaaaggccttcacattcatccaaccaagcacttaacgaaaacatttaaagacgtagggtttacagggattaaatcttcagttctaagcttaaaaactggtgaccttaaaacagatatggggtttttaaatgaactcaactcattaaatgcttgggatcatatgttaaggaagcaactgccagatagtagcactcctccaaaagataccgatccttccactctttttcaacgatatgtggaagaacatatgggaaaaattgacaacaattctggttgcttcagaaccttatacgttgtggcacaaaaaccaaagcagccatacacgaagtaa

SEQ ID NO: 229 - DNA, 1293 bp, Saccharomyces pastorianus
atgtccacagagactacaaaaccgcctctcactactactactacttcttctactgctgctgctgctgcagcagcagcagtgggtgccgccgtgctgaactcccccaacgttcttaaaagaaagaagggcgaagacaccaacgaggagcaactcgaggcagagatcaaacgggtggccctcgacgatgcggaggaccactcagacaccgataacgtccccttccacgtgcatttgcggatgctctgcctcgtgaaacacgcctcgctgatagtgggccacaaaggtgccacgatctccaagataaaaacagaaacctccgccagaataaacgtctcgaacaatatcaggggcgtcccagaaagaatcgtctacgtaagaggcacctgcgatgacgtggccaaggcctacggcatgatagtgagggcgctgcttgaagagcaggagcgcgaagacggagacagagacagagacaaggacgaggacgaggacgtcgaggtctccgtcaacctgttgatacctcaccatctgatgggctgcatcatcgggaagcgtgggtcccgcctaagggaaatcgaggacttgagcgctgccaagctgttcgcgtccccgaaccagctgctgctgtccaacgaccggatcctgaccatcaacggtgtgcccgatgccatccatatcgccaccttctacgtggggcaaacactgttgaacttccagatggagtctccacaaaagaaactgaaacgatccattttctaccagcccacccagttcaactctgtgttggtagaccatagccacccgaatgccgttctccaccagaggaatcaccagtaccacccaaacgataaaccgctttccagcagaccgaacagaaggatctccgtatcgtcaaccctgctgagcacgggccctccacagtataccactgccagcgcagcaaacgccacggcattccaaccgaacttcgtcatccctaacgtaaggatcctggacggccccgtcatcaacccaggcccgaacaatcatctgtcaatgagccttgtacagcaagaaatcttcatagacgagtctttcgtcgggaacgtcatcggcaaagacggcaagcacataaactcggtcaaggagtccacgggctgctcgatcatcatacaggacccggtggaaggctcccccgagagaagactgtccataaggggtaccttcatggcttcccaagctgctattatgctaatcagcaacaagattgaaattgatagattaaacgctgaacgcaaaagaagaacgcccctctaa

SEQ ID NO: 230 - DNA, 285 bp, Saccharomyces pastorianus
atggagcataccctttcgcccttacaacaggaagtgctaaacaaatacaagcagctttcgctggatctgaaagcgctggacgaaacaatcaagcagctaaaccactcgcagcaccgacaacagcacgaccaacagatcaccgtgtcgccagatgaaatattacaggaaatgagagaaatagaagtcaagattggtctggtgggaacactgctgaaaggtagcgtgtactcgctcattttgcagagaaaacaagaacaggaagctttgaatcgttctgatcgttga

SEQ ID NO: 231 - DNA, 1155 bp, Saccharomyces pastorianus
atgtcgttttccaattccaaagataaatcgattgttgccgtctacaaattagtcaaggcaccaatatattcccattgcttttcccaagataaatccatcttggccattacatgcgaaacggattgtttggtgtataaagtctcaggaagtcaacctcctgttttattcgccactttaaaagaccatgacaagaccatcaccgcagtggacatttctgttcatggccgtattgtgacctgttctcaagatcgtaatgcttacgtttgggagccattgagtaacgggacctacaaacccactttagtgcttctacgtatcaacagagccgctacttcagttacgtgggcatcaagtgggtacaagtttgctgtggggtccagtgctagagttattgccgtttgttattacgaacacgaaaataactggtgggtgtccaagcacatcaagaagcccatcaagtctaccgtcaactgtttgtcgtggcacgacaatggtgtactattggctgctggtggtactgatgggttcatgcctgttttcagtggattcatcaaaggtttggactccaaggaatccgtagccgggtctccctggggccaaaaatttccgtttggttccttgattaaggaatggtataatggtgcttacatccatgatgtggagtggagaagtcaaatggaaaggatcgcgtatgtagcgcacgatggtactttgaatgttgtcgattcccaatctgcagtacaatctgtcaatgctccagagggcctaccatacagatccttagtgtggatcaacgaccatgagattatttgtggggggtattcttgccacccggtcttgttcagcgaggcctctgaaggctggaagttcgccaagaacctagacaaagccgataatggcaagtcatctgccctgacaggagcaggtaacaacaacgagttggatggagacaacgaagagaacgcaacatttggtatctctgcgttgagaaagttcaaagagctggacctgaaaggtaaagtcagcactgatgttcaagaaagcgcacatgaaaatgctattgtggagttaagaccttttgcaggatccaatggccaagttacgcaagtttcttcgtgtgggctagacggtaagattgtcatttatacaatttag

SEQ ID NO: 232 - DNA, 3333 bp, Saccharomyces pastorianus
atggtcagcaggttttatcagattccaggtacacatcggcctgcatcggcagtgtcttcttcaaatgaatcatcgtctttgttgtcagcaaggcgaataagtcagacctactttaactatcaggctactcctgaatttcaaaaggtatcttctaagtatgatcccgataaccctaataaggataagttgggaacctacggtggtgtgtttgtacccacagcattgaatgttttatctattcttatgtttcttcggtttggctttattttaggtcaactcggtattatatgcactattggtcttttgctcctgagctatactattaatctcctcaccacacttagtatttccgctatatctaccaacgggactgtaaggggcggaggcgcttactacatgatttcaagaagtttggggcctgaattcggaggatctattggtcttgtgtttttcttgggccaggtattcaatgcaggtatgaacgccgtaggtatcattgagcctttgctctacaacttaggccattctgcacatggcgaacctccagcagctatgggagaactattaccaagaggacattggtacgagttcacatatgctacaataatcctttttctgtgcttttcagtggcattcgttggctcacaaaccgtgtctagagcagggaacatccttttcttaatattagcagcctctatattttccattcctctctctgcgcttataagatctccgtttgttgaaggtggaatcagttacacaggccccacatggcaaactttccgtgataatcttttcccccatttgactaaaggagctgcaggatcgttacttaagggcaaagaaacctttaatgatttatttggtgtcttctttcctgctaccgctggtatatttgccggcgcaggaatgtcgagtgaattaagaaagccctctaaatcaattccaaaaggcactttatgggggttactgtttacttttatctgttatgcgatcgttgttttctctatgggttgctccattccgagagcttcattacataatgaagtacaaattatccaaacaattagttcagcacaatgggttatattcatgggtgaaatggccacatctctattttctattattgtaggtatgctaggtgctgcttatgtgttggaagcaattgcaaaggataatatgattccaggtttagagatatttgctcataatccagtatactcattaattttcacttggcttttaactcaactgtgtttattttctgatgtcaataagattgccacatttatcaccatgacattcttattgacatttatagttatgaatttggcatgcttcttactgggcatttcttcagctcctaattttaggccttctttcaaatatttcaacaggtatactacggctgctggtgcattgctctctgtcgttgcgatgttaatcgtagacggtgtttctgcctccgttttatttttggctatgatcttactatttttatttattcactacttctcgcctccaaaatcttggggtgatgtatctcagagtctaatatatcatcaagtaagaaaatacctgctccgtttgcgtcaagacaacatcaaatattggagacctcagatattgttgtttgtagacaacccaaggacaagctggaacctgatacggttctgtaaccatctgaaaaaaggtggtttatatatcctaggccatgtagcagtaactgcggattttccaaagcaattaaatgagttgaaaacccaacagaaagcttggataaaaattagagatatggcagcaataaaggcgtttgttcaagtcggaaccggcccctctctcatatggggaatcagaaatgtttttattggttctgggttgggaggtatgaaaccaaatattaccgttgttggattttttgacttgaatacttataagaagcgtgtttcgcgaaataacgaaaacaatcaggagcgcctgcaagtaacagccaatttaccaggtagctcgtcttctgatataagaataaatgttccattgcctacggatgaatgcaaaaatgaaagcaaagttaatgttcaacaatgggttcaaattgtagaagacctgtcattaatgcaatccaatattgctatagctcacggcttcaaagtgttgaagataccaaataaaaaggaccgctgttctccaaggaaaacaatagatctttatcccattcagatgtgcggaaaagtccaggccacagatgatcagcctgcatcggtcactacgaattttgatacatatacacttatcttacaactggcagcaattctaataactgtgcctgagtggaaacatacacatgcgttacgagttatcttatttgtggaacaagaatatcatagaactgatgaagttcaacgaatgaaaaaactattgcaaattttaagaattgaagctgaagttctggtagtgtctttagatcagtttagggtatacaacactatcgtcaggggagattcaatcgtatttgattatgtaaacgcgaagctagccgataacgaatggtggcaagatttggtagaagctcgtgatactttgaaaccgaagcggagattttctaccattgaacctcaatcgatagcaaaacaattcatgcaatcaagaaagtacacttctcgagtccagaaactaggagtttcatttaccatgaatacaagtatgccaagcaaccggattgagaatccgtttgagagtgaagattctgatttagatacagatttaacatcaatccgcgatagcttctcaacgtctacgattgatccaggcagtaaggagccgacagtcaagtctaaggctggttctgatagaaccaatttatttgtaaaaaacttacaaaacaacgcttcaactcagtctttgagacctgtgttctcaagcaataccttaccaaggaccaaagtggtagaagacggaacgggtgaacagccaactttaatcccaattgtggaaccgaacctttcaaacgggaacgggaataaatcaaagagacctgttcttcccgaactttctccttgctgttcgaaagatagtttagttactgcaatgcaaaacttgggctttaacgatcttcctagtacagctcaacatttggttctaaatgatatgatgacacagatgtcaaagagttcagatttaatcttttcaactttaccaattccagcacttggaacacataaggatcatgaggcaagtctacaatatgttgaagacttagatatttggttggaaggtttgccgccatgtatgttaattaattcgcaaaccatgactgtaactactgcattatag

SEQ ID NO: 233 - DNA, 2553 bp, Saccharomyces pastorianus
atgaaaagtattggttcgacagaaaatagagagagggagtctctactcgaagaaaggagaaaaaaactagcaaaatggaaacaaaagaaagcacaatttgatgctcagaaagagaatcaaactctaaacagtaacattgttactaacagttcagagattaagcagaatgctggaaagtttgccgcaaggcaggaaaaggtgaaagaaaagcttcgaaaaaggaaaattgaactagagaaacctcatcagcgtctattggataaaccttcaaagaaaaagtctaagaaaaacaagaaaaaggacaaggtgtctttcgaattcagtgataatgaagaagcagtagcagtgaatgctttctcaatgaacgaagactttaaagacatagcggagcacgacgatgagaaggatccattagatgagtttatgacatcattgaaagctgaagagactagccgtaataaaatcttgtacgattcaggagtaatcctggacgcagatgatcaactggttgaattggaagaagctgatgacgaaaatattaacgacagcaccgataactctaacatatctaaaattgccaaactaaaagcgaaaaaacgtgtaaagcaaattaattatctgccggaagaactggagtcatttcaaaagaacttctatgtagaatctgaagcaatctcctcgatgactgagacggaagtagaagagctcagactgagcctggacaacatcacaataaagggaacagggtgtccaaagccggtaacgaagtggacacatttggggctatcaacagatactatgaatttaattaccaacaggttacgatttgactctttaaccccaattcaatcccaggcgctgccagccatcatgtcaggtcgtgatgtaattggaatatctaagacagggtccggtaaaaccatatcttatcttttaccattattaagacaagtgaaagctcaacggccattatctaagcatgaaacagggcctttgggtttgattttggcaccaacacgggagttagctctacagatacatgaagaagttaacaagttcacagaaacagacgcaagcataagatcggtatgctgtacgggtggctctgagatgaagaggcagatcactgatctcaaaagaggtgctgaaatagctgttgctacgcctggaagatttattgatatactaactttaaacgacggaaaattgctaagtaccaaaagaataacatttgtaataatggacgaagcagacagattattcgatttaggctttgagcctcaaatcacccaaattatgaaaacagttcggccggataaacaatttgttttgtttagtgcgactttcccaaataagttacgtagttttgcggtcagagttttgcgatctccaatatccattacaattaattcgaaaggtttggttaacgaaaacgttaagcaaaagtttaaaatatgtcaatcagaagatgaaaaatttgataacctgatacaaattgttcgtaagcgcaacgaattttttgatgaggctcaaaccgaagttgacggagacacgagtgatctcgaagaagttgattctaaagctattatatttgtgtcaagccaacagatttgcgatttaatttccaaaaaactgacaaacgtgggcgttgtgacctacgctattcatgcaggcaaaccgtatcaagaaagagtcatgaatttggaaaaattcaagagagagaaaaatagcattttgctttgtacagaagttctttcaagaggcctgaatgtgccggaagtgtcactggttatcatttataactccgttaagacatttgcgcaatatgttcacactaccggaagaaccgccaggggtagtcgttcgggtattgccataaccctcctgctaaatgatgagttgtctggggcttatatcctaagcaaagctatgcgtgataatgaactgaaagcttgtgatcctttgcaaaccaaggaactatatgaaatgagtgagaagtttgaatcgggtatgaaaaagggtaaatttaggttgtcgaaaggatttgggggcaaaggacttgaaaatatcaaaagcaaaagggaagaagcccaaatcaaggaattggaacccaagaaaggtcaaaagaacaacgatcaattggagaataaaagcgaccattcatctaatgagcacgctaatgaagcggaatcatctgcgcatattccaaaattggaatatcaaatcttcaaagagcctacattagagggatccattatcttttatgccaaagtttatattaacgacctgccccaaattgtaagatgggaagctacaaagaacacgacactgttatttataaagcacgaaactgggtgtagtataactaacaagggcagattttatccggaaggaaaggaaccgaaaaatgacacggatgaacccaaattatacttgttgatcgaaggtcaagatgagaaggacatacaattgagtatcgaattactagaacaaaaagtaaaggaaggggtcataaaggctgcaaatatatccttgaaaagtacaaagtattga

SEQ ID NO: 234 - DNA, 1584 bp, Saccharomyces pastorianus
atgtccacttcagatgacaacgactacaacacaccgcgtgctcgagatacacccgtagatataagcaggtccctcggggaaaaaaggaagaaaagaaagaacacaaatgtggcatgcgtgaactgttcaagactgcatgtctcgtgtgaagccaaacgaccatgtttgcgatgtatcagtaagggtctcacagccacttgtgtcgatgctccaagaaagaaaagcaaataccttgcagggattccgaataaagaacttccaatgaatatacggccggatcatcctcgcaagatcatgatacccatctataataattccaacaacagctccactggtataaacaacataggagagcaacagaagtttacgagcccacagcatatcgttcacaaagccaagttcatgtcgaacgctgctgactctgagtactccattctatcgaacataatctatcaagatacgttgtccaataagatccccatcgacattttatactccaacactaattctgcatccaactccaccatgggaaatagcagcaataacagtcccacggggacgaacacaagtcccgaagaaactgaaacggagaaaatccgccagctctacagcgaacagcgagcgaacatggcctcgcatccgtatccgtcttccaatcaaaatgtttattcaatattgttggggaccaattcagccaagatcgtggcctcgcatgttaatttgtttgcaaatcacttccctttggttcctgtagagccacttgatggttctttaaacttcaaaagattactaccgaaaagcccatccgaaaagggctcgcaaataaactgggatgcaagcataaaccagtactacttgaacagcgaaatagtgacgttccctgaattagccctacccttgaaaaagaaaaagaaccatttagtctctgtatcattggaaagctgttcgccggacgccacaaatataaagagtaatgtggaatgggaacactccttgagatattccacgccaatggaaatatacacttcgacaaacgcaccattctcacacactcccgggttccaccatcttttagtgtacttaaagcatcgattcaaccagcaggatctggtgaagatgtgtcggtccatcgccgagttccgacccattttcattgcgtgttcagtaacattaactgaagaggacatgattttcatggagcaatgctatcaacgaacgctattagaatacgtaaagtttataggacagatcggcacgccgacgtgcatttggcgaagaaacggccaaatctcttacgtcaacgaagaattcgaaatcttaagcggttggacgagagaagaattattaaacaagatgacgttcatcgtggagatcatggatgatgaaagtgtacgagattacttcaagacgctctccaaagtggcgtacagagactttaaaggttctgagaaaatgaaagtctgtagactcctgagccccatcaagggtaaggtgatccattgctgttgcatgtggacgcttaaaagagatgtctccggattgcccctgatgattcttggtaatttcatgcccatactcaattga

SEQ ID NO: 235 - DNA, 1356 bp, Saccharomyces pastorianus
atggtcaattgcaagaaacagcagcggaacaagaaggtaacgctatcctcgaagccctcccccaccaagggcagaacatttactggatgctgggcgtgcaggttcaagaagcgcaggtgcgacgagaacaggccgatctgctcgctgtgtgccaagcacggggacaggtgcagttacgatatcaggcttatgtggctggaggagaacatttacaaagtgcgcaagcatgcgctgatcaattccatgcaggccggcaaatcgaaaccactatgccagaagatctccaagagcaggttcaaggagatgacccatttcagacagctctcgcctccaacaagtgacagtgaagacaccacgcaggagcccagcaagaacaccgtgctccccaacgagaacacattcacgataagcgtccggcggttgaagatctacaacaacgcggtggcttctgtgttcggcagcctctccaacaggaactacaaccaaaagcacatagacaagaaattggaccagttgctggacatggtggaaagcgacatatccattgctaacccgagctgtgccaaacacggtccttactcggttttcaaagccaacccggatgcctccacgaccgccgccacgataacgctcacagatccgcttccgtcaccaggccactccctgtcttctgccgatgaggcgactgcaaacatcctgtcgtcgccggaggacaccacctcgctgatcgatatcatccagggcaagatcttcgggatcctgtggttcaactgttacgggaacatgatcttgaaccgacaggagtacacgacgtggttcatcaacaagatgaggaactcgctgaccacagaattcgtccgctttctggggaaaatcatagacgatccggacatcaacatggcttcgtgtctgttcaaagagtgcaccgctcgttgggactgcgtcgattggcagtccatagctataacaatgctggtcatcatccatggatacacctgccccaacctgacaaagctccttagagtgtggttcctccagcaactatccttgaagttctctatgtatccgctgatcaactttatcataaacaacacgcaggatttagacgttctgtaccactgcaacgaattgctgggcaatgcggagttgttcgaagacccttaccaggacgaactcacttccgaactgcatgtcttggtcacggagcgtctagtgaacaactggaaggacagaatactgcagcagctttgctcttgccaagacactacactttcatgttctcaattacggtattggcaactacaattaaaatgcaacgaacaattttataaagatgtctacgccatgcaggattag

SEQ ID NO: 236 - DNA, 1470 bp, Saccharomyces pastorianus
atgactgaaacggaaagactaatgcctagcagtggctctcagaacaggaagccgtcaattacaggccacttgatcctgagcatgatagtggcgtgcttggggtctgtccagtacggataccacatagcagagttgaatgcgccccagcagttcttatcgtgctccaagtttgactcccccgacgagaacatatcgtacggagacacctgggtgggccaacacggtctcaagcaatgtattgcgctgagcgattcccagttcggtgccgtaacgtccatacttagtattggtgggctgtttgggtcgtactacgcggggaactgggccaatcggtacgggaggaagtacgtcagcatgggcgcctcagccatgtgcatggtgtcgtctttgattctcttctactccaactcgtatctgcagctgctcttcggcaggtttctcgtgggcatgtcctgcggtaccgcgatcgtaatcacgccactgttcatcaatgagatcgcgcccgtggagtggaggggtgccatggggtccatgaatcaggtgtccatcaacctgggcatcctgctgacgcagaccctggcgctcaagtacgcggactcctacaactggagatggttgctgtttgccggctccgtcatagccttggcaaacattttgatatggctcagagtagatgagtcgcccagatggcttctgaacaaggggtttgttcctgaggcggagatggttttgttcaagctgcgtcccggcacgtaccagcaggcgaagcaagagatccaggactggcagcatgacgacgcacaggaccgcgactcggagtccggcgcaacagcaacacactcgggacccacactgtggcagtatgtgcgcgacccctcgtacaagaagccgcgcacggtcatcctgaccatcctgtcgtgccagcagttctgtggcatcaactcgattatcttctacggcgtgaaagtgatcggcaacctcctgccggactactcgatccagatcaacttcgcgatctccatcctgaacgtcgtggtgacgctgcttgcctcagcaatcatcgaccacgtcgggcgccgcccattgctgctcgcctccaccacggcgatgaccgccatgtcgctgctgatcagtctcagtctcaccatgggcgtgtccttcttgctagtcacggccacgttcgtgtacattgccgcgttcgcgatcggcctggggcccatcccgttcctgataatcggcgagctgtcgtacccgcaggatgctgccaccgcacagagcttcggtactgtgtgcaactggctggccaccttcatcaccggatacctcttccccatagcccacggcctaatgggcggctacgtgttcgcgaccttcgctgccatcgcggccctgtttgcaacgtacgtgtacaagagagtccccgagaccaaaggcaagactacgtacagcgaggtgtgggccggctactga

SEQ ID NO: 237 - DNA, 489 bp, Saccharomyces pastorianus
atgtctacctctttttatgacttagaatgcaaagacaagaaaggtgaaaccttcaagtttgaccaattgaagggcaaagtggtgctaatagttaacgttgcttctaaatgcggtttcactccacaatataaagaactagaggaattatataaaaagcatcaggataaagagtttgttatcttgggcttcccatgtaaccagttcggtaagcaggaacctggctctgatgaacaaattggcgaattctgccaattgaactatggtgttacattccccatcatgaaaaaaattgaagttaacggaaacggcgctgatcctgtttacaatttcttgaaaagccaaaagtcaggtttactgggctacaagggtattaaatggaactttgagaaatttttagtagatgctaatggtaaggttgtccaaagatattcttccttaacaaaaccaatgtccttagaccaagaaatccaaaacatggtaagcaaatga

SEQ ID NO: 238 - DNA, 1164 bp, Saccharomyces pastorianus
atggactccattcaagaatccgaggtacttaatgctgtaaaaacaaaattaccaccatgttgcttgagaatattcaagaataaggtaattctagtgggaacgtatgacttggataagtccacaggatatagatcaggatcactggatgccttcacaatggatcttaaacctttgtgctcctacaatacatatggagccattttagatttaaaactatctcccttcgatgatacattaatatgcacagcccactcaacaggtaatattatgctatggaggattgattgctcagaggtgggcgagagtgaagtagaggaaattaaaatatctgaaattgcaactttacagctattcgacaaggatgttctcatagcttcatgtcatttttctccactcgatcctaggcttttagtggtgacgaatacagtcggtgaagccgctaccattgatataataagactaaccgtaaaatttacagcatcagcggttaatcaaacgtactccaagttagataaaatagattatgaagttcaaggtgcaactcaaaaagtcattcaagttgaaccagagcaatttctaaaaccacatggtttagagtgctggacggcagagtttggttgtctacaacctttccaagatatagtattcacaggtggtgatgattctacaatcatggctcacgatttacgttcgaaagatttcgtttggagtaatggtcgcattcacgaagccggtgttgtcggtatcaaatgtagccgatctagctttcgaaacgataaaccaacttcgataataactggatcgtatgacgataccattcgttcactagatttaaggatgatgggagaatctatatatcctggtgagaatgtgccggtagtacgtaagttggagtgtaaccttggcggcggtgtttggaggttcgccgagcagcctattgattttagtagctctttccgtgatggacttgacagacttttggtctgctgcatgtatgacggtgccaaaatagtggcattaaacgataattcagatgaatatttccaaactcagcattacctaaagaagggacacgactcaatgtgttatggtggggactggtcaaaatcgttgattgcaacatgctcattttatgataactctctccaaacatggactgtttag

SEQ ID NO: 239 - DNA, 1443 bp, Saccharomyces pastorianus
atggcaagagcttcttcttctagaaacaaaaaacaaagacatgatccacttttaaaggatttggatgcagcccaaggtaccttgaaaaaagttaacaaatggaaagtagcaaaaactgaagctgctgaaaccgatgctggaaagggtgaagatggctatatagattccaaagcatcgagaaaaattctacagttggcaaaggaacaacaagatgagatcgaaggtgaagaacttgctgaatcagaaagaaataagcaactcgaagccagattcaccaccatgagttataacgacgaagatgacgatgacgatgaagaggaatttgaagaggatatatcagatttcgagccggaaggagattataaagaagaggaagaggttgttgagattgacgaagaagatgctgcgatgttcgaacaatacttcaagacatcaaatgactttaattctttaggtggtagctacaaccttgcggataagattatggcctctattaaagagaaggagagccaaattggagatatgcaagacgatgaacaagctgctaatgaacagggtacctcaagaggcaatatatcatccggtttgagaagcggagaaggtgttgcattaccggagaaggttattaaagcatatagcacggtcggtagtatcttgaagacctggactcacggtaaattaccaaagttattcaaggttatcccatctttacgaaattggcaagatgttttatatgttaccaacccggaggaatggtcaccacacgttgtttatgaggcaacaaaattatttgtatctaacttaacagccaaagagtctcagaaattcatcagtctaattctacttgaacgtttccgtgaaaacattgaaaccagtgaagaccactctttgaactatcacatataccgagccgtaaagaaatcgctttataaaccaagtgcctttttcaaaggctttttattcccgctggtcgaaacgggttgtaacgtacgtgaagccacaattgccggaagtgtgcttgctaaaatctctgttccagctttacattcttcagcagccttaagttatcttttaagattgcctttctctccacctacaaccgtattcattaaaattctacttgataagaaatatgcattaccataccaaacggtcgatgaatgtgtttattactttatgaggtttagaattgtggatgacggcagtaatggggaagattctacaagagtgctcccagtgatatggcacaaagctttcttgacgtttgcacagcgttacaagaacgatataacccaagaccaaagagatttcttattagagaccgtccgtcaaagaggtcacagggatattggtcctgaaattagaagagaactattggcaggtgctagtagagagtttgttcctcaaggagctaatgatgatttaatgatcgacgtcaattag

SEQ ID NO: 240 - DNA, 1113 bp, Saccharomyces pastorianus
atgagtgaatccccaatgttcggtgccaatggcactccaaacgtaaatgaagctgctgaagaagatgtcagaattttaggttacgacccattagcctctccagctctccttcaagtgcaaattccagctactcaaacttctttagaaacagccaagagaggtagaagagaagctatagatatcattaccggcaaagacgacagagttcttgtcatcgtcggtccatgttctattcacgatctaggtgctgcccaagaatatgctttgagattaaagaagcttgccgaagaattaaaaggtgatttatctattattatgagagcatacctggaaaagccaagaactacagtcggctggaaaggtctgatcaatgatcctgatgtcaacaacactttcaacattaacaagggtttgcaatccgccagacagttgttcgtcaacttgacaaatatcggtttaccaattggttctgaaatgctagataccatttctcctcaatacttggccgatttggtctccttcggtgccatcggtgccagaaccaccgaatctcaattgcacagggaattagcctccggtttatccttcccagtcggtttcaagaacggtaccgacggtactctgaacgtcgctgtggatgcttgtcaagccgccgcacattctcatcatttcatgggtgttactaagcatggtgttgctgctatcaccaccactaagggtaacgaacactgtttcgtcatcttgagaggtggtaagaaaggaaccaactacgatgccaaatccgttgctgaagctaaggctcaattgcctgctggctctaatggtttaatgatcgattactctcacggtaactccaacaaagattacagaaaccaaccaaaggttaacgatgtcgtctgtgaacaaatcgctaagggtgataacgccatcaccggtgtcatgattgaatccaacatcaacgaaggtaaccaaggtatccccaccgaaggtaaagctggtttgaagtacggtgtttctatcaccgatgcttgtataggctggagtactactgaagacgtcttgagaaaattggcttctgcggttagacaaagaagagaactcaacaagaaatag

SEQ ID NO: 241 - DNA, 924 bp, Saccharomyces pastorianus
atgtttaggaggcaattctcaactagtgttcgttacttacagcactatgacgagtcgctattgtcaaggtactatccagaaagtctactaaaatccataaagcttgctcaacaaacaattccacatgacaccaagttcaaaacctcccgtaatgtggagtttgcacccccatatttagatgatttcactaagatacatcctttctgggattacaagccgggaatgcctcatcttcacgcacaagaagaggaaaataactttaccacatttagatgggaccaagttcagcaaccgttgcctggcgaaggtaacattctacctgcgggagtcggtctgcccaatgatagcggtaggaagtcgaagaatgcggacgtggctgcagggctacacaagcaaacaggtgtggacccggattatattaccaggaaactaatcatgaaacccttggttatgaaaagggtatcgaatcagaccggtaagggtaaaattgcgtccttttatgccctggtcgttgttggagataagaatggtatggtaggtttgggagagggaaaatcccgtgaagaaatgtccaaggccatcttcaaggctcattgggatgcagtaaggaacctgaaggaaatacccagatacgaaaatagaaccatatacggtgatatagatttcagataccatggtgtaaaactacatttaagaagtgccaaacctggctttgggctacgtgtaaatcacgtcatttttgaaatttgtgaatgtgcaggtatcaaagatttgagtgggaaagtgtacaaatccagaaacgatatgaatattgccaaggggaccgttgaggcgttcgtcaaagctcagaagacactggacgaagttgcattgggtagaggcaagaagcttgttgatgtgagaaatgtctactattcaagctga

SEQ ID NO: 242 - DNA, 534 bp, Saccharomyces pastorianus
atgcctcagtattttgccattattggtaaaagggacaatccagtttatgaaatcgaattcaccaatgcgcaaaatccacacggctttccccaagatttgaaagagttgaatccgtttatattgcatgcatctttagatatcgttgaggacttacaatggcaaatcaacccggcgtcccaactaaataatggtggaaatggtgcgaacggatccaatggtgggggcggatttcttcgatctaggactgtaagcaataccgataattgttatttgggtaaggttgatcatttttatgggctagctataacagcttatataagttatggtggcatgaaatttgtcatgattcatggaaactcggcaaacagcagtgtggcaattgacgataataatgtaagaacgttttaccaagaagtacatgaactatacgtaaagacactgatgaacccgttttacaagatcaccgatcctatcacgagccctgcattcgattcgagggtaaagatgttggcgcataaatacctctccaaatga

SEQ ID NO: 243 - DNA, 2085 bp, Saccharomyces pastorianus
atgactctttcagacgagcattataatacagctaaacagcaagaaaataaaaataggaatgccacaacggcaatggtaaatccgcagaagataaaactagttaccaagcttcttattgataataaatttggattaatggacgacttgaattttagtaggccattaactgcttcttcggaaggtgtaccaatatctacaaagacatctgaaatgggtatggagtatctcaaaaaccggcaagaaaattcagtgagtccattgccccccatccctagaagtacaagaataaaagccgacagagtaagaatatacctggattactattacagtatactagaacgttgcatatcaatagataactcccagaatcatcatgaaggtgttgaaggtgtatacaatccattacaagtcattagaaatcgaaaattaaagaaaaagcatcatgaattacccacaagagagttttacaccacgaaacatcctgtcattgccatcaagcaatttacccacaaaactaatagaaaaatgccatggtttgtggacataaacgaaaaatatatggatttgacttggagaacttcacactgggaagaattaacagatcctcaaggcaaactttggtttcaattcagtagcccatctactgaatcgagcggatcatcatcgtctcgccagcatcataagcgtcatcggagccgcttaaggcatcactcgagggccccaacggcatcttcaaatactatattattacattcaaacactcaatcactagcgtcgaaaagagccgtaactaatgaagaaactaacaatagcaataacactacggttaaaaaaattctaacgactccagaagcacagatttcaaagaacaggaggtccgatccaaatttcaatcacatccgcttggaagtgccgataactaacactattacaaacaattcctcagatcaagggtcattgatcctcgaggtcaaaggcagtagtggtcgtggaaacactcggcgtggaagtaataatactagtgggagcggtgggaataaaagctctaagcattatcgttcgatatcagcaagctcttcagaaaacgaaaaatcaagactgaatggccttgaaaaaataatcagtaaaacatcgaaaggatgggccagatcaccgaagaaaaatacgcctactcttgaaaagcaggtccttttaacccccgttattagcaatggaggaacaagtagaaggagtagtaacaacggggcgagcatcagtactagtagtagtaagagcagtgtgggcatcacgtttggaaatggagaaagttacaagactccaatggataatggtaaagatgtcctaaaaagacagagtttgctgagcgaggtgcccgttcatactttgagaggaaagaacagtactaactcgttacttaacgagaatgaacaggttctcgaaagtgatcatgaaagcccgagtggtgctgataaaatatacgatggtgtgtctagggaaaagactgctagtgatggtagtgaaaatgcgggaatggtaagtgattctttacaggttgatgggcagctgcagaaatactggcacgatactaggtacattatgagcacagtagctatgatgcaacatagaagagagacgcatgacatagtgaaaaggagagaaattgttcgtaggaaccaaattgagatttcacaagatgtagatacgaacattaagaagacttcggaagcattagccgaatatgataatgaattgaataaagttcttaaattaggtaatgattggacatcaagattactgaacgattattcaatccgtgtagaaactctgatttcttcaagtgacagaattcttagtgatataaacacaacactgacattgaagctgaaactatttcaagaaaacactgaaagatatgttacagtgaaagttatgagagcccaaaagatgactaaaaccatatacgggctattagaatttggtatcgtaatagtcctttggacgatttggttttttttcagtatcttgagaagtatccgtttcagtattatattagtcttaaaaatgattaaagcattgatatggtag

SEQ ID NO: 244 - DNA, 717 bp, Saccharomyces pastorianus
atgttcactggtattgtggaatgcatgggaaccgttttgaagaataatccgtacgatgacactgaaagtggagggcagggtgtctctataaccatcggtgatgctggagatattctttctgattgtcacataggcgactcgatagccataaatgggatatgtctcactgccactgagtttgacactgagtcatttaaagtcggaatatcaccggaaacaataaagagaaccaatgtggcttcgtggacccagggagccaaagtcaacttggaaagagcagtgtctcaagacgtgaggtttggtggccattacgtacaaggccatgtagacaccgtcgccaaaatcgtctcaagaaaacctgaaggcaattccataatatttggattccagttgagggaccaagaatatttcaaatacatagtggaaaaagggtttatttgtatagatgggacttccctgactgtaacccacgtcgacgacctttcaaatggcggtgccttttatatcagtatgattaagcacacccaagacaatgttatcatgcctttgaagaaaataggtgacgaggtaaacattgaagttgacctaacggggaagattatcgagaaacaaataattttgactttagaaaatcaaatttcaaagcaagatagtactctgaacactatgattacaaaaatcattgaggataaggttaaaacctatttagataaatag

SEQ ID NO: 245 - DNA, 426 bp, Saccharomyces pastorianus
atggcgtatggtgtagaagatggtaaaaaactatcggacaaatacaagaaagaggggcattttgacaagctgaaaagagacatactatccaatacttggaacggcacagaggagggaaacgaatcgtttgaacagatgcttcgagacagagttgccagtgtggtgaaagaaatggtcaaagaagatgaaggtttgatattcaaaaaccgagggctgaccagtgcgttgatagaatcacagttagttaaagacaactactcaaaattaaataataaaaatgatgatgatgacaatgatgcgagaaagtttgaactagacgcatatatacactccaaactgcaagatcctaaactattagaaatgataaagaaacaacttagtgaagcagcaggctcgcagcaagaggaatcaaatggacgtacgtaa

SEQ ID NO: 246 - DNA, 1185 bp, Saccharomyces pastorianus
atgagtaacagtggtgtttatacgtgtaattcatgtgtgttgaagtttgatgcaagtgaggaacagcgggctcacatgaagtccgactggcatcgttacaatttgaaaagacgtgttgctcagttaccaccaataccgtttgagacattcgattcgaaagtgtctgctgcagctgctaatagcaatgaagtcgctgggaaagagaagcctgttaccaagaaggaactgaaaagaagagagaggcaggcgttgcttgaaaagaaaacgaaactactggagattgccagggctaatatgttggagaacatgcaaaagagtcaagacggagaggttcttggtatgagcaaactatctttgcaagaaaaagaagagactaaggaaaagaaggaagtcaaggaagatgaggagcctgaagaattgaccgaggaagaaatggcggaaagattgatggaacagaaactgcgtaataaagtggacatccccttagaacagtgtttgttctgcgaacataacaagaacttcgtcgacttcgaagagaatttggaacatatgttcaggacccatgggttttacattccagaacagaaatttttagtcaataaatcggggttggtgaagtacatgtccgagaagattggtcttggtaacgtttgtatcgtctgtaatttccaaggcagaacgttgactgcggtgagacaacatatgttggcaaagagacattgtaagatcccctacgaaattgaagacgaaaggctggaaatatccgagttttacgatttcacaagctcatatgcaagctacagtaacaacacagcagcgggcaacgaagaggactgggaagatgtgggcagtgacgaagccggcagcgacgatgatgaaccaccacaggagtacttatacaacgacggtacagaattgcatctaccgacaggcatcaaagtcggtcacaggtccttgcaaagatattacaagcaagacctgaagcccgaggtgatactgaccgaaggccaaggtactctggtcgctgcggagaccaggtccttcttgcccatattcgacaagctgggtgtgcagacacaacagcgtgtctggcaaaccgagaggttcgacaagaagagactggacaagagaagcgccaagttcgtcaacaaccaaccctactacagagaccaattgctgcaatga

SEQ ID NO: 247 - DNA, 318 bp, Saccharomyces pastorianus
atgttggcgcgtagtgtgggccgtagatggttatcgacgagtcgtgtcttttacaacaaacaagcggtcaaggtggttgcatcatcgtgccctgccggaacatcgctgaatctgaacatatggaaaagcggtaaggacgcccaagcactcgaagacaaggagtatccaagctggttgtggagcgtcttggatgccaagcaggccgtcgatcataccgctaaggatccggggggggaggccctgtcgcagagaaagaagaacatcaggaaggcaaacagacagcaaatcaaacaaaacaacttcctaagtcaactatga

SEQ ID NO: 248 - DNA, 1251 bp, Saccharomyces pastorianus
atgtttgaccctctggacctgtatactcctgacgaaattcagcctgaacctttgcaatccaatctggcaaagagcgaggcaaaagagttgctcgaagaacgacatgacgtgacatttgcgattgaggatgaaaataacagcgacgacgatgacagcgttatagataatctagatttgccctccgtaaggtatgctccgccggaagttatactatgcgtgctgttacttttaagacctgataagcaggtgaacttcaaccagggaacaagcaagagtgaatctgtgctcgagatgtgtgaaagtcatgggctgaaacctgatcagctaaaaagactcctaagttggtatacagaggaatggcctaacaaaagactaaacacgttagagaaggtgtgcagtaagatcccaacgctgcggtttatggtatccaaagaactgttattaggctactatactacaatattgaaaaaatacaataataatgacgacaccagcaatgaaaccgtccagcaacttcttagagagttaagctcaaggatatccgaaaactgcggcaggacagcacaaccttctattataagatattttgaactaaaaaatttaaacagtgccattccactctatgaaccatcattgacagccgataatcttggttggaaaacctgggggtcctctttgatactttcacaactagtagtagattacctacacaccacagacatgctaccattggcgaactgcggcaccaaaaggattaaagtcttagagttaggttctggcaccggtttagtgggactttcatgggctgccaagtggaaggaactctacggaattcacaacacagaaatctatgtgacagatttaccggagattgtaacgaacttggaaaagaacgtagtacttaataacttagaagattttgttcaggcagaggtactggattggactaatcctcaggatttcatcaatcaatttggtcatgaaaaggactttgatatcatatttgttgccgatccgatctattcacctcagcacccagaatgggtcgtcaacatgatatcgaagtttctggcaccatcggggacttgtcatttggagatacctttgagagcgaagtacgcaaaggaaagagaggttttgaaatctttactgaaggattatgatcttaaagtgattaaagaaagttgttccgaaggtatggatgattggggggtagtaaaatatttgtatagacagattgttcgcaactga

SEQ ID NO: 249 - DNA, 5658 bp, Saccharomyces pastorianus
atgtccaacgatttttcagataagaagaagcataccatagatcgaatcgatcagcacattcttcgaaggtctcaacaagatgcccattccagtgggaactctccatggatgaaggccaaattgccacctccgccttctccacaagcccatatgcacatacaaagcgacttatcaccaactccaaagagacgaaagctagtatttccaagtattaacgaaaacgatcagttgcatttgtcagaaagtcacgaacatataagcttagaatatacacaaagtaagctaatgcaaagtctacctgaaatatctgcttcaaacagtaacaacgtatctccagtgacaaaaagtgtagctttttctgatagaatagaatcgtcaccaattcaccacataccaggttcttcaccaaaaccttctccatcaagtaaaccgggcaaatcaattttaaggaacagaatgccgtcgacgagaactgtaagtgacctgagctacaacaaactccaacattctcagcaccagttgcacaacggtaacatttttacatcgccttataaggaaactactggaataaatcctcgtactttggattattgggttagcggcgaaatccatagtttaattgataacgaaagcgtttcagagtttaaggatataattgagggtggactgagcattctgcgccaggaatcggaagagtatgtggccagaagatttgaggtatatgcgacatttaacaatattatccccattttaacggcaaaaaatgttaacgaagttgatcagaaattcaacattctcatcattaatgtagaaactattatcgaaatatgcatgcctcatctacagatgactcaggacacattgctgagttttagtgaaaagaaaaatccattcgtaatcaggctgtatgttcaaatggtacggtttttcggggctattatgtccaatttcaaaatcatgaaatggctaatgaaaagaccagatctagtgaatcaactgaaagctatttacgaatggacaaataaagcactaaaaagtgaaaattcaaataagataataattactgctcaagtatctttcttaagagatgagaaattcggtacttttttcttaagtgatgaggaaatcaagccaatcattgacactttcactgaaataatagaaatcaatagcaacaacctaatatgcgaaaaactgctactcatcagaggatttttgagtaagtatccaaagttaatgattgaaacagtaacttcttggctaccaggtgaagtactacccagaattataattggggatgaggtttattctatgaagattctcatcacttccatagttgtgttgctggaactcctgaaaaagtgtctagacttcgtagaagaacatgaaaggatttaccaatgtgttatggtttcgcctgtaacagaaacaattaataaaaagtttttatctagattaccgttaaactcaaatgatgctggcgatcttgacaaaatcaaaataggccatctgctgacggagcaaataaaatattacattgtgaaaaaaaatgacaataaactagcaatggacttatggctttccatgactggactgctatacgataacgaaaagacagtatatgatttgatatcggaatccagcaaaacatggttcgatctaaatcatttgtgctttatgaacgagcaaccgaagacccgcttaatgtctattaaggtttggagaattattacttactgcatttgtacaaaaatatctttgaaaaatgaagaaaagaacgaaaggttactgtcactattacaaactccttttcagatgacattgccacacgtaaatgatccgagtgctagagaaggaatcatttaccattttctgggtgtcgtttacactgcattcacaagtaataaaaatttatccatggatatgttcaaccttttttgggacagtttaattgccccaatttatgaaaattttgttttcaactataactctattcaattacagaatgtgcccttaacagttttgcatttactaattgggggtaagaattctgatgttgtgttggagaggaaaaacaaaaagcatattcattctatgagtgtaatagcctcagaaggtgtgaaaatcaaagacatttcgagcttacctttatcaattatcaaatccgcatatgacaaaattatgaaggtcgtgtttcagggcgtaaagacagccatgtctaatgtcaacttagcccatgatttgattcttacatctttgaaacatctcccagaagatagaaaagatcagagccatttagaggctttcagtagtttgattttggaagttgcagaaaataacaaagataaaccaatttttcgtgaattttttggagctgtatgttcttcgtttgttcacgcatttttagacttgttcttaagaaagaatgattcatctttgataaacttcaatatccgattttcacaaatcggcagtccacaagaaaatataacacttaacctgttgaaagatgttattcggaaatctcggaacgagacatctgagtttgtgataatggaaaagtttctagagttaaaggataagaaaactgaaatatatgcccagaattgggtcggttcaatactgctagcgccgaacatatccttcaaggaattccaaagtttggcaggcattgtagatcaagttccaaacgaacactccattgaaaactttctggacctgtgtttgaagctctcttttccagttaacctttttgcattaattcatgtgtccaaatggtcaaacgataattttatttatttcattcaaagctacgtttcaaaaaataaaaataaactggatacggatctagtcgcgctattaaaaacctctttgccaggaaacactgagctattcgtgggtttgcttccatttttgatacaaaacaaattcatgagtatcttggaatactgtgtttgctctaatcctaatttattgagctatatttctgatgtcaattctgatttactactggaattattaccacgtagtaggacgtcctatttcgttgcaaatatacaatcattcaagcatgccgaacagctgatcataatctgttggttattggagggccaagaacttgatcagataaataaaaactttccagaaataaagaatatcttgttacacactccttccgatgaattggaaaaatcgaatataattagagaacttcttcaacaagctacgaaaaatccaattgaaccgttatttagcgagttattggacttctgcatagacaatagcacagtgaatattctggatgaattctgtgaaactatgaatgatgaaattcttttaaaaataaacccgaaactactgttgggactaataacgtatagaggcaagccaaatgaggctttgctaacagtacttgctgaaaatattgggagtgccgatagcgaatacaagttcgagttacttgaaaagatcattgcacgcaaggaactttcaattttggaaagattgaaagaatcatttttcattttcttgctggatccagttagtaggtcaaacaagcaaaaccatgacaatggtactaaaatgttttgcgaactggttctgctataccttaccaaacctctttcccggggtgctgctaagaaattcttttccatgcttattagcatattaccggcaaatcctgaccgtcaaagtatagatttggttcatttactagttgatattattaaatcacataatcggaagttcaaagataaaaggacttataatgcaacattaaaaacgatagaaaagtggatccatgattcagaagtagcaaatcaaagagaccctgataaggaggcagatgatacgcgcaatgatatctcaatacacacaccacaaggcttagagaatgataagagcgttccacaaaatttgcaaaaagcatcgaatattgaagaaattcaagttcccgctacacaaggtataaaggatcttccgtcctcatcacaattacttttacgggctgatgcagaagatttttacataagaaaggttaaaaacatcccaatcatgaagctcacacagcaggaaataccctctaaactgggaagatcatttactgacgagacattagaagaagtggataatgaaagcgtcgaagaaatagatcaacaggcaaaaagtacacaaataaataacgagactgttaaccataaagatatccaatacagtaagagtgatgatacggaagtaacaaaaaaagttattgacactaaatgcggtcaaaatgtacataccgatgactctctacagcgttctcccaaaataaattcagactctgaggctgagaaatcaaggtttcaggtaaacgaaattaagaaaagtaaaagggtggtgagtgtttcagcttctgaacacgaagcgatatcgcgtagtactaagagtatagatatcaacattaaaaatgtgattattcagccatcttcttcaacttcaaaggatattaaaaacatagggaccggttttagtcaagacttattaattgcccctttggattccaaagaacaactcatgggtaaggatgacgtaaaagaacaggaccggcaagactacaggcgagacgaacatggttttgctcgtgaagttaatagcaaattgctcacagaaagctggaacacacataagcaacttgtggataaaaaaacttcaaaagatgatgcaatgaaagacaaaagccaagtgtgtgccattggagaagctacatcaatcaataaaaaagatatgcataataaaattgggagcccaggtgaaattctactgccaaatacctttatgagaaaaggtgaaccgaaaactagtacgttgcattctagtgcaaatgaacatgatgcggtttcgggagaaaatctgagccatgaaataaatacaatgggcagtgagaagggaaataatgagaggacttgtaacatgcagggacagtgtactgtggaaaaagctagagaaactggaacaactaagcccaataaggagttgaatggccagcacaaaggtggaaaagaggtcaccgcgaaggacgacttcgttatagttgaagaccatggagacgatgaaggctttttaaaaacaatggaacaagaagcatcgagagaaacaagtctcacaaaagaagaatttgaagtagcagatacttcagtgctaccggagatacgtatacctattttcaaatccctaaaaatgcaagagccaaagagccagacagaccaaatgaaagcaaggttgaaaaaacatgaattgatgcctcccgattcacctccacgcttggctgcaaataccactattaaaaatgtaaatacccacttggttgcagttggaaaagcaccagaaggaaaacaagaaaatgatggtaaaattcatctgggccaagtgcaaagagatacagacggtgatccggcggacgggaacgaagacgctacttctagggaagctacgccttcattaagggtccacttttcctcaaaaaagtcaagaaaattagtgagcaggttaagaggttttacaccaggagatttgaacggaatatctctagaagaaaggagaaacttgaggatcgaattattggatttcatgatgaggctcgaatactattctaacagggacaatgacatgaactga

SEQ ID NO: 250 - DNA, 2412 bp, Saccharomyces pastorianus
atggttttggaagtgccctcgatcacgcctggtgagctgcacgacctcgtgcaactccaccagggtgctgaatggcctgaatgcaaagaaatgtttccttgggcccatgatatttcttttggtcagccgccagattttcctcactcgctggcgatagtcaaatcagaatctaatgtgaacggctctgcgctcttgcgtggttctcttgaagttaatgacatcttcctgccctggaaggtgcacacttctatgcatgttcattatgatgctcgcgaaagtgaaggtgaagtgaacggattcaactatcccagtagcagtaaggaactcctgaacttgttaaagtttcaggtacgccaactggaattgcaagtggatgacattgatttggaaaacgtcgctgccttttgtcataggcatagcgtcttaccatttttaaaagtggaccctcatggactatcattagaattaaaaaatgatcctagcaacaaagttggatccaatgttacgtttcaatcgagcaaaaaggacgtttggggtaggagaggtctgtttagaagatttgaccttcaatgtgctaagatggtagaaatggctgataatatagtaatttactgttcgcggaattacaaaaccatagacggcacaatgctgatgggcactcatgattgtgattgcccaaattgcacttcacttgcattacttttacaaatttgtctaatgtttgttcaaagtggttatgttgactgccaagaaccatgttacaaaacgagcctttttatttgcacctaccaaagctttaacacagatatacctaagagcttaattggcacacccttattagagaaggagtctaccagtaattgctcacctttaaacttatgttcgtcacccagtgaaataatatgctttaataactttgataggaacatggttttgtgtgagaagttggaattaaataagctcacttcagcaacaagattggacgaaacaggtttgatatgcggtaatactactgattggcaaaattatcaaattatcaaaaataaaaatttgtccctgtccaagtattcccaagaaaatacgagtatagtgtcattaagaaccttatcctatgatccagatgatcccgttgcttccatctctcaattatataatattccaaatacaaaagaagcatggaaactaattataaaatgtacatcgaagtcgtcgatgccatcattaacaaaaattcaatcatatctatgttcgttactcgacgagatacaaaaccctcaagaatatttgcatttaagtttccctgcctcaggtactataggtttgggaaacttgaacattcagtctgttgaaattcttttaaatgtttgttatctgatacaccaggtatcacaccttcaagggctattaacattcatgtattgtaatgatggatatacagaaacttcattactattagcagcatatattatatttcattttgatattccattgcaggaagcacttttaaagatacacccaagaccatttttcctgtttccatcagacttgcagattttgggtcacttgcagtctattttgcgtgagtttagccctcaaagagaagttaatgcaaaattattcactgatttagtgaaagacaaaactaaaagttttcaactgcgcatatcatcggaactttttagtaatatattcttcgtaaagattcccccggagtctaactatgtcaatttaaagggcccactaccatcacagattttgcagcatttgtatttggggtccctggatcatgctcaaaatcctgttttactcaagtccttaggaattacacacatagtttccgtgggtgaagtggtagcgtggacacaaaatatagaaaaggccgtttaccctgtgagatcacaccgtgctattaccttgacgaacacgaacggggccacaattaatactattggtactaaaagcaggcccagagctggtaccacgattgataacgatcaggataatgatagtaccgtagtgataaaggagaattccggttttcagatttgtcagatcgaaaatttagacgataatgggaaagacccgctttttcatcgattagacgacattttggagtttattaataattctgaaaggatgggggggaaggttttggtgcactgcatggtcggagtgtctagatccgcaacagtttgcattgccgaatgcatgagatggcttcactgtgatttggcaggcgcttacgtatttgtgagagtgagaaggttgaatgttattattcagccgagtttattctttgtatacgaactgttcaaatggtggaaaaaacacggtagccacaacaaggatagaattatagactggcacataatatgtagggagatagctgaagttaatatgaagtacacataa

SEQ ID NO: 251 - DNA, 2628 bp, Saccharomyces pastorianus
atgtataatagtagaggtgtagcattgcactctgaattgatccatagatggaatcacacattttccatcctatccattgttgcatttcccaaaaagagactactgtttgctgggagccaggattctaaaatcctggtatttgatcttcccacgtataatctaattcacacgattagactaggagaatcgcaagaagaaacgcacactaggtcatctgtgttgtgtttaacaagatctgaagatgaaaactttttattctctggtggtgcagattccttggtgagggtctggtccattggtgaaaaggctatcagagatgactttctgcttgttacggaaatagctacggtctattcagtgacagatattggcgatatcttctcattggcatatttggattcgttggaaactattttgtttggctgccaaaacgcaagcttactgtatgtggaaaacttgatgcagaaaattgagaaaacatcatctgatagagtagaaaatatcaataagctaccacatagaagatacgataagttttttgattcgttgggtccaactggatgtagcacaaattcgctctcccaatcttcattagcctctttacaggaaaactgtggcgccgccatcatcgaggtcccttcagaaaacattattaaatatgcgcattatgggtttgtttattccattaataagctgtgccccaggttcaaccaactattggagaaaaattctcagactttcggtttggaacatataatttcatctgctggtgatggtataagtaagctttgggagttttctagggacgagaagcacgatgttgttaaggtttctttggtaaacgataaaatcgacaacgaagatagtgtcatttcccaaaccatagaattcccattcttatattgcggtttaagtgatgggattttaaaaatttgggacttgaatactcagcaattaatatctactttaaaaacaaaggacgagtcggatatcatttctatatctgtttacatggatcatatttttgccattgatgaatcagggatcactcatttttaccagaatcaagttaatcactggaatccacaacagggcaaaatactaagctcagagatttttagcaaatcagcagaatctgttagtttgctaacgggtggaaacgatgggtcattaactctctgggacctgacgtcgttgctatctgcagttcctctctcggatgcttcgaaaatcaatgcatcctctacacgacgcacctccaatgcgtgggccgtttaccaaacggcttctttgaataatgaagaaatgctaaacacactaagagagctcatctcctatcaaacggtgtctcaaagtaaagacactgcaagtatgttgtcactaagacgttgcgcaatttatctacaacaattatttttgaaatttggagctacgaacgcccaattgtttcccttacctgatggcggtaatcctgttgtattcgcatatttccaaggtaatgggaaacaggaaaagggttctaagaaaaaacgtatactgtggtacggtcattacgacgtaatatcctctggagatacttttaattggaataccgacccatttactttaacttgcgaaaacggatatctaaaaggacgtggtgtgtcagataataaaggcccattggtaagtgctattcatagtgtggcacatctgtttcaacagggagagttagtcaatgacgttgtatttttagtggaaggaagtgaagaaattgggtccgccagtttgcaacaagtttgtaaaaaatatcatgatattattggcaaaaatattgattggatcctgttaagtaattccacttgggttgaccaagaacatccgtgtttgaactatggactaagaggagttatcaatgctcaaataaaaatctggagtgataggccagacggccactcaggccttaatggcggtgtctacgatgagccaatggttaacttggtcaacattgtatctaaactacaaaatgagcaaaaggaaattcagattcctaatttttactcaccattgaaagatttgactgacgatgaactccaaagattccagaaaatcactgagcttgcgaatatcgacgagagcatcactgttcaagatctgattacaaattggtcaaagccttcattatctatgacaactgtcaaattcagtggccctggtaatattacagtaatacccaagagtgtcactatgggcatctccattaggttggttccggagcaaagcgtcgagcaagtgaaacaagatcttaaggcatatttacatgagagtttcaagcagctaaactctcaaaaccacttagagataaaagttttgaatgaggcagaaggttggttgggcgacccaacaaatcatgcataccaagtgttaaaggatgaaattaccactacatgggatgcggaaccattactggtaagagaaggaggttctatttcctgtttgaggatgttggaaaggatattcgacgctccagcagttcaaataccatgtggtcaatctactgacaatggccatttagccaatgaaaatctaaggatcaaaaactggtccaatttaactgagattttgtctaaagtcttcaacaagctgtaa

SEQ ID NO: 252 - DNA, 441 bp, Saccharomyces pastorianus
atgaaaagctcacctattgtacaattcagtaagacctcctttaacgctcttactagaccttggaagaaatacagagatggtgaattgttttatggactatccaaagtcggaaataaaagagtaccgctgaccaccaaacaaggtaataagacaatgtataaggggaccaggtcgtcagggattggtagacatacaaaattcggtggttatatgataaactggaagaaagtcagaacctacgtaaccccagatatagtcaattttgagttgaagccctatgttaatgctaatgttccacctttgaagcacgacttcaaagggttcagtcgtggtcccttggatcctgaattacaactgttaaagctaaaggagtttattgcaaatggaaaagtacaaagtcaaggagccacagacacttcatgctataaggagcgtggttaa

SEQ ID NO: 253 - DNA, 1473 bp, Saccharomyces pastorianus
atgtctggttttcgtcttattgacatcgttaagcctatcttaccgatcttaccggaagtcgagttgccgtttgacaaattgccattcgatgataagatagtgtatactatttttgctgggctaatctaccttttcgcacagtttccactcgttggcttgcccaagtccgccacccccgctgttaatgacccaatctattttttgagaggtgtctttggctgtgagccaagaactcttttggagtttggccttttccctaatatttccagtgggttactgttacagttgttggcaggtttgaaagtaatcaaagttaattttaaagttcaaagtgatagagaattgtttcagactttgaccaaagtgtttgccattgctcaatatgtcattttgaccaacattttcatttttgcaggatactttggcgaagatctatccgtcgtccaaattggtttaatcaacttccaattagtcggtgcaggtttcttcaccactttgttagctgaagtcatcgacaaaggatttgggttctcttccggtgctatggtcatcaacactgtggtcattgctaccaacttggttgctgatacgtttggcgtttctcaaattaaggttggcgaaaatgaccaaactgaggctcaaggtgctctaatcaacctgattcaaggtttcagatccaagcatcacacttttgttggtggtatcatctctgccttcaacagagactacttgccaaacttgaccaccaccgttattgtcttggccattgccatttctgtctgttatttgcaaagtatccgtgtagaattaccaatcagatcaacaagagctcgtgggacaaacaacgtctacccaatcaagttactttacaccggttgtttgtctgttttgttctcttacactatcttgttctacatccatatcgcttcttttgttttgattcagttggtcgctaagaatgagccatcccacatcatttgcaaaataatgggtcattacgagaatgccaacaaccttttggcagtgccaactttcccattatctcttttgactccaccaacttcctttttcaacggtattactcaacaacctttgactttcatcacttactcagttttcgtattgatcaccgggatctggtttgctgataaatggcaagctatatctggttcatctgcccgggacgtggctttagagttcaaagatcaaggtatcaccttgatgggacgcagagaacaaaacgttgctaaagaattgaacaaagttatccctatcgcagctgtcacgggtgcatccgtcttagggttgatcactattctcggtgaatctttgggattaaaaggtaaagccgcaggtatagtcgtcgggattgctggagggttttccatgttagaaatcatcaccattgaataccaacaaagtggtggccaaagtgctctgaaccaagtcttgggtgttccaggtgctatgtaa

SEQ ID NO: 254 - DNA, 2397 bp, Saccharomyces pastorianus
atggtacggaaaaacaggtcgctgttctttgttgggtatgattcttatagtgagagtccctctgcttcaccaatacttctggacgacttagacgggaatgacgatacgccggatcaagttttggctttcgatgcgtgtgcagggatcaggtcgcaactgcaggagagaaactctcgagcactcaaactcaaaggtgccagtgctggaggtgacttgaatctagatgatcttgacatgattccattaaatacaaagttcgatgtgcaaatggagatgggctcgcccatggccatgccaccggaaacactgccacccatcaaacccttaacggcgaaagatcttgcatattcatccttggctcatctcccaagttacttctttgagcaaatacattttcacgtcgagcggaaatgcctattggatatgtgtaagttaaggcgaaactatctcactataagcaaacaggatgctttagcctgttctcagtcgcagagtgcaaaaccgtcccaaaagaatcttgggcgtataaaagatgaaactctgcgcacagctcaccttcttgacagcaacgaagaaaataatctaacatctccaagggatagtagctatattatccagctgtgtaatggtcacgtggatgtccccacttttatagagtatagacagaatttcgaacggtgcttgagaatcattcaggatagaagcttatcaaaatttagtgagaaaagattacaatatcttttgaataagttccccgtttttcagtatttaaactctaaaaaggaaatgagacagagtaaaaacgtcccacacaaagatttttacaactgtagaaaaattgatttgaatctcttattgagtggttgtttctcccagtggcaattgaccgagttcatctggtccaaactaaaaaaagaaccaaacaaaataatatatcaaacttccaatggtaggcacataacattgattcagctgttcaaagttgatttcgaggaggcgaacacattctctagtggtttgaaaatcatcgacgactcgtttttagaatggtataaagttatttatcttgccaaatatcacttgattaacagtgactctgaaacatttatagacccacgcgacaaacaattccgtcattatttgattgcaaaaacgtttttagaatttgataactgtatcaatggggaatatctctcggaattgctacagacgtttctaataaagccactagagacatccaagtaccagctgtgtcagctttcggtagactttcaattctatttccataacggaaactcggacgtggataattggtggatggtttttgccaattggttgaaccattacgatcttttttccaaaaatattcgctggaatgtcagaatctcaagaatatatccagcattgtaccacaccggtaaaatcaaaagtttccaagattatttagatttaatattcaaaccacttttcaacactaaaagctacattcacaaacctttgggacccattctttcaaagttcctttcacgtatagcttcattcgatctatgtattcaagattcagatgactatgtttggaagcaattcacaaacgttgattgtccacccgaaaactggacatccaacggtgataatccaaccatttcacaatacatgtattacgtttatgccaatctggcaaaacttaatcacattcgccatgcactccatcagaacacctttactttgaggagttcatgttcatccacgtcaatgaatcgaacttcgcaatttagtaatactctaaatttcacagaacacacagaatccaccttgaacaattttcttttgtccagtggaggctttttaaatgcagagaacctctggaacgcgccgccacccttggtgtatgttttctatttaagtcagattcccatggtcatggcgcctttaaattccattgtagattcaaaggccacaatagcccaagatcagtgccccgtggggctcgtgttagagcctccgaagccttacaaaatgaacccctttatgaaattcttcgaaatggggttcagaatatcgttaagctctgagtccattctgtataaccattcgtatactaaagagcctatcattgaagagtatagcgtggcagccagtatatatcgtttacattccgcagatctatgcgaattgttaagaaacagcgttatcactagcgggtttgctgacacgctcaagaataaatggctcggcacatcgctggtgtcccacaactacttcatggaaaacatcggatttgtggataactggtacgattgcaagccagacaccagtctggaccacaacgtgcccgcaattagacgtcaataccgtagcaagaccctcgcaggggagtggcaactcgtaatttcttga

SEQ ID NO: 255 - DNA, 438 bp, Saccharomyces pastorianus
atgactatattttctaagttttcgtatttcgagaacttcttctcattcaaaaagcaagaaccctcccccattgaaatcgtttactgcaatgagaccaacggatttgtaaacatcaaagccttggaaagcttcaccgatgatagcatggaggcagacatctctgatagagaaatggctacgattctgacccgaaacaaaaagagcctgggaaaagtggctattgataagaatagtagtaataaacaatgtataaatttaagcgagctaaaaacgggccatgctgccgccaccagacggaagttgagcggcaatgagtcatggccgaaccaggactcatatccgcctgaggacccctccgagttcaacaagtttgatgataaacataacagaatccaaaagtgtagcaccaggagaggttacttgtcgtacaagaaatag

SEQ ID NO: 256 - DNA, 1284 bp, Saccharomyces pastorianus
atggctgaaactttcagtttttcccacttggcttatttggtttttgagtctgttctacaggtcgtcatcattgctattgctgggttttggagtgctcattctggtctgctacccaaacaaagtcaaaaaatcatctcattactgaacgtggatctttttacaccatgtcttattttcagtaaactggccaagtcgctatccatggccaaaatctttgaaatagccattatacctatattttttggtttgaccactggtatttcatttatgtctggtaagttgatgggccgtgtcctgaaactggataaagacgaaacaaactttgtggttgcaaactccgttttcgggaacagtaactcactgccggtgtccttgacattatctttggcttatactctgcccaacttgacttgggatcaaattcccaacgataaccgagacaacgtcgcatcgagaggtattttatacttgcttatcttccaacagatcgggcaaatgctaagatggagttggggctacaataagctgatgaaatggtctggagagaacactcagcacatgcctccatcccaggtgcaatccctattggagagaacccccaatattgataatgaagaactggtcagtgaagaacaggaagaacaagaactagttgaccaagagcattctcgcttgaattcatccttcttgagttctagttccattagtgataagatctggcaaaaatcgtgtaccttattgcaaaagatcagggcaaacttgaaccccccattatattctatgattttcgctatcgttgtggcctctataagtccattacaaagagaattattcacggaagacagttttatcaataacacattttctgaagctgtcacgcagctgggttctgtatccatcccattgatcctagtggtccttggttctaatttgcatccatcggatgaagttttccccaagacagttaaccacaataaattgctgtttggatccatagtggggagaatgatcttaccttcatgctttcttttgcccatcattgccatcgccgttaaatacgtcaatgtgagtatattggatgacccaatcttccttgttgtaggtttcctattaacggtttcccctcctgccattcagttaactcaaattactcagttaaacgaatttttcgaagcagaaatggctgatatcctattttgggggtatgctgtgttgagtttgcccgtaagtatttttgttgtttcgggcgcaatctatgttttgcaatgggctaatccatcttaa

SEQ ID NO: 257 - DNA, 1455 bp, Saccharomyces pastorianus
atgtacttgtcgttttacattacagatgtacagaacaagctggttttccagtaccttttaggcgccacagcgccttcatttaaacacctttggacccgtgttcaatctgcatgccctcaattactagaagacagcggtagtgataactatttagatcaagcaatggtcgggaaggaccttgaggtatataagtacttttcggtcacaaataagctcaattattggtgcttagcctccacttccaaatcaaagggaccacttgattgttttagctttttggagactatagattgtatccttttagaatactttgacaaggataaattaagtattaagaagcttgttaataactacgatagaatcagtttaatcttcaattgttgtattgaagctggtgagcccaatgttaatgattttctctatgtcaataaaatcaaagaggctgttcctgaaaggtccgatttgtccaagtttataagctccacagcccataacttacaacaagctgtacaacttccacagcaaagacaacagcaactacaacagaatcaaatgtcccgtggtaacatttccattgcggaagatgaagagatcgttccttggagaacatcaaaggcgagcaaacatgagaataacgaactttacgtagatttgttggaatcgttccatgtagtactcgaaaagaaaaaatctcgtctaaggttggttaatggggacattcgcggggcagtagatgtaagatcttatttgaatgacaatcctttagtttcagtgaggttgaatacaatgggaaacgaaataggcatacccagtctacacgattgcgttgaaattaatgatgatggagaatttactccttctaatataaaatttataccaccggatgggaaattcagattaatggagtattccatagatttgaattctcaactacagaaaccaggaataaggatgaattctattggaatgatatcggtacattttcaaaatgggttgggcaaagattccgatgaatttgaactttcattaaacatcgaaagctctaaaaaggtgtcccaaattgaagacttaaagttagatttacaattcaatattgaagacgctggtgaaagtgacgtagcatataaggtaaaaatcttacgcaatactcatggtcgttttgaaaatagtgttactatggggcaaggacaatggatttttgataaagctactcctacgggaacaatacccgtattacgaggttgtattgaatatgaaagtgtacaacctaacagcacaagaaatatcgatttacacacagtctcattagattattcgtatatgggacaatcagccagtggcatttctgtggaagctattgatattttatccgggttgaccattggtagaaacaccaagttatacaaaggtgcaaaatataaaaccaaaacaggtgattttcaagtaaggctatag

SEQ ID NO: 258 - DNA, 978 bp, Saccharomyces pastorianus
atgccggatcaagaatctccgatagcacaggaaattaatacgctgcatgttggctcacttactgatggtacgaatattggaaatgtagagcgagctagagacacgctaaatgagcaaaccagcgaggaaggagaaacagagataggatccaggcaagaagaagacgacatagaggatgagggaagtagtagtggagaaaatagtgcgacggaaaggctagtgccacaccagctgagagagcaggccgctaggcatataggaagaataggaaggcatttcaatatacttgataggctttttaagaaacacacacaacagtcttcggatttacaacaaggggccatgtttgatggtgtgttcagtaatttgagtgcaaaaccagataccacgcaggccgagcatcgcagcgagcaagatataccacccacgtatgatgaggcggctactgatatggcgccctcttactatggaatggacttgaataattcggatatatactacgatgaaatatgcattgaggggctccctgtaggaaacatagccaatttactttggaacatcattgtgagtacgagtttccaattcattgggtttttgataacatatattttacacacatcacatgcggcgaaacaaggttcgagattcggactagggttaacgtttattgggtattgttattcgatgattcctaagaatgtcacctcaaaagtcggtaaaaataaaagtttaaatagaatggaattatcggatccaaacgaatttgataatgttcgtctaaattcacaatcaacgacgcaggataatttcgaatcacatctaaaccatggtttagatgaagaaaagcaaaacacgccgtggttggctgtccttgtaggacttctaggtgcattcattactcttaagagtatatatgactacattcaagttaaaaaaatggagagaaagtatctcaaccagggtcaaaaccaagcatag

SEQ ID NO: 259 - DNA, 1728 bp, Saccharomyces pastorianus
atggctttacatcagtttgattatatatttgccatagcaatgttatttgcatttttagatgcttttaacattggggcaaatgacgttacaaactcttttgcttcgtctgtttcgtcaaaatctctaaaatattggcaagctatggttttggcaggtctttgtgagtttttaggagctgttttggccggtgccagagtgtctggtactattaaaaatgacattattgacggcagtgtctatagtaaagatccagcagttttgatgctaactatgacaagtgctttgattggttcatcgtgttggttgacgtttgctacaatgatcggaatgccagtttcaaccactcactctatcgttggtggtacgattggggctgggatcgcagctggtggtgctaatggtgttgtttggggctgggacggtgttgcccaaattattgcttcatggttcatcgctccagttttagctggtttgattgccgctgtagtttttacaatctcaagactcactgttcttgaagtcaagtctgtggaaagatcaattaaaaatgctctactattggttggtcttttagttttcgctactttctccatattgacgatgttaattgtttggaagggttctccaaacctaaagttagataatctatctgaaactgaaactgcagtttcgattattcttacgggagcgattgctacgattatttactttatctttttctatccattctacaaaagaaaagtcttgaataaagattggacactaaaattggttgatattttcagaggtccatctttttacttcaaatctaccgatgatattcctccaatgcccgaaggccatcaactaactattgattattacgagggtagaagaaatcttggaaccaccatcgatgttgaagatgaagaaaacaagttagccgataactctagtgattctcctaccgacaaagataaggttattcaagaagtagacttggttaaaactgaaactgaaccgaaagaaaaattatcgacgaaacaatactggtggtcattattaaagatgggacccaaaaaatggccgttcttattttggttagtcatctctcatggttggactcaagacgttataagtgctcaggtcaatgatactgatatgttgtctggtgacttgaaaggcatgtacaaaagatctaaattctatgacaacagggttgaatatatttactcagttcttcaagcaattactgcagctactatgtctttcgctcacggtgccaacgatgttgccaatgctactggtcctttatctgctgtttatgagatctggcaaaaaaatgctattaaggaatcatccgatgttcctgtatgggttttagcctatggtggtgctgctttggttattggttgttggacttatggttacaatatcatgaaaaacttgggtaataagttaatcttacaatcaccctcaagaggtttctcgattgaattatctgctgctattacgacggtcatggcaacccaattaggtattccgacttcaactactcaaatcgctgttggtggtattgtcgctgttggtttgtgtaataaggacgtcaagtcggttaactggagaatggtcgcctggtgttattctggatggttcttgactttaccaattgccggtttaattgccggtatcataaacggtatcattttaaatgcacctcgttttggtggcgaatatcaaatgacatga

SEQ ID NO: 260 - DNA, 1086 bp, Saccharomyces pastorianus
atgtctatagtctacaacaaaacaccactattacgccaattcttccctggtaagtcgctggcacagttttttttgaagtacgaatgtcttcaaccaagtggctcttttaaaagtagaggtattggaaatttgatattgaagaacgccatccggattcaaaagaatggtaagagatcccctcaagtttttgctagttcgggcggtaatgcagggtttgccgctgccacagcatgccaaagactatctctaccttgcacagtggtggtgcccacagcaacaaaggaaagaatggtagagaagattaggaacactggtgctcaggttatcgtgaacggtgcgtattggaaagaagcagatacctttttgaaaacaaacgtcatgaatgcaatagactatcaagttgttgagccaatttatgttcatccctttgataatccggatatttgggagggacactcatctatggtagacgaaatcgtccaggacctgaaatctcagcatgtttccatggacaaagtcaaaggtatagtatgcagtgttggtggcggtggtttatataatggtattatccaaggtttggaaagtcatggtttagctgataaaatacccattgtgggagtggagacaagaggctgccacgtcttcaacacttctctaaggattggccaaccaattcagttcaagaagattacaagtatcgctacctcattagggaccgctaatatctctaatcaaacttttgaatacgcccgcaaatataacaccaagtctgttgtagtagaggacaaggacgtcatagagacctgtctgaagtattcacatcagtttaatatggttactgaaccggcatgtggtgcctcattgcatttgggttatcataccgagatactggaaagagctctaggctcaaaattaaccgcggatgacattgtgttgattattgcttgtggagggtcttctaacaccgtacaggatttggaagaaacattggaatgcatgaaaaaagaaggcgtccctgcaattgaattggctgataacttcatctttccggaaaagatcacttcaactattttaaaaagtgcttaa

SEQ ID NO: 261 - DNA, 3303 bp, Saccharomyces pastorianus
atggatgatgctttaaatgctctatcgtcgctgacttcgaaaaaaagagctaccacatacaagaaagtcgccagccctataccgggtgagaatgatgataccgatggtaatctcccaatccatgaaatggatgctccgcctgtattgatggggaacgggttcctgtttggcaatgccacattaaaccgtgttaagaacagattggaaggtaagagtgatataagacaagacgggcatgataaaaagaatgaagataaaaatattctctcgactcaattaattgctaatctttatgatggcggtgaagagttggagaagactaaaaataatgaaaacaaaaacgatcaaagagttaacgtgacctcatttacgcaaacgcaaaggataccagtcagcataactcaacaaaataatgaggttaatgtgcctatacattctatcaacgatggagaacccacccaaagagttaaaagcattatcacaacttcgcaaacacaagcaattccctttacaacagcggaaatcacacaaaaagctactcaatttatagataaccacggtgtaacttcgcaaacacagcaggttccgcccacaaaactaattgaagcacaaacccaagctggtgcagctacagccaatgattcggatattcagcctcagaaatttcctatagtggcaactagaacaagccccttatttcaaacagccccagaccaaggcccctcgactcaaatggacacaccaccgccaactgtgcatgtcgatataacccaaatggacactatgtcacagactatgcaagataaagtaccgcctgaacttaagattcatgaattacagagcgaattggcttcagaagactctagaaggaaaacagctcacaatattgaatataggaaactgcaaaagaccataccaatagtgaaaagtttttcaaaagaatcatttcttgctgatttcgataactcgtcctcagatgatgacacaaatgtcaaattggaaagttcacagccaaaaaaagaacagaatgggtatgaaatgatcgacatcgaccaatccgaaccacaattggttcagaaagaaaataaaaaagatatgaaagttcctctattaagtacttatgccaacaacttaaaacgggagattgattcatcaaaatatatcactttggacctcgacagcggcagtgaaaatgataacgatgaccacatggacgctggtaagttaatcgaagatgaaagtgctttgccaatatctcagttgtcaaaggccacaatattcaacttgaaggctagactatccaagcaaaatcaaaaactggctcaaggatccaacaaaaataaaggattcaagacagataacaacaaactgttcaacacgttaaggaaggctagcagaaaacagattttggatcatcaaagagaaatagttgaaacaaaggggttcaaattagaagatatggtcaaggaaaaggagattgtagaagacttgctagagcaagaaatcctcagaaataaaaaaatcagacaaaaggagaagaaaaaggaacaatcagaaaaaaacaactttgaattgaattcccatgattcaggctctgattctggatcagagtcttctaaatttgcattgagtgataatgaaattgctgattatgaattatctggtagtgaaaatgaaaaaagtgaagatgctgatgacggagaggaagaggatgataatatcacgaacaagaaaaagctgtaccgcacaaaacacatcttaaacgaatcggactctgaggtcgaagatgaacagaaaatggaagtcgaaaaaaaagctgaagacataccgaaaagaaacgccattgatttaggtcattatggtaataatatcgacgaagatggtagtagctcattccgagcagctattgttttagacacgcaacaagttgatgaaataatcactcaaacaaaatcgccaaaacatgaagataacgagggaaaggaagaaaaagaagaagagagtgaagagacgggcgacgacgatgacgacgacgatgacgacgacgacgatgacgatgacgacgttagtgaagcaatccgtcgtgaactgattgataaggaaaaattagaacggagacaaaaagaaaaggagcaagctactaaactaaaagaattgaagagcaagggtgttacaaacttttttgaaatggaagccgaagaatccgaagatgaatggcatggcgttggtggtgccgatggcgaagggtctgatgaatatgattctgatgtagaaaaaatgattgatgattattccaagaataagtttaattcgcatgaaattagagaaatgctggcggcagaaaataaggaaatggatgtaaaaatgataaacaaaatcctttatgacattaaaaatggagggttccgtaataaaagagccaaaaatagcttagagctggaattgagtgatgatgaagatgacgtgttacaacaatatcgtctcaagagaagagagttaatgaggaagagaaggttagaaattggcgatgacaccaagctcgttaaaaaccccaagtccaaagcattctttgaaagtatggtagaagatattatggagtttaagaacccatttggagcagagaaggaatccgatcaagatgtcactagtactgctacagattcgaatactcaagataacgatagcacaaaatctgataatagtacaagtaataatgaacacaataaacatgcaggtgataaaagtaagaaacttatcatatctgaggatttcgttcagaaaagtttatcttttttgaaaagcaacaattacgatgaatttgaaatggacaatgagctggcgaggatacagcatggaaacggcgaaggagatgttgcagatttgtttacattaaaacagcatagtctaataaaatcgttcacgaactcacaaacagattcattcagttctaggacaacgaacacagtaattaatttagaaacacatagagagggcaacgatgatggaggaaacggagatcaatcgttagttggcgggtttaagcatccatccgtaatcaaatcatttgcatccagaacagatatcaatgataaattcaaagaaggtaataaaacagtcaaaatttccaagtcttataagacagtagggagttcaaaggcttctatcacatatatggggaaaacaagaaaattaatggcaccaaaaaggaaaattgaggaggatcatcatcttcaccatactaaaaaattgaaaacgcaaaagagtaaactttttgaaaatgggcaagatagcttcgacagttag

SEQ ID NO: 262 - DNA, 951 bp, Saccharomyces pastorianus
atggtgtctacacataacagagataagccttgggataccgatgatgttgataagtgggcgatagaggagtttaaagaagaggacaatgcctctggtcagccttttgctgaagaatccagtttcatgactctattccctaaatacagagagaactatttgaaaaccatttggaacgatgtgacaagagccctggacaagcacaatatctcgtgtgttctggatttagtcgaaggttctatgaccgtaaagaccacaagaaagacctatgaccccgctattatcttgaaagccagagacttgatcaaattattagcccggtcagtcccattcccacaagctgttaagattttacaagatgatatggcttgtgacgttattaagatcggaaatttcgtcaccaacaaagagagatttgttaagagaagacagcgtcttgtggggcctaatggtaacacactaaaggctttggagcttctaaccaaatgttacattctggtacaaggtaacacggtaagtgccatgggccccttcaaaggcttaaaggaagtccgccgagtcgtggaagactgtatgaaaaatgttcaccccatctatcatatcaaagagctgatgatcaaaagagagttggcaaagagaccagaactggctaacgaagattggtcaagattcttgccgatgttcaagaagagaaacgttgccagaaagaagcctaagaagatcagaaacatcgaaaagaaagtctatactccattcccacctgctcaactacctagaaaggtcgatttggaaattgaaagtggtgagtatttcctaagtaagagagacaagcaaatgaagaaactaaatgaacaaaaggaaaaacaaatggaaagagaaatcgagaggcaggaagaaagagcaaaggattttgttgctccacaagaagaagcatacaaaccaaaccataactaa

SEQ ID NO: 263 - DNA, 288 bp, Saccharomyces pastorianus
atgtccgaacaagcacaagcaccagcgaaaagcacaccctccaacaactctaaagagaacggcagcgccgtgtccacagtccttgacgccaagtgggacatcgtcctgtccaatatgctggtcaaaactgccatggggttcggcatcggtgtgttcacttcagtgttgttctttaaacgccgtgctttccccgcatggctgggcattggattcggtgttggaagaggttacgctgaaggcgatgccatcttcaggtccagcgccgggctcagatcctcgaaggtttag

SEQ ID NO: 264 - DNA, 2130 bp, Saccharomyces pastorianus
atgcgcttgttgttatgcaagaactggtttacctcgcctgtcatcacaccgcttctgtacacccgttgtctatcctcaatgaccaccgctgctagcttccccactgctcctcaaaccccgcccagctggtcgtttactccccacgacataagcgggaggaccaaggaaattatagacaagagtaataagttttacgactccatgagccaggtggagagtcctgctgtgaccaattttgtggaaccgtttatgaagtttgaaaatgagttgggcccgatcatcaaccagctgactttcttgcagcatgtgtcgtccgacaaggagatcagagatgcgtcggtggactcctcgctgaaattggacgagttgaatatagacttatcgctgcgccatgacgttttcttgcagttcgctcgcgtctggcaagatgctcaatcacaggcggactccatcgaaagggagactttcaaatacattgagaagtcttacaaggactacattcattccggtctggaactggatgagcctgatcgtttgaagatcaaagagatcaaaaagaaaatctctgtcaactccatcaatttctccaaaaatctcggtgaacaaaaggaatacattaccttcaccaaagagcaactggaaggcgttcccgactccatcttgacgcagttcgaaacaatcgaatctggcagtgacacgttgtataaagttacttttaaatacccggatattttccctgtgatgaaactggcatcctcttcccagaccagaaagcaagcattcttggctgatcaaaataaagtccctgaaaatgaggccatactattagatactttaaaactgcgtgatgaagtggcatctttattgggctacgacacatatgctaactataacctatatgataaaatggccaaagacagcactactgtaatggattttttgaatgatttgaagaaaaagctaattccactgggcgaaaaggagcttcaaatcttgcaagatatgaagtccaaggacgtcaagaaacgcgaccaggacgaagatccaagctactacatctgggaccaccgttactacgataataaatatttgttagagaacttcaatgtggatttggagaagatttctgagtatttccccctggagactacaattactcgtatgttacaaatttatgaaactctgttcaacttgaaattcatcgaaactaaaaacgctcaagagaaatctgtctggcatgaagacgttaagcaattagccgtatggaatatggacgaccccaagtcaccaaggttcattggttggatttatttcgatttacatcctcgtgatggtaagtatggtcacgcagcaaactttggtttgtcctcatcatttatgatcaacgacactacaaggtcgtacccagtcactgcattagtctgtaacttttctaaatccacgaaggataaaccttctttgttgaaacataacgagatcgtaacgtttttccacgaattgggtcacggtattcatgacctagtgggccaaaacagggaatctagattcaatggtcccggatctgttccatgggattttgtggaagcaccttctcaaatgttggaattttggacctggaacagaaatgaattggtgcatctatcatcgcattataagacaggcgaaaaaattccagaacatttgatcgattcattgataaagaccaagcatgtcaacggtgccttattcactttaagacaactccattttgggctatttgatatgaaagtgcacacttgcaaagacttacaaaacttatcaatttgtgatacctggaatcaattaagacaagatatctctttgatgtccaatggcggtactttatccaagggttatgcttccttcggtcacatcatgtccgactcctactctgccggatattacggttacttgtgggcagaggtatttgctactgatatgtattatactaaattcgccaaggatcccctaaacacaaagaatggtatacaataccgtgatatcgtgttggcccgtggtggtcttcgtgatattaatgatagtttgaaagaatttttgggtagggaaccttccaaggatgcctttttaaaggaattgggattacaaaattaa

SEQ ID NO: 265 - DNA, 435 bp, Saccharomyces pastorianus
atggatcccaaggaaaacaccggtgaaatcggcagaagagacccctggacaaaagtttggaatggtgtaagctcgttgttagattttttcgcagtattggaaaacctgggcgtggtcgatgataacctatacttgagtgggatactaaggaaggtttggttatgttattcatggatctctgtgttcaggtgcgtatggagactgatcaagttgtgtagggtgaaattcaagattaacgaacggctgaatggccaggggaatgagctaataaaggaaaaattgataaattttggtaaaatgtataacgaccaaatcaaacaaatcacagccaatttagttcaagatttaagctatctgatggttttaatttatccaggaacgaggttatttaaaagactatcaaatgtaataacactttgtagaataattatataa

SEQ ID NO: 266 - DNA, 1005 bp, Saccharomyces pastorianus
atggcatttaatgatttaggttatgaccaagatagaagcatccacaacaacagtcatctgcaagagtccaatcaagaaaatacagaaatgaaatccaaacacgtatcgttcaaaccatcaagagacttccatacaaacgattattctaataactacattcacggcaactcgctaccacagcaaaatgtcactaatatcgagaacagagttgatgggtatccaaaactacagaaactgtttcaagcaaaagccaaacagattaatcagtttgccactacaccatttggttgtaaaatcggcatagattccatcgttccaacattaaaccattggatacagaatgagaacctaacattcgatgtggtgatgattggttgcctaacggaaaatcagtttatctacccgattttgactcaacttcccctggataaattaatctcgaaaccgggcttcctcttcatctgggctaattcccaaaaaattaacgagctgacgaaactcttgaacaacgaaatttgggccaaaaagtttagaagaagtgaagagttggtctttgtccctatagacaagaaatcgccattttatcctggtttagatcaagacgatgaaacattgatggaaaagatgcaatggcattgttggatgtgtattacaggtacagtaagaaggtctacggatggccatttaattcattgtaacgtggataccgatttgagtatcgaaacgaaggacaccactaacggcgctgtgccatcgcacctataccgtattgcagaaaatttctctactgccactagaagattgcatatcatccccgcaagaacgggatacgaaacccctgtgagagtaaggccaggttgggttattgtgagtccagacgttatgttagataatttttcacccaagagatacaaggaagaaatcgctaatctaggatctaacattccattaaaaaatgaaattgagttgttaaggccaagaagtccggtgcaaaaagcacaataa

SEQ ID NO: 267 - DNA, 1251 bp, Saccharomyces pastorianus
atggtaacaagacatagagtagccgtgctgtatgatgctcctgaagctattggaagccacatgagtcagaatgacactcatctaactgttcgaggtggtcctggtgtggtcttacaacagaggtggctattggaaagggtagaaagcttagacaaatctaccaagaggatcacttggaggcccagagaggacttagacagagatctaagtgttatcgagaatgaattgagcgccgggttttcggtttactcgaattcaactgacattccaggaagattcattagcaccccaatgtacaattcattccacagtgagaacttcgatatagagcaacatttgcttcttgaagtgaatctggatttgccatggaatccggaatatttcacctatgatataacagtggaacctgctcaaattcaaattgttgaatatcgacccttgaaacagggtgaagaatttacagttggcagagtaaaggacgagaaacttgaggcaggtgtgttcttcgtggatgctagtgatgaagttgacgttgatatcggcggaatacggtgtaattgggggatggatgatggcaagctagaacgatgccaaaagacctctctattatacaaacaaggccatattgccttcaaccgctcatcccaaacggcaccgttatacctagaacaacccattgggttgcatccaaaggtcttgattgatctcacagaatttgacgaacgcccacaatgtatgtatttaatgcacttgcaactaccgttggaattgtttgtcgataaatttcaagtttcacccttactactctttggtgaacacgatttagaattaccacaatactctcttcaagacaaagcatggggatccgagagcatatttgaattaaaagcaggcactgtaaatgaaataaccttgcattctaggtatatcaaaccgtccaataacagtgcgggcaaatttgaagtttcattcagtccagagattatactagcttgcgatacaggtgacgaaaaagtagcccgcaacccattctataagaagggtttaggatatgagtctctcttcacggacgacacttcgttccgtcatttgaacacaactacgctttctgtgccgatcccaagacctgatatgaatgattattccaagataaaatacggcactttgttgtgcctactcatctctatcgtgtaccttctctctaagatatttggtaacaataaaaaaaaggtgccagttaaacaggaatag

SEQ ID NO: 268 - DNA, 1767 bp, Saccharomyces pastorianus
atgcccaatacgcaacatgtgcaattatcagaacctaatcctatggataatttgtctacgccatcaaaaagaggtcatcgccatcgcaggtcattggccatatcaggggattttgattttttgaaccagtctgccacaattgcgaatttcccacttccacaatcacctgagaactgccctgcaaccgcccctactgccacatcgagtatgttgtcaccaacacgctacaacagatttcccttcaaaaccaatgaagatgctggaacgctagatttacctgaaccaaggttttatccgctatcaccaggagacaatttgcagactccgagtcctcggttttttataagtgaagaaccaagtttctcatcaccagttgaaggcgtccctgacgccattattaatctcgatgatgcgttgaagacaagacccaggtcattcaaatctcacagaagatccgaatccgctcctcctgacttgcaggttatgattggtgaaggtaactgtgtagctagctctaattccatgataaaagaagaagaagacttcccgattgattcggaatccaaaaatgacacacccaatcaagaactaccgacggaattactatccccactgcggccttccttttgtacatctgaacaggctattgaaatagatgattcagccctaaatggatccccaacgcattgtaatcatagcatgcaaaactttaatgcccacaatttcaacaagttcaattcattgaaaattaaaggccaaaagcaaaggtattatcactatacaaaacaactacctttaactgcgagttctgacacacaatccccaaaagaacagaagtcagccatttcaacaactatgaatcagacaatgacaccttcctctttggcctacactccttcaaaactggcgtttacaccagcaacaccaatatctttttatgataataatatagatatcactttgaacaacgaaaattataccactaacctaaaagacacgactgaaaatgtgaaaaataattacccaaaaaagagtgggagttcacaactcaaccgtggatgggatactgagaaaaggcaggattttagcggagaggcaagaagaagaagatcagggagccctatttcccatatacaacaccgcaacttaattgataatatgaaaggtaggcgaaatagtaacacgataaactcgacattcaactacaagagtaaaatttatgacatgccttatgatgacatgatgaaaaacgataacaataatggtcaatctctaccgttttcggtcaccggcgccaatgatgaaggatatgccggagaaaatatttcgaaagatagttatgtaccattgcaacactcatcagttaaatcctgcacgcctgatggcaaggaaggaatgcacgcatttgcaggtgatgagagcaacgaatacgctaaatttgaagggcaagtaaggatacattcacagcttagtaaagacattcttttgggtgaaccaggcgatatggttgatttgtcttcattagtaacctcaccgagaaaagcttccaacgagactggagatttggccttcaatttatctcaagatgataaatatgatgccaataacacgccaaaaacgatcggagcgggcaatagcgtagcaacaagtaatgaaagtcgatgcattagtgacagtgcattggaaaagaaaggacaaaataatgaagttagaaaaaaaagaaaatccaaattagggcttttcagacatattttttcaaggaaatag

SEQ ID NO: 269 - DNA, 966 bp, Saccharomyces pastorianus
atgagtatccctgctgacattgcatctttgattagtgacaagtacaagagtgccctcgacaatggtagcttaaagttcgtcaagactgaaagtaaaaaattaaaggatccaaatactggtatgccatacttgattagccacatgccaagtttgttagaaaagccagaacgcgaccaaactccagaaggcgaagatccgttgggccaagctgaggcggaattgacagttattccagaatttggtggtgccgataacaaagcgtacaaattactattaaacaaattccccgtaatccctgaacattctttattggtgacaaacgaattccatcaccaaaccgatgctttgtccccaactgacttattgactgcttataaattgctatgttctttggacgatgaagattccaacaagagacacatggtcttttacaattccggcccagccagtggttcttctttggaccacaagcatttgcagattctggaaatgcctaaaaaattcgttactttccaagataaactatctagtggtaaagaacatttcttgccaactttcaacgccgaaccattgcaagatgcgaaagtttcgtttgctcatttcgtcttgcctatgccagaatctgaagaagcgatcgatgaagacttattggccatgtgttacatttccatattacaaagagctttgacctttttccaggattggacgaacgataaaccagatctaaagaaatcttacaatcttatgttaactaaagaatggatttgtatcgttccacgttcaaaggccttttccgaccaaatgaaaataggtttcaactccaccggttactgcggtatgatcctaaccaaagacgatgaagttttctccaagattattgagaagcctgaattaattaacgatatcttattagaatgtggtttcaaaaacacttctggtcaaaaaccaaacgaatacaactactaa

SEQ ID NO: 270 - DNA, 777 bp, Saccharomyces pastorianus
atgaaaaaagtattcgaacagtttcgaaaaagtgaatcactattccaaattatcaaggggcctcagcacctagattctccaaaattatttgtccttgattcatcattcaatccaccacatctggctcacttccagctactatctcaaaccgttaagaatttcaagttaagtgacacccaatctcatgttctcttgcttctagcagtaaacaatgcggataagttacctaaaccagcgtccttcccacaccgtttagaaatgatgtgtttatttgctgattacttacaggagaaactacctcactctgtggtatctgttggactgactgtcttttcgaaattcattgacaaagacaaaatcttacacgaacagtttacccaaggtcgcaatacaaatataggttatctggtcgggtttgatacaattgctagaatctttgatgagaaatattaccaccccttaaaaattagcgatgtaatggagaatttcatgtcgagatgtcaattgtattgtttggccaggggggactgccatctaagtgcggaatcgcaattgaaatatgccaatgatatccttgaggggaaattcgaaccagtcatcccaaaggaatgggggtctcgaattcatgttatgcaaaatgattatccgtctttaagaaacgtttcctcatctgaaataagaaacaaattgaaaagcggtcaggtggataacttaaaggatgaactaccaccctgcatatacgattacgtgacgaaaaatgtgacaatatttgattga

SEQ ID NO: 271 - DNA, 2250 bp, Saccharomyces pastorianus
atgaagataacgtgtacggccctggtgtgtgtcttcatttcactttttctaaggacgagttgtgtccaagcagttttttcagatgatgcatttgtcacagattggcaattggctaacttgggcccctgggagaaaatcatccctgatgctcgagaccgcaaccggattctcattgtgtccaatcccacggagacttcttctttgctttcttctttcaatgtctcttccggacagattcttttcagaaacgttttgccctacaccgttgatgagatccaactagacgacgataaccacaacgttgtggtttgcgtggactcgtcaagccaaagttggcagaagtttgacctgcacgactggtttttactggacgaaggcgtaggtcacgcccctgcctcaaccgccttgtcccaatattcgtatccaaacgatcaagtagttattaagggcaacgaactgcacatcctcgacaacgagtcaagtttagcggaatggaaactggaactgccccacgggtttaacaaggtggaatatttccagcgtgaagaccccttggtcttggtgctgaacgtcaacaatactcaatatttagggttctccgtcaatggtacggaattggtgccagcttggcaacgggatgaatcgctgactaacgtggtagactatgctgtgttggatgttttcgactctaaagatttggaattgaataatgatatgatcgctgaacgtgattcttcttcactttggaacgcttactggctcagagtgacgactaattggaaccgcttcatgaatctattgaaagaaaaccatttttcacccggtcgtgtttttacaaggctcttagcgttggacaccaaagataccactacatcagacttaaaatttgggtttgcaaaaaccttaattgttttgacccgtaatgggatcatcggtggccttgatatggtcaataagggccaagttgtttggaaacttgatttgcaaattgatcaaggtattaaaatgttttggaaagacaacaaccataaggagcttattgttttctctcgtgatggtcactatttgacaatagatctcgttaatggtttaccggtgatcaaatcaaaagcttctttactaagcaaaggggctgttgaatcagttatcgaactagatgacaaccaatgtgaatacttgattaaatttgataatggaaaccaccaattgttgaagttggatcccctcgttgaccacacagactcctcaatattcatcactgaacatgactcgaatggcatatttggtcgcatgatagtgaatgatgaagttcaagacacttggcaaagaaccgtgaagccaacggaaaaaattgtggcatttaataaaagagatgaaacaaacttaaattctcttggtctaaccttgggtgataaatcagttctttacaaatatctatacccaaatttagcggcttacttagtcactaataaagaacatcacaccatcacttttaacctaattgataccataaccggtgaagtcttgatcactcaagaacacaaggattccccagatttcagattaccaacagatattgtgttcggtgaatattgggtcgtttattcctatttcagtttagaccctgttccagaacagaaactggtagtcgtagaattatacgaatcactaacgccagacgaacgtttctccaacacaagaagatcttacgatccattaactggtcaaactaacaagcttcaacatatcgctaaacagtatattttccccgaaataatcaaaagattggcaatctccaaaacaacaaatgacattaccacaaaggcaattgttatggagttagaaaatggtcaaatcacttatataccaaagctcgtattaaatgcaagaagtaaaccagaagatcaaatgactaatgaagataaaaaggaatttatggccgccccatatgcgccgatcgtcccaattaatgataatttcgtcattacacactatagaaatctaatactgggacccgattccaagttaatttccattccaacaaatttggaatctacaagtatcatctgcgatctgggccatgatgttttctgtacaagagtcacaccatcgggccagtttgatttaatgagtcctactttcgaaaagggtaaactactcattactatattaatcctgttggtgataacatattttatccgcccttctgtttcaaacaagaaattgaaatctcaatggttagttagatag

SEQ ID NO: 272 - DNA, 1242 bp, Saccharomyces pastorianus
atggctgtatacacgcccccctcagacaccaacagcaatcctgaccaccctcactcgcaagaggagcatgacaaagacgataatgacatcaagaaattttacctaaggccaagcttgggcctgaagctatgggggcccctggtgcccgcacccgacaacctgtcgggcctatacacgctagtcgccgtccagtccgcagtgggtatctttgccctctggagactcaagagactctacagactaccgccactgcgccgcaccgccactcacactaaatcggaattggcctttggcgagctgcccagtgaaatgatcgtcaagggcaagaccaccatcagaaaggacattgccgatttccccacgctgaaccgcttctccaccacccatggcgacatcgtgctcgctccaccccccatcatacctcgccagacccgcttcatcaccttcaggaaactcgtgtgggggttgtttggctcgctgctgttgtcccaatcccttctggaactgacccgcttgaacttcctcaaatacgacccttggtgcgacgaaatgaaatccgtgcgtgacaagaagttcttcaacaacatcgtcaagtactaccacgagggcatagaccccaccaagataaaggtcaaggacgccatgaacggcacgccgctgtcgacaaacatccccgaggtcaagcagagcgtcgccctcgctagagcccaagtggaggcacaaaaccccatcatcaggtggttcggacccttggaatacaagcctatgtccttcaacgagtacctcaatcgcatggaattccacttggacatgttcgagtttttccaaaacaaaagaaacatcagagaaaactctatcgagctgatcaactcgatatcccagtcctctgcaggcctggaagacctttccgagtgtaagaagctacatttacagaacgtcgaaaagagactgcatttcctggcatcctcgaaggatgccacccccgcgccagagaaaaggagaaccaacaccatgctttcacgaggagtcgtcttgccccacgacaccaacgctccgcaagatatagacctagatacaataagatcgctgtacgatccgtggatgactttggccttggaaacttctctaagcataaaattcatacccaccactatgccctcccacaccaagactcccaccacaaccgattctccaggtccaggccccacacctaaggccatcactaatgaaaagacacattaa

SEQ ID NO: 273 - DNA, 1503 bp, Saccharomyces pastorianus
atgtcttttgacgacctacacaaagccaccgagagagcggtcattcaggccgtggacaagatctgcgacgagttcgaagtcacccccgaaaaactggacgagctaaccgcctacttcatcgagcagatggaaaaaggcctaaccccgcccaaagaagcgcacgcactggcctcggacaagggcctgcccatgattccagccttcgtcaccggctcccctaacggaaccgagcgcggcgttctactagccgccgacctgggcggcaccaacttccgtatctgttccgtggatcttcacggagaccacacgtttggcatggaacagatgaagtccaagattccggatgatcttctggacgacgagagcgtcacgtccgacgacctgttcgggttcttggcccgccgtacgctggcattcatgaagaagtaccacccggacgagctggctcgcggcaaggacgccaagcccatgaagctcggattcacgttctcttaccctgtggaccagacgtcgttaaactccgggacactgatcaggtggaccaaggggttccgtatcgcggacaccgtggggaaggatgtggtacaactgtaccaggaacaattgcgcgctcagggtatgcccatgataaaggttgtggcgctgaccaatgataccgtcggtacgtacctctcgcattgttacacttccgataacacggactcgatgacttccggagaaatctcggagccggtcatcgggtgtattttcgggaccggtaccaacggctgctatatggaagagatcgaaaaaatcaccaagctgcccaaggagctgcgcgaaaagctggctcatgagggtaagacacacatgatcattaacgtggagtgggggtcgtttgacaacgagttgaaacacttgcccacgaccaagtacgacatcgtgattgaccagaaactgtccacgaacccgggcttccatctgttcgagaagcgtgtgtccggtatgttcctgggcgaggtgctgcggaacatccttgtggacctgcattcgcagggtctgctgctgcagcagtaccgctccaaggagcagctgccccgtcatctgacgacgccgttccagctgtcgagcgaggtgctatcgcacatcgagatcgacgattccacggggttgcgtgagacggagttgtcgttgctgcagagcctcagactgcccaccacgcccacggagcgcgtgcagatccagaagctggtgcgcgccatctctaggcgttccgcgtacctggctgcggttccgctggctgctatcttgatcaagaccaacgctttgaacaagaggtaccacggtgaggtggagatcgggtgtgacggctccgtcgtcgagtactacccgggcttccgctccatgctaagacacgctctggccctgtcgcccctgggcgcggagggtgagaggaaggtccacttgaagattgccaaggacggctccggtgtaggtgctgccctgtgtgcgctggttgcctga

SEQ ID NO: 274 - DNA, 2259 bp, Saccharomyces pastorianus
atgtcacagagcaacaagatcgcgtacgtgctgaactccgacacgcaggaggccggcgagtcggcctccgtcggctgcttcgacaagaagcagctggccaagctgctcgtccacacgctcaaggaattgggctacgactccgccgcggaccagctgctcctggagagcggcgggtaccagaacgagtcgaaccatatccagaccttcttcaggctcgtcaagaccggccagttcgacctcatcgactggcgcagcgtgtgttcgctgcccctcgcacatagctcgccgctcaggcctgcactgctgcaaacgctgctctcgcccgcagcgcccaccagcagcgccaccgggtcgctgtttgaccacatgcttcagcagctgcagggactgcagctgctgatggcgtctgtgggcccgtccacttgctcggacgccgaggtcaccacgctcaggaactacgtcgagatcatgatcctcgtcaacaggcagatcttcctcgagttcttccacccgcctgcagctgctgctgctgccgccgccccccacgcgggcccgcccaccacgctgcccgtcctgtacctgcgcaaggtcctcaagtgcttcatcgagatctgggacgcgctgttggtgtccaatgaccagttcctcaacgaggagaacatcttcaacccggaaacaaccttgagagagctctccacgtacctcacgaacccgaagctcacggcgcacttgaacctcgagcgcgaccacctgatcgacgccatctccaaatacatcgacccgaacgagctcgtgcccaagggccgcctcttgcacctcttgaagcaggccatcaagtaccagcagtcccaggacatcttcaacatcctcgacccggacgacgacgcccccttctcctccgagtcccaccgcatcaatctgctgcaggacaacatctcgcacgacttgactgtgaccttccaggactggaagaccatccaggacaccaccgacgagatctggttcctgactttctcccccgacggcaagtacctggcctccgccacctccgagtcctccaggggctacttcatcaccgtctatgacgtgcaacaagacttcaaaatccacaagacctgcgtgagcctgtcgcagtccgtgctctacctcatgttctcccccagcagccggtatctcgtcgcttgccccttcagcgaggacgtgaccatatacgacatgaacgcaatctctccgccggatgtctctgccacagactcgttcttaccgtactcttccaccaggctgtcacccatggactccttcaaactggacacctccccatacctcgacgacacggaatcctcagcgtcgtcctcatccaggcctgcaaacgcgacttccagccagtcccgggtgtggtgctgcgatgccttccacacagcgcagcacgaagactggatggtcgtcggatcgcccgacagagaagccatggtgcactctctcactacaaaggagtcgctcttcagcttgaaaggcaggacatgtatcgctctaggccacgacgaaaacgtctctggaagaaaactaatagacccggcaaaggtcctccatacggccaagacaagctgtggtggcagctggcagtacgtcgaggacgacgaagctttcccgcgcgtccacgacgtgaagatcagctacgacgacaactacgtgcttttaatgacccaccagggcattgtcgatgtctacgattttagcgggttcccctccagagaaatgctatccaagcaaacaatcgacttgaaggatttcttgattccaagagtcgcgagactggacattggcaaaaacatgacctgcatgtcactaccactgaacaccaccacccaccatcgccacagacatcaaataaccgaatctcaacatttggtcttggttagtttgcaagataacgaactacaaatgtgggactataaagagaatatcctcatacaaaagtatttcggccagaaacaacagcatttcataatcagatcttgtttcgcctacaacaacaagattgtcatgagcgggtccgaagacggcaagatttacatttgggatagaatcagaggtaatttgatctctgtgctctccggtcattccacactgatcaacaactcctcaaaacccgttgtgaaaaactgtaacgtggtcgcatcaaatcctgtcgataaagaaatgtttgtgtctggcggcgatgacggtaagataaaaatctggaaaatatcaagaaactaa

SEQ ID NO: 275 - DNA, 1587 bp, Saccharomyces pastorianus
atgagctatggaagtatacatgatatgaatgaaccggagaccaaccgtataataaaaaaaacccaaaacaacatcaagggatggtacttgtattcgttttctagtgagccgtttgtggtttctgcggtttcgacctatattcccttgttactgcaacaatttgccagtattaacggtgtaaaggtgcgcgaccatgccataccttgtctggctgaaaatggaagtgattcagataagtgtgttctcggcctatttaacaataggatatttgtggatacctcgagttttgctttgtatgtgttttccattagtgttttgttccaaactcttattgtgatatctgtttcagggatagtagatctttggggaagcgttaaattcaagggcagagttctggtttggtttagtataataggtgcatttgctactattgccatttcaaaattgaatgacacccaagtgtattctctagctgggctttatattatagctaatggttgttttggtgttattaatgtggtgggaaattcccttttacccacatttgtcaaggattcattgaaaagtcaaagtcaaggagtttatgaacctgatgatgtggattcacttacaacgctgatcagcggtagaggtgcttcgctaggttattcaagtgcattgattgttcagattgtgtctatgtttttggtctcattgaaaaagggcactaagcaagacattcaaatcgctgttcttttcttggggctttggtggtttgtgtggcaattacccatgatctggttgattgatgatgtaacgataccagctacaggggacgggtccactgtagcatctacccatagttcgtattatgatgagcaaagacgtacgggaacgctaagttggaaaacgtacctttcatatggttggctgtcgcttttccaatcgttcaaacacgccaagctattgaaggatgtaatgatcttccttgttgcgtggtttatcattagcgattccattaccacgataaactctacggcaattttattctccaagacagaactacatatgagcacccttaacctaatcatgataagtatcctgaccatggtaaatgccatgctaggcgcttttgtcattccgcagttcctggcgacaaaattccggtggtcatccaatcaaaccttgatgtacattattatttgggcaagtttcatcccattctacggtatactcggatttttctttgatgcgtttggtttgaaacataagttcgaaatgttcctattggccatttggtacggattatcattaggtgggttgtccgccgtttcaagatcagtctttagtttgattgtgcctcccggaaaagaatctacatttttcagtatgttcagcattacagataaaggttcatccattctggggccctttatcgttggtctactcactgacagaacgcataatattcgatattcgttttatttcttcttttttcttttaattctatcattgcccgtattgaactgtttggacgttaaaagaggcaggagagaggctgagcaattgagccaaatttctccagagactgaaagaagattggattga

SEQ ID NO: 276 - DNA, 1065 bp, Saccharomyces pastorianus
atggggtttcttacggatcatccacacaccgcaattaccgagacgatctttcggatcgtctcttcaagagactacacgctggaggtggagctagcacccttgatccagctgatcaaggctgaccacaacgactacaactacactatcaaccaggaggaggctgctcgggcactcagaaagaagatcaagtatggaaaccggctacaacagtccaggacgctggacctcctggacctgtttatttcgcagggtgtcaagttcaccgtgatgtacaacgatgacaaactgctgcagaggctgcagggcatggcaacaaactccgaaaccagcgggtccggagaaaagtacgagtcccggatcatcaagaagtgtgccggctatgttattgcgtgggcgaactacattgtgcagaatggtctggagcgtgccagagcctatgcgggtctttaccaaatgggcctgttggtcaagcagaagtactcaaaaaccagccgttccagccgtcgtagtgggcgttccggtggccgctcaaacttcatggatgatagtgccgacgacactttgtaccagtccggatcactaaccagtgccgataggctgtataggattccgcagatcaacatgaacaaggaggcacccaggatcaggctcatcatcagtgatgctctcgcgtctgctgtctccttgcaaaactcgctgatcgggttgcccaaggctaagtgctccacggacgacgaagaggctacgtccaagttcatccaggccagggccatcaggaggaaagttcttagatacctgcaactggtcaccgagggcgagtttcttggtagtttgattcatgccaacgatgagttggttgctgctttgactgcatatgacgagagaagtgctcaggatgacgccgccgacgaggatgaccatgactcgtacaacgatgacgtttacgatgaaaacgagcaggacaacagcaggtacatcgacagcgactcctcggaggaggagagcctatcctcgtgtcagccctccagcgcctcaaacccattcggcgatcataataagatttaa

SEQ ID NO: 277 - DNA, 1041 bp, Saccharomyces pastorianus
atggaggacgagaaacagaccatgagggagggctcgaacgatgtctcgcccggcctggacgtcaacgatacgatactaatgaataacgaagattattcgcaatggtcggtcgatgatgtggttacttggtgtatttccacactggaggtggaagaaacagatccgttatgtcagaaattacgggacaacgacatcgtgggtgatcttttgccggaattgtccttgcaggattgtcaagagttatgtgaagatgatttgaataaagctataaaactcaaaatattgatcaataagctgagggacgtcaagttggaatggaaggacgacaagactcaagaagacatggtgacggtcctgaagcatctgtacactacaacttctgctaaactacaagaattccaatcacagtatactaggctgaggatggatgtcttggaggtaatgaagaccagttcgaactcttcgcccatcaatacgcacggagccttgactgcagcgccttcgtcaagcaacacaattatacccacccatgacggggtgcccctaccacaaacggaatattttgacacagctcacaaccgacaatcgccatcaaggagagaatcaccggtaacggtatttagacagcccagtctctctcataccaaatcatcattcaaggatagcaagaacaaactaccgcaaatatctacaaaccaatttcactctggggcaacctccacatcaaacacaccaggaccgtcacccaatgaggcattaaagcaattgcgtgcttctaaagaggactcgtgtgaaagaatcttgaaaaatgcaatgaaaagacacaatttggctgatcaggattggaggcagtatgtcttggtcatctgctatggggatcaagagaggctgctggaactgaacgaaaagcctgtaatcatattcaagaatctaaagcaacagggtttgcacccagctattatgttaaggagacgaggcgattttgaagaagtggcaatgatgaacgggagcgataacgtcactcctggtgggagactctaa

SEQ ID NO: 278 - DNA, 894 bp, Saccharomyces pastorianus
atgggtaatgaagacatcaacaccatgaaaaatggatttatagtggtgccgttcagattaccagaccacaaggcattacccaaaagtaaagaagcttcattgcattatatgtttgccagaagacatcaaagctcgaacgccaatgaatcggattgtttgtttttggtcaatctaccattattatccaacatagagcacatgaaaaaatttgttggacagctttgcgagaaatacgatacagtatcacatgtggaggaattactatacaacgatgagtttggtttacacgaagtggacttatccgcgttgacctctgacttgatgtctactgctgacgttaacgaaaaaagatacactccaagaaatacagctctattgaaatttgtcgatgacgcaagtataaataattgttggaatgctctaaggaaatattccaatttccatgctaaacacccaaaggaactgtttgagtggacatataccaccccatctttcaccactttcattaatttctacaaaccactagatatcgattacttgaaagaagacattcacacgcatatgatggtgtttgaacagcgtgaagctcaagcacaagaggacgttcaaagctctatagtggatgaggatgggttcacactagttgtgggaaagaacaccaagtcgttgaattcgataagaaagaaaattctgaacaagaatccattatctaaacatgaaaacaaggctaagccagtttccaatattgacaagaaggcaaagcaagatttctacaggttccaagtcagagagcataaaaagcaggagatcaaccaattgttaagcaaattcaaggaagaccaagaaagaatcaaggtaatgaaagccaagagaaaattcaatccatacacttaa

SEQ ID NO: 279 - DNA, 2400 bp, Saccharomyces pastorianus
atggtgttaccaattctaccgttgattgatgacctggcctcatggggcaccaagaaggcatacgcttcccttgttggtcaagtgctcctggatggttcgagcctaaacaaagacgaggttctccaatttgccaaggaggaagaggtgcctttggtggccttgtccttgccaaatgccaagttcagtgatgatgatatcattgcctttttgaacaatggggtgtcttctcttttcattgcaagccaagatgctaagattgtcgatcacttggttgaagagttgaatgtgccaaagaaccgtatagtcgtggaagaaaatggtgtctttcacaatcaatttttagtgaaccaaaagttttcgcaagatagaatcgtgtccataaagaaattgaccaaggatttgttgattaaagaagtggtcgctgaagtacgcaccgatcgtcccgatggtttgttcaccacactggtggtcgaccaatacgagcgttgtttagggttagtatactcttcaaaggaatctatagcaaaagccattgacctaggtcgtggtgtttattattctcgttctagaaatgaaatctgggttaaaggtgagacttccggcaatggtcaaaaacttttgcaaatctctaccgattgcgattctgatgctttgaagtttattgttgagcaagaaaacgttggattttgccacttggagaccatgtcttgctttggcgaattcaagcatggtttggtcggattagagtctttactaaaacaaagattacaagacgctccaaaagaatcttatactagaaggttattcaacgatcccgcactattggatgccaagatcaaagaagaagccgaagaactgaccgaggcaaagggcaaacaagaaatatcttgggaagctgccgacttgttttactttgcattggccaaattagtaaccaataacgtttcattgaaggatgttgaaaataatttaaatatgaagcacttaaagattacaagaaggaaaggtgatgctaaaccaaagtttgtggcacaagccaaagctgaagaggaagcaccaaccggtccaattcacttacacgtggtaaatgcctctgacaaagaaggtatcaagaaggccttgagcagaccaatccaaaagacttctgaaattatgcatttagtcaatccaatcattgagaatgttagagatagaggtgactctgctctattagagtacactgaaaaattcgatggtgtcaaattgtctacacctgtgttgaatgcaccattcccagaagagtatttcgaaggcttaactgaggaaatgaaagacgctttggatttatccattgaaaatgttcgtaaatttcatgctgctcaactgcccaaggagactcttgaagtggaaacccaacccggtgttctatgttccagattccctcgtcctattgaaaaagtcggtttatatatcccaggtggtactgccatcttgccaagtactgccttaatgcttggtgttccagctcaagtagcccaatgtaaggaaattgtcttcgcttctccaccaagaaaatccgatggtaaggtttcacctgaagtcgtttatgttgcagaaaaggtcggtgctcgtatgattgtcctagccggtggtgctcaagccgttgctgctatggcatatggtactgaaaccattcctaaagtggacaaggttttgggtccaggtaatcaatttgtcactgctgccaagatgtatgttcaaaatgatacacaagctctatgttcgattgatatgcctgctggtccaagtgaagttctagtcattgctgatgaagatgcagatgcagattttgtggccagtgatttactatcacaagctgaacacggtattgactcccaagttatccttgttggtatcaagttgagcgaaaagaagatacaagaaattcaagatgccgtccacgatcaagctatgcaactgccacgtgtagatattgttcgcaaatgtatcgctcatagtacaatcattctttgcgatggttatgaggaagctctcgaaatgtccaacaaatatgcaccagaacatttgattcttcaaatcgccaatgctaacgactacgttaaactggttgacaacgcaggttccgtgttcgtgggtgcttacactccagaatcgtgtggtgattattcaagtggtactaaccacactttaccaacatacggttatgctagacaatacagtggtgccaacactgcaaccttccaaaaattcatcactgctcaaaacatcacacctgagggtctagaaaacatcggtagagctgtcatgtgtgttgccaagaaggaaggtttggatggtcacagaaacgctgtgaaaattagaatgagtaagcttgggttgatcccaaaggacttccagtag

SEQ ID NO: 280 - DNA, 1326 bp, Saccharomyces pastorianus
atggatagataccaaaggaaaataggatgtatcatacagatccccaacttggggaggggacagctgaagtacgtgggcccagtggacacgaaagctggaatgtttgccggtgtggatctgttggccaacattggtaagaatgacgggtctttcatggggaggaagtactttgacacagaatatcctcaaagtggactgtttattcaactgcaaaaagtggcatctctgatcgaaaaggcatcgatatcgcaaacttcaagaagaaccacgatggaaccgttatcgatacctaagaacagatccatcacaaggcttacgaaccagttttcgcccatggacgatcccaaatcccccacaccgatgaggagtttccggatcactagtcgaaacagtggcaaccaccaacagacgacggatcaagaggcgccggatcatcgccaacaggaacccattcacgataacggagatgacaggatggagatcgactctatcgtatcgtccgagagaaagaccccccataacaacggcaacgattggaaagcaagcaacagccatgtgaacgatcataatagcaacgaggttaccatagaattacgagaggctcaattgaccatcgaaaagttacagaggaaacaactgcactacaaaagactactagacgaccaaagaatggtccttgaagaagtacagccaacatttgatagatatgaagccacgatacaagatagagaaagagagatcgacgaactcaaacagcaattggagctcgaacacagacaacaagccaaacaaaagcagtttttcgacgctgagaatgagcaactgcttgctgtcgtaagccaactgcacgaagagatcaaagaaaatgaggaaagaaacattgcccacaaccaacccaccgacagcagcgaagatatcgaactcctgaagaggcaagtggagcagctacgtagtatagaagaccaattcgagttgcacaagacgaaatgggccaaggaacgcgagcaattgaaaatgcataacgactcattaagcaaagaataccaaaacttgagtaaggaattattctcgaccaaaccacaggactcctcctcttcggaagaggtggcagccttaacgaaaagtcttgaagaggccaacgaaaggatcaaacagttggaacaggctcaagaccatccaaccgtggaatccttacccattttcgatccccctgcaccggtggattccacggctggaagacaacagtggtgtgagcattgtgatacaatgggccatatgacagccgagtgcccccaccatgaccctgacaaccaacagttcttttaa

SEQ ID NO: 281 - DNA, 1197 bp, Saccharomyces pastorianus
atggatactgataagctaatctcggaggctgagtctcatttttcccaaggcaatcacgcagaagctgttgcgaagttaacctctgcagcacaatcgaaccccgatagccaacaaatgtcgactattgaatcactaattcagaaaattggtgggtatgtcatggagaaccgtagcggtggtgaagacgcctcacaagaccgtgctgttggcggtggctcgtcctttatgagcacgttgatgtcagactcgaagggttcttctcaatcccaactgggtaaactggctttgttggctactgtgatgacgcattcgtcaagcagcagcaattctagcagggggttcgacgtgggcaccgtgatgtcgatgttaagtggctccggtagtggaagccaaagcatgggtgcttctgggctggctctcttggcttcccagtttttcaagtcaggaaacagctcccaaagtcaaggtcaaggtcaaggtcaaggtcaaggtcaaggtcaaggtcaaggctctttcactggattggcgtctctagcctcatccttcatgaattccaacaatgggaagcaacaaggccaaagtcaagggtccggtggctcgtcatttggtgcgttggcctccatggcaacctctttcatgcattctgatagtaaccagaactccaacggtgcccagcaaggctacaaccaaactaaccagaacaataatcagaattccaactaccaaaacaatcaaggtcacaataaccaacagtaccaaggtggtaacggtggtcaacaacaacaaggccaatccggtactttttcctcattggcgtccatggctcaatcttacctaggtggacaaactcagtccaaccagcaacagtataaccagcaaggtcaaaatcaacagcagcaataccagcaacaaggtcaaaaccagcaatatcaacaacaaggccaacaacagcaacagggtcactcgggttcattctcggcgctggcttccatggctagttcctacttgggcaacaaccagaactctaactcgaactcgaactcgaactcgaactcgggtggccaacaccaatccaacgagtatgggagaccacaatacggtggcaaccagaactctaacggcaacggcaacgattctttcaacttctctggtaatttttcccaacagaaccacaatggtaaccagaaccgttattaa

SEQ ID NO: 282 - DNA, 582 bp, Saccharomyces pastorianus
atgtctgttgttggaacgtatttgaaaactttaacggctcgtcgtaccatctacgctttaaagccggaactacctggtgagatcaccattaaagacatccactctgttgttcagactatcatcaaagaaaccccaactgctttcaattcccagccaaaccgtgccatcattttaactggtgaagctcacagaaaggtctggggccaagtgaccgacggtatcgagagtcccgacggcaagaagagacctgcttcagcaagagacgaagccttcggttccgtgatattcttcaccgatgataaggtgactgaaaagttaaaggcggacttcccagcttacgcagctgcattcccaagtttcgccgaccacacttccggtgctgctcagatcaattcgtgggtcgctttggaagccatgggtttgggcggtcatctacaacactacaacggctacgtcaaggccgccttaccgggcaagatcccccaatcttggaccgtgcaagctcaattggtcttcggtactccagctgctcctcccgctgaaaagacctatatcaaaaacgatgttgaagtgttcaattag

SEQ ID NO: 283 - DNA, 1095 bp, Saccharomyces pastorianus
atgtctactactaagaaaatcgtcgttctgccaggtgaccatgttggtcaagaaatcactgaggaagccattaaggttctcaaagccatttctgacgttcgttccaatgttaaattcgatttcgaataccacttaattggtggtgctgctatcgacgccacaggtgtcccacttactgatgaggcgctagaagcttccaagaaggcagatgccgttttgttgggtgctgtgggtggtcctaaatgggggaccggtagtgttagacccgaacaaggtttactaaaaatccgtaaggaacttcaattgtacgccaatttgagaccatgtaactttgcatctgagtctctattagaattatctccaatcaagccacaatttgctagaggcactgacttcgttgttgttagagaactagtcggaggtatctacttcggtaagagaaaggaagacgatggtgacggtgttgcttgggacagtgaacaatacaccgtgcctgaagtgcaaagaattacaagaatggctgcgttcatggcactacaacaccaaccaccattacctatctggtccttggataaagccaatgttttggcctcatcaagactatggagaaagactgcagaggaaactatcaagaacgaattcccaacactaaaggtccaacatcaattgattgattctgctgccatgattttagtcaagaacccaactcaattgaatggtattataatcaccagtaacatgtttggtgatataatttccgatgaagcttcttgtattcctggttcattgggtttgttgccatctgcctccttagcttctttgccagacaagaacactgccttcggtttatatgaaccatgtcatggttcagccccagatttgccaaagaacaaagttaaccctattgccaccattttatctgctgctatgatgttgaaattatcactaaatatgtctgcagaaggtcaagccattgaagatgctgtcaaaaaggttctagatgctggaattagaactggtgatttgggtggttcaaacagtaccaccgaagtcggtgatgctgttgccaaagaagttaaaaagattcttgcctaa

SEQ ID NO: 284 - DNA, 1506 bp, Saccharomyces pastorianus
atgttgaaattatctactgcaaggtcggttacgagactatctcaactctataattttccggccgccacgtataggctaaagggttctgcctgtctggctaatatgaggttttattatccccccgcagcaggtgtaaatttggacgataccttttcactagaaacccatacggatatccaggctgctgcaaaggcacaggctagtgcccgtgctagtgcatcaggaaccactcctgatgccgtagtggcctctggaagtactgccatgagtcatgcttatcaagagaacactggatttggtacccgtcctatatatcttgacatgcaagccacaaccccaacagaccctagggttttagacaccattttaaagttctacacaggactttatggtaatcctcattccaacactcactcttacggttgggaaactaatactgccgttgagaacgctagagcccatgtggccaagatgattaacgctgaccccaaggaaataatattcacctcgggtgccaccgagtctaataacatggttcttaaaggtgttccaagattctataaaaagaccaagaaacacctcatcaccactagaacagaacacaagtgtgttttggaagctgcaagagccatgatgaaagaagggtttgaagtcacttacttgaacgtgaacgatcaagggcttatcgatttgaaggaattggaagctgctattagaccagatacatgccttgtctctgtgatggctgtcaataatgaaattggtgttattcaacccatcaaagaaatcggggccatctgtaggaagaacaagatctatttccacacggacgccgcacaggcttacggtaaaatcccaatggatgttaatgaaatgaacatcgatctattatccatttcgtcccataagatatatggtccaaaaggtatcggtgccatctatgtaagaagaagaccaagagttagactagaaccattgctatccggtggtggccaagaaagaggtttaagatcaggaactttagcacctccattggtagcggggttcggtgaagctgcaagactaatgaaagaggaatttgacaacgatcaagcacatatcaagaggttatctgacaaactagtcaacggtttgttatctgccgagcatactacattgaatggatctcccgatcatcgttatccaggttgtattaacgtttcatttgcctatgtggaaggtgagtctctattaatggcactaagagatatcgcattatcctcgggttcagcctgtacgtctgcttccttagaaccttcttatgttctacatgcattgggtaaggatgatgctttggctcattcttccatcaggtttggtatcggtagattcagtaccgaggaggaagtcgactatgtcgttaaggccgttgctgatagagtaaagtttttgagggaactttcaccattgtgggaaatggtccaagaaggtatcgatctaaattctattaaatggtcaggtcattga

SEQ ID NO: 285 - DNA, 1143 bp, Saccharomyces pastorianus
atgtccatcaacctacattccgcatccgagtacgacacgtcttacaaactgatccagttgacgccagaactgctagacatcattcaggatcccgcacaaaataaccaattaaggttcaagtcgctagacgaagacaagtcagaggtcgtgctgtgctcgcatgacaagacatgggtgctgaaacaacggaagcactcgaacacggttctgttgatgaaggagtttgttcctgaggaacccattagttttgacgaaacgcagctgtttggactgtccaagccgtacatggacatactaagttttgccaagaccgagtcggaattcgagaccagggaggcagagggccaattgaacctggatgcagtaccaatgtacgatggagagttagacttccgtgaaagggctatgaaaaagtcgtccacgaggattttcgaaacgctggaggaacttctagagaactcaccttgctctgcagtggagggcgtatcgaaatggcacaagatcggggggtctgtcaaggatggcgtgctatgtattctctcgcagaacttcctctccaaagccttacacgtgttgctgatgagtgtaatggcggaatcgctggatctgcaacgtttgcaaattgacgacacgtaccaggcagtgggaaaggacatcgagaacgaatttaatccatatacaaaagaaataatacggactgtgttaaataaatttgcagtccaggagcaacaatcccaggaggaaacgtggcgcttaaggataccctttattgcccagtggtacggcattcaggcgctacggaagtacgtttcagggacaagcatgccacttgatgagtttctcatcaagtggaaatcgctgttcccacctttctttccctgtgacatcgatgtcgagatgcttcgaggctaccacttcaagcccaccgacaagaccatacaatatgtagccagaagtaccctgccgacggacccaaaggagcggttcagagtcctattcaagttgcagtcccagtggaacttggaagacatcaagcctcttatcgaagagttgaatataagaggtatgaaaatagacagcttcatcatgaagtatgctcgcaggaaaagactgggcaagaaaactgtagtaaccagcaggtag

SEQ ID NO: 286 - DNA, 4881 bp, Saccharomyces pastorianus
atggagaaagacctctcgtctctttactcccaggaaaacggtggaggaaatcatgagacccacttcataaccaaattgttcaaatccgttctcgaggcctcgtcgaaggctggccattcgctactggatgagaacagatcgctctcgaaatggaccgatgatgtgtttactcgatcggtgatttatcgcggttcagatgacttgatatggggcgaattcttcatctgcgtgtataaaccatccagaagcactaagctaaatgctataatattcgataaattgggcacgtcatgttttcaatcagtggatatatctcccgattcacagtactatccggccattgagaatttgagtccaacagatcaggaaagtaatgtcaagaaatgtattgccgttgttctgctcaaacgctaccctttgctgtctcgatcagatttatcccgaattttgtccaacacttcaaaaaaatgtgactatgaccctactcatgcaggagatctggctagcagttgtcaactgataacagcagcccctccagaagatgtggggaagtggttgtttgcgtccggatttctgcaaaataaagtcatcaattcagctttgctggacgtcatctatgaaaacaatgagtctaccattgaactcaataacagactagtattccatttgggcgaacaacttgaacaacttttcaatccagttacagagtactcaccagaacaaacagagtatggctacaaagcaccagacgatgacaaggctaccgaatctgatgacgtccttgtgaaggccatttgcaacgagctgttgcaattacagacaaattttacctttaacttggtggaattcttacagaaatttttaattgttttaagagttaaagttctcaatgaagaggttgatgggttgtccactgccaaactgaaccgactctttcctcccaccatagatgaagttaccagaataaattgtattttcctggactctttgaaaacagcaaccccctacggatccctcgaagtgctcaaagcatgcagtataaccattccttatttttataaggcatacacaagacatgaggcagccaccaaaaatttcagcaaagatattaagttgttcgccagacatttcagcaaggtgattccagagagggatatttatacagaaatgaaaatcgaaaccataatcaagggtccccaggagaaattgttaaaattaaagctaattgtagaaaggttatggaaatccaaaaaattgaaacccgaaaaccaggaagtagccaagaaatattacgataatgttgttgatgtcattcattcgtttggtaatttagactctcccctgacttcatatagtacaagagtctttaccccctcaggaaaaattcttacggaattagccaaatgttggcctgtggaactacaatacaaatggctgaaaagaagagtcgttggtgtgtacgatgtagtggatataatcgatgaaaagaagaagaatttattagtcatatttagtgattatgttgtctttatcaatatactggaatcagaaagctattacgcatcagatggatcaaacaggcccttgatttcagatattttaatgaactcgttaatcaatgaagtaccgttaccctcaaagattccgaagttaaaagtagaacgtcattgctatatagacgagatattggtttctatattggacgagaattcattgcgctttgattgcttaaaggggaaagactccttttcagtcgtttgtaaattatcctcctcttttatctcttcctcgacagtggctgatttaattacgaaggctagaattttggagaaggataccgcattccatcttttcaaagctagtagaagtcatttcacattgtattccaccgcacatgagctttgtgcttacgatgcagagaaaattaaatcgaaatttgccttattcttaaatataccaccatcagaagaaatattggacatgaacaatcttcatttggctttctttgcaaaatttgccaaggaaggtgatagtaatagcctgatacgtttggacattctaactaaaaacgggaaaaagcatgttcaaattgcatccaataacatcgtttctaccataattaatcaactggctatcgagataccgatatgttactcttccttgaagtcacctttggtccaagatttacttttcgtaaatgtgaatttaatcgaaagtttggaacataaattgaaggaggccaagcgtaattcaccggatgcatccaaggatagtaatagtaaagcttctgatgtgggtaattttgacgccactcatgaaaagaaaagatcgtatggtacaataacaacatttagaagctatacgagtgacttaaaggacagttcggcagcaggtaatagtaaactcacaaaggaagctaagcaaatatcaccagtcaaaccaataaaaaaggcgagggaaattcccaaggaaacgaaaatagtgggaggtgattccaggagagacgatatagagaagcagcaaggtaaaaaaagcaaaggtttttttggtgcattgaaaagtgtatttggaaataagaaaaaaagtaaacctataccacctcaaaaggcacctcaaaaaagttcacagagactacctaagtcatcaacaaggaagcaaacggttacagaaaataagcttctctctaaacgagcaagcgttgttttgtcttctaaaaagaaaagcactccttgtctgacagaaaaatctcaagacactgaatcttctctggaagcggttgaatttaatccccatgaaccaattggaaaatatttcgatgttagaaacgatttgaaccctcaagatgacgcgagaatatcttcagtggtacggaatacaaaatatgtcacccacatgccctcacaaccgaatagcgacaggaaccaagaaagtgaagagtcaaaagaagatcaaaatgcaaagcaaggctctcccttcaacgttactgttgtgggaagattgccatctcttcgcccagaagaatcgaacgttgagagagagaatggaatagttgagaatgcgggacaagcatcgcaaattcctgaacagaaggtactatcagatcgtgttaaagcatcaatggccgaaagggtgaacactgtttcgacgaaggaacaagatagcgatactcaaaatgaagcctcaagtgctgaagaatttttgaactcggatgctaatgacgaacgcaaacagaatgaaagtaaagttttcaacgatgatttgtttggcgattttattcacaagcgttctgaaagtgcagaaaacagtatcaatggtttgaaccataagttccaacagagagaagttcttgacgaaaagagcgaaatgaataccaactccaacatctcttccaaaacggatgataacgcttccacattgatgcaaaaacctttttcacaagcaagtaaagtactgacagagaattctggagactcaataaatactcataatgaagcaaacggcacaacatcaaaaggtgattcaaaagatgcagcattaaaggaagaaacttttaaaggaaggacagaaaaacgagaaatttttcctagtattccaatgccagtacttcgagcctcagaaataagttttcaaaggtcgccatcatacattgaactgttccaaggcatgcgagtagttttggataaatacgatgctcattataattggaagcggttggctagtcaggtctccttgagtgatgggttgaaagtcaatacagaggaagaagcggtgaccgctaatactacttatggtggtgccaactcagagaggatgagcgcaatttctgaaatagttgataataaaattcagcaacccatcccaactcttctggcgaggtattcggatagttctagtaacgatgacgctggtgatgaatttttcgaaattgaagaggatctaaaagaaaagttgaagggtagtattgacattaatgaagttgataccaataagaactcattcaatcttgccccacgaattgaaaagccaccggcattcaaagttattagaacatcgcctgtacgaatcattggtaagacctttgaagacatcagaaaagatgaagagacttctccctctgatgcttcatttctttatgatgcacacaacgaggataaacccgacaaaaggttgatggagctgaagtttccatctcaagatgaagttcaggatgacaaattctatactccatctgaggagcccacaaccacatttcccgaaattaagatcccaaagagtccgggattagataacgttacaattaccaataataataatacgggtgatcagtttattaatgacactgcgcaaaacagaccggctgatttactggatgatttagaatttagttcattcgatattgcatttggaaattcttcgatgagtgcagatgacatcaaagtagcgtcaaattggaatcggaatttaaataaaacagtaccagctaaccctacaaaagttcaagagtctcccaggggcccattagtatatgttcttcccgaaggtagtggaaatcgtaaaggggatgggcgtcttcaaaatacagacaacgatgaacctatctgggtttcgcccagtaaaattgactttacggacttgagtaagaggactaaagcattgtcgccagaacgtaatgctgttcccttaaaaaatattaacatcaatggcaaatccaaaactaccagagaagaatctatcggcaatatgacgaacgcgttgttatctaaggatgtttcctatgcatatttgactgattttgtcactttaagtgatgatgaaggtgatggtaaaagtgaaaaggtgagttatacggcggacggccccgagaggctcgaattttattga

SEQ ID NO: 287 - DNA, 1302 bp, Saccharomyces pastorianus
atggaaagaagactaggaatgtacggaaatgatagaagcagatcgaggtcgcctgtgcgtcgtcgtttgagcgatgacagggaccggtatgatgattataacaacagtaatagtggtagtggcggtagcagtcgccatcaaaggcgtgaccgaggctcccgttttaacgatcgttacgaccagggatacggcggccgttaccacgatgacagagactggcctccccgccgagggggacgtggtggcagaggaggaagcggatcattcagaggcggacgtggcggtggcgccagtggcggtagaggtcgtagtttaggcccaattgttgaaagagacttagaaaagcaatttgacgctaccaaaagaaattttgaaaacagcattttcgtgagaaacttaaccttcgattgtacccctgaagacctgaaagagttgtttggcacagtgggtgaaatcgtggaggccgatattatcacatcaaagggccatcatcgtggtatgggaactgtagaattcaccaataacgaatctgttcaagacgctatatcaaaattcgatggtgctcttttcatggaccgtaaacttatggtaagacaagacaatcctccacctgaagcttccaaagagttttctaaaaaggctaccagagaggaagtagataacgggttcgaagtgttcatcattaatttaccgtattccataaattggcagtctttgaaggacatgttcaaagaatgtggacgcgttttacgcgccgatgttgaactggattttaacggattttccagagggtttggatccgttatttaccccacaaaggacgagatgatgagagccatcgacacattcaacggcatggaagtggaaggtagagtcttggaagttagagagggacgtttcaacaacagaagaaaggataacgaccgttataaccaagatccgcaagaccctgaagaagatataagagatgctgaaccagatcttgtgcaagatattaccgtgcacgttgatgaaacggcaacaaaatttactgaaggtgtcaacccaggtggagatagaaattgtttcattcattgtagcaatttaccattctcaacagcaagaagcgatttattcgacttattcggacccattggtaaaattaataacgcagaattaaaaccacaagaaaatggccaaccgacaggtgttgctgttgtagagtatgaaaatttagtagacgcagatttttgtattcaaaaattaaataattataattatggtggctgtagtttacaaatctcctacgctaaacgtgattaa

SEQ ID NO: 288 - DNA, 888 bp, Saccharomyces pastorianus
atggacggctattgggatgttgtggtgtcgtccttgcaagacatatacaatgccaacgaggtcatttccttcgatgacgatttgcaggcgaaaaaagtgagcttcatcaatctgtcagaagatcagctgcaattgcatctaaccacattccaggagcacatggaaaacatcaacagggcgcatcgtattctcgaaaacgtgcgctccaatctgtccttgatgctggacgagccgccggaggagaagaatgaggaaaacacagaagaggtagaagatgaagagaaagcggcaacgccctcgccacagggcaagaagacgccaggaaaggcaccaggcaaagcaccaggcaaagcaccagggaaggccccagggaaagcaccagggaaagcaccagggaaggctccgggaaaggctccgggaaaggctccgggaaaggccggcaggtcgtactggaccagcgagtacaacccaagtgctccgattttgttaggctcagaggtggcttacaagcccaggagaggcaatgccgatggcgaatggatccagtgtgaagtgctcaagataatagcagacggaacgaggtttgaagttagagaccctgagccagacgagtcgggcaattcgggcaaggttttcaagtgtaattggaaagagctgttactgattccgccaggcttccctactaaaaactatccgccaggcacgaaagtcttggcaaggtaccctgaaaccacgactttctatcctgcaatcgtcattggaaccaagagagacggcacttgcaggctgcggttcgatggggaggaagaggtagacaaggaaacggaagtaattcgccgtctggtgttgccgtcgccaatggtttcggcaaatccagcaaagaaatag

SEQ ID NO: 289 - DNA, 930 bp, Saccharomyces pastorianus
atgttgagatcgttgttgcaaagtggccaccgcagagtggctgcctcgtcgtgcgccactatggtgcgttgcagttcatcgtcgacctccgcgttggcgtataagcagatgcatagacacgccgcaagacccccattgcccaccttggacaccccttcgtggaacgccaacagtgccgtctcatccatcatctatgagaccccagccccctctcgtcagccaagaaaacagcacgtcttgaactgtttggtgcagaacgagcccggtgtcctgtccaggatctctgggactttggccgccagaggattcaacatcgactcgttggtcgtgtgcaacaccgaggtcaaggacctgagcagaatgaccatcgtcttgcaaggccaagatggtgtcatcgagcaagcacgcagacagatcgaggacctggtccccgtctacgccgtcctcgactacaccaactccgagatcatcaagagggagttggtcatggccagaatctccttgctaggtacagagtactttgaagacctgctgttgcaccaccacacttccaccagctccggtggcgccgacgccaacgagttagttgccgaaatcagagaaaagcaattccaccctgccaacttgcccgccagtgagatcttaaggttgaagcacgagcacttgaacgacgtcaccaatttgaccaacaacttcggtggtcgtgtcgtcgacatcagcgaaaccagctgtatcgtcgagctttccgccaagcccacccgtatttccgccttcttgaagctggttgagccattcggtgttctagagtgtgcaagaagcggtatgatggcactgccaagaactcctttaaagacaagcatcgaggaggccgccgacgaagacgagaagatcaacgaaatcgtcgacatctcccaattgccacctggttaa

SEQ ID NO: 290 - DNA, 771 bp, Saccharomyces pastorianus
atgtttgtaatagactggagcgtgcagctgtgcataggggtactggggcccgtgttccgtgctctcgtgcaattgcctctgtcgattttcatctggaatgggttccagctcgtggcattgcccgtcaatatcccactgaagctgattctgggcacgtcgctgtatcgtcttgttgctcacacgggtgccgtggactactacgtggtcttgacgctgttccagtacctggctgtgctttgcgcattcggtggcattatagggctcatctccggcttcgtgtttggcgtgttccattccatttgcggtgtgcccagtgtgtatgtcagtctcgagtggaagccatggtttgcaccggtacacaggttctttgagcgtgtctccactaccattatcaacatcatgcaaggccaaaccaccgctccgatacccatgtctatgcccatgcgcatgtcaagccttggtaagaagcaccccaacgagagggaagaggaagaaatcgatgatgcgactataacacacgaaaacaatggctacatgactccctgtcagacccccactaatgaaaaatttcagcattataataatgattcattcaatacgaccactacagacgatgaacccactgatatctgggatagatccgatacttaccaaaactcgtttgccaccaacgagaccctaatgtctctttccaatagagccaaccttcgaagaaatgtgagtgatgccgacatcgttaatatcaaggctttaagaagaaattcaagatga

SEQ ID NO: 291 - DNA, 1566 bp, Saccharomyces pastorianus
atgacgactcgttcgctccaacttactcgtcctcattatagattattatcctcacctttccgcaaaagctccatcatacaaaggcaaatgtctgcttcaagcccttctccagccaatagctatttgaacatgattactaagtctctacaacataatctacagacatggttccatttcgaaccaaacgaaatcgacatcattgaatcaccctcacatttttacgaccttctaaaatcaaaaatttcaagctcacaaaagaggatctttattgcgtccctttacttagggaaaagtgaaactgaactaattgactgtatatctcaagcattgtccaaaaatcccgatttgaaagtttcctttttgttggatggccttcgaggaaccagggagttgccttccacctgttctgccactttgctatcatctctagcagccaaatatgggtctgaaagagtagattgtcgattatacaagactcctgcttaccacggttggaaaaaaatcgtagtccctaaaaggtttaacgaaggattaggcctgcagcatatgaagatttatgggtttgataatgagataatcctctcaggcgctaacctttccaacgattattttactaacagacaagatagatattatctctttaaatctgcgaatttcgccaattattatttcaaactacaccaacttatcagttctttcagttaccagattgtaaaaccaaaagttgctggcaatgttaacatcatttggcctgactcgaaccccaccattgaaccgatgaaaaataaaagaaagtttttgagggaagcttctcaattacttgagaatttcttacagatttctaaacacaatcaaccgatttctccaccgggccaattttccactatagtctacccaatttctcagttcactccacttttccctaaatataatgacaaatcaaccgaaaaatcaacgatattgtcgttgctatcgaatataaaaaacacctctatttcttggacattcaccgcaggatacttcaatattctcccagaaattaaagctaatctactagccacaccggttactgaagcaaatgtgataacggcatcgccctttgccaacggattttaccaatcgaagggtgtctcatcaaatttacctggtgcctacttatacttatccaaaaaatttctacaagatgtctctagatacaataaagatcaagctattacattacgggaatggcaaaggggtgtagtcaataaacctaacggatggtcatatcacgcaaaaggtatctggatctcgtctcgtgacaacaacgatagcgatagttggaaacccttcataaccgtaataggatcttcaaactacacaagaagagcctactcgttagatttggaatcaaatgctctcattattacaaaagatgaagaattaagaaataaaatgaaaggcgaattaaatgatttactacaatacacgaaacctgtaactttagaagattttaagtcagatccagaaaggcatgttggaactggtgttaaaatagctacttctgtgttgggcaaaaaactctaa

SEQ ID NO: 292 - DNA, 567 bp, Saccharomyces pastorianus
atggattacgacagccctgacccaatgaacggtgcttcaagcaacgccctaattgctaagatgaactcagctaaactactatatcaacactatttggataaagtcactcctcacgccaaacagagatgggctgtattaggtggtctactatgtttatttatggtgcgtattacaatggctgaaggttggtatgtgatttgttatggtttgggtttatttttattgaatcaatttttagcctttttgacaccaaaattcgatatgtccttgcagcaagatgaagaaaacaatgaattagaggctggtgaaaaatcagaggaattccgtccatttatcagaagactacctgaattcaagttctggtacaacagcattagagccaccgtcatttccttagtattatcactattctcgatcttcgatattcccgtattttggccaattctactaatgtacttcgtgctgttattctttttaaccatgagaagacaaattcaacacatgatgaaatacagatacattcctctggatattggtaagaagaagtactcacatccttctaactga

SEQ ID NO: 293 - DNA, 969 bp, Saccharomyces pastorianus
atggatactttgagctcagtacagcctgcttcctatgttggttttgataccatcactaatcagatcgaacatcgtctgttgaagaaaggtttccaattcaatataatggtggttggacaatccggtttaggtaaaagtactttgatcaatacgttatttgcttcacatttgattgattccgccactggtgttgatatctccgctctacctgtctcaaagaccactgaaatgaaaatttccactcatactcttgtagaggatcgtgttcatttaaacattaacgttatagatacgcctggatttggtgactttattgacaactctaaagcttgggaacctattgtgaagtacatcaaagaacaacattctcagtatttacgtaaagaattaacagcccaacgtgagagatttatcgttgatacacgagtccatgctattctttattttttacaacctaacggaaaggaattaagtcgccttgatgtcgaagctttgaaaagactgacagaaatagcaaatgttatacctgttattggtaaatcagatacattaactttagatgaaagggcagagtttagagaactcattcaaaatgagtttgagaaatataattttagaatttatccttatgattcagaggaacttactgacgaagaattggaactaaacagaagtgtcagatctataatcccatttgctgttgttggttctgaaaacgaaattgaaataaatggtgaaacttttagaggaagaaaaacccgttggagtgcaattaatgtcgaagacatcaatcaatgtgattttgtgtatttgagagagttcttgatccgtactcatctacaagatttgattgaaacaacttcttacatacattatgaagggttcagggcaagacaattaattgctttgaaagaaaacgccaatagccgttcctcagcccacatgtccagtaacgccgttcaacgttaa

SEQ ID NO: 294 - DNA, 552 bp, Saccharomyces pastorianus
atgagcacattgatatttggtaaacacttggcgctttacaaaattgtacctgccaacgtaatcggatggttaacgcctttggggaaccctccacttctggctcctagccaaaaaccactaggatctattcatgaatggttgagaaaaaagctactaggagatggtaaaggtgctgaggacaaggatttcttctccaataatggtatattgttggcagttcctaagaaaaaagtatcgcaccaaaagaaaagacaaaagctttatggcccaggtaagaagcaattgaagatgattcatcacctaaacaagtgtccatcgtgtggccattataagagagccaatactctgtgcatgtactgtgtagggcagatacgtcatatatggaaaacacacactgctaaggaagaaataaaaccaagacaagaggaggacctttcagaattagatcaaagggtcttataccctggtaaaaaggaaaccaaatatgccaaggatttgaaagataaggataaatacctggaacgccgtgttcgaacgttaaagaaggaatag

SEQ ID NO: 295 - DNA, 744 bp, Saccharomyces pastorianus
atggttaagattgcaattatcacttactctacctatggacacatagacgttttggcgcaagccgttaagaagggtgttgaagcagctggtggtaaagcagatatatacagggtcgaagaaactttgcctgatgaagtcctgactcaaatgaacgcacctgaaaagcctgatgacattcctgtggctactgaagagacattgatcgagtacgatgccttcttgttcggtgttccaactagatttggtaatttgcctgctcaatggtctgccttttgggataaaaccggcgggttatgggctaagggctctttgagcggtaaagcagccggtgttttcgtcagtacttccacttacggtggtggccaagaaagtaccgttaaagcctgtttgtcatatctagctcatcacggtattatctttttaccattaggctacaagaactccttcgccgaattggcaagtatagaagaagttcatggtggctctccatggggtgctggtactttggctggtcctgatggttcaagaactgcttctccattggaattgagaattgctgaaattcaaggtaagacattctatgaaactacaaggaaacttttccctgtaaaggaggccaagccatctactgaaaagaaggcaactgcctctgacgctgctaaaagacaaaccaaacctgctgctgctgcaactgcagaaaagaaggaagataaagggttgttgtcttgctgcactattatgtaa

SEQ ID NO: 296 - DNA, 1383 bp, Saccharomyces pastorianus
atgacagttccttatttaaattcaggcagaaatgttgcatcttacttacaaacacaatcacatcaagaaaagactttgaaggagagattcagtgaaatctacccctctcatgctcaagacgtaaaacagttcgtcaaggagcacgggaaaacaaaaattagtgatgttctactagagcaagtatacggtggtatgagaggtgttccaggaagcgtatgggaaggttcagaattggatgcagaagaaggtattcgtttcagaggccgtacgattgctgacattcaaaaggaattaccaaaggcaaggggaagctcacaacctctaccagaggctttattttggttattattgaccggtgaagttcctactcaagcgcaagtggaaaatttatccgctgacctaatgtctagatcagaattgcctcatcatgtcgtacagcttttagataatttaccaaaggacttgcatccaatggctcaattatcgatagcagtgaccgccttggaaagtgaatccaaatttgccaaggcttatgctcaaggtatctccaagcaagactattggagttacacttttgaagattcattagatttgttgggtaaactaccagttattgctgctaaaatttatcgtaacgtgtttaaagacggcaagataggcgaagtggacccaaacgctgattatggtaagaacttagtcaacctgatcggctcaaaagatgaagattttgtggatttaatgagattgtatttgaccattcactcagatcatgaaggtggtaacgtatctgcccatacatctcacctagtgggatctgcattgtcctctccttatttgtcccttgcatcgggtttaaatgggttggctggtccattacacggacgtgctaaccaagaagtcctagaatggttatttgcactcaaagaagaagtcaatgatgactactctaaagaaactattgaaaaatatttatgggacaccctgaattcaggtagagtcattcctggttacggccatgccgtgctaaggaaaacagaccctcgttacatggctcaacgtgaatttgctttggaccatttcccagattacgagctatttaagttggtctcatcgatatttgaagtagcaccagccgtgttaaccgaacacggtaagactaagaacccatggccaaacgtggatgcccattcaggtgtcctgttacaatattacggcttaaaggaatcgtcattctataccgttttatttggggtttcaagagcgtttggtattctagctcaattgattaccgacagagctataggtgcttcaattgaaagacctaaatcatactctactgaaaaatacaaagaattagtcaagaacgttgaaagtaaactataa

SEQ ID NO: 297 - DNA, 1845 bp, Saccharomyces pastorianus
atgactgatatgaatgatagtagttttgctattcctcagcaaactccaaggaaacatgtactatcttctaaggttatgcaactttttagaagtggctcgaagtcatccaggcaagtaaagccctcatcgaacactcagccgccctctaatgtaaacacaaatgtttcatcggcgtctaaatcagccaagtttggtttacataccccaacttctgctaccactagagtagccaatgctgctgctaacgttactaacgctgctgctgtgagtaaatctggaatgtatatgcccgagtgttaccaatccacatcaccatcccactccagttcgtctgcatcgttgaataatcaaatcgatatcaatacctctaaatcctcatctgccacctctttaacgtcatcagtatcagccttgtctttatcacccgcatcagccataaatactagctccaagagcttgagccccaaattttcccaccatagtaataacgctgttaatacgcctgcacctacgccaactgcttcaagtattaatagtaacgttaataaaataaccaataccagtggacctttctgtggtagatttctcgtgcataaagatggtactcacgaacactatttgaaaaatgccaaaagacaagaaaagctatccacgatgatcaaaaatatggttggtgcgagcaaactacgtggcgaagcaaaatctgccgttcctgatataataaaggacccaagtacttctgtaaacactaccaagaatccacctacattatttgcaggttttatgaaacaggtcgtagatatggatgatgaatacccagaaggcgcacccataagtggcgccttcaatggttctgaaaagaacttatacaagtcaggtttaaacgaatcaagcgggaaagtggcggccctttcatccaataatgtacccgctaccacgccaattaaaaaggatacacaatgttttgctgaaaaatatggtcgttgccaagaagtccttggtaaaggtgcgtttggtgtagtgagaatctgtcaaaagaaaaacgtttcgtcacaagatggtaataaaggtgaaaagctttatgctgtaaaagaatttaaacgtaaggcgtccgaatctgtggaaaaatactctaagagattaacctctgagttttgtatctcctcgtcattacatcacacaaatatcgtcaccacattagatcttttccaggatgctaagggggagtattgtgaagtaatggaatactgtgcgggcggcgatttatttactttggtcattgccgcaggaaagttggaatacatggaagctgattgttttttcaagcaactgataagaggtgttgtctatatgcacgaaatgggtgtttgccacagggatttgaaacctgaaaatttattattaacccatgatggtatgttgaaaataaccgattttggtaacagtgaatgtttcaagatggcatgggaaaaaaacatccatttaagtggaggtgtttgtggttcgtctccatacattgccccggaagaatatatcaaagaggaattcgatccaagacccgtggatatatgggcatgtggtgttatctatatggcaatgagaaccggcagacagctatggagctctgctgaaaaggatgacccattttatctgaattacctaaaggggcgtaaggaaaagggtggttatgaaccaattgaaagtttgaaaagagccagatgtaggaatgtgatatattcgatgttagatcctgttccgtatagaaggatcaacgggaaacaaattctaaacagtgaatggggtagagaaataaaaagctgtcacaatggacacgcgttgaaataa

SEQ ID NO: 298 - DNA, 798 bp, Saccharomyces pastorianus
atgagttgggaaggtttcaaaaaggccattaacagggctggccacagtgtgatcattaagaacgttgataagaccattgataaagagtatgatatggaagaacgtcgttataaggtgcttcaaagggccggcgaatcgttacaaaaggaagcaaagggcttcttggactctttaagagctgtgacagcatcacagactactatcgctgaagtcatctctaacctttacgatgattcaaagtatgttgctggtggtggatataacgttggtaactactatttgcaatgtgttcaagactttgacagtgaaacggtgaagcagctagacggacccttaagagagactgtgctggacccaataacaaagttctcaacatacttcaaagaaattgaggaggctataaaaaagagagatcataagaagcaagattttgatgctgcgaaggcaaaggttcgtagattagtagacaagcctgctaaagatgcttccaagttaccaagagctgagaaggaattgagtttagccaaagacatttatgaaaatctaaataatcaattgaagaccgaactaccacaattagtttcattgagggtaccttatttcgacccaagttttgaagctttaattaagattcaattaaggttttgcaccgacggttacactcgtttggcacaaattcaacaatatctagatcaacagtcaagagacgattatgctaatgggttattagacactaagattgagcaactattggggcaaatgacaagcttagacatttgtgctcttggaataaaatga

SEQ ID NO: 299 - DNA, 852 bp, Saccharomyces pastorianus
atgtcagacaaggaacaaatgagcggaaacaccgatttggaaaatgctccaaccgggttctacagctctcacgaagaaggtgctcctggcggcgtggaggatgaacgtccatctcacgattcattgggcaagatttacacagggggcgacgacaacgaatatatctatattgggcgccaaaagtttttgaagactgacctgtatgaagcctttggtggtactttgaaccctggtttggctcctccttcagttcataaatttgccaatcctgctcccttgggtctttctgcgttcgctttgactacttttgtgctatcaatgttcaacgcgagagctcaaggcatcactgtccccaacgttgtcgttggtcttgccatgttttacggtggtctagtgcaacttattgctggtatttgggaaatcgccttggagaacacttttggtggtaccgcgctatgttcctttggcgggttctggttaagttttgctgctatttacatcccttggttcggtatcctggacgcttataaagatagtgctgatgacttgaataatgcattaggattttatttactgggatggtgtattttcactttcggtttggctgtctgtactatgaaatccactatcatgttctttgcgttgttcttcttattggcggttacctttttgttgctgtctattggtcactttgtcggtaaagtcggtgtaacaagggccggtggtgtacttggagttatcgtcgccttcatcgcttggtataatgcatatgcaggtgtggctacaaagcagaactcatatgtactagctcgcccaattccattgccatccactgaaagagtgatattctaa

SEQ ID NO: 300 - DNA, 3162 bp, Saccharomyces pastorianus
atgaaaagttatcgacattatatctattatactgtgatatcgcttctgttattgtgcagctccgtttcattcgcaaaacagggagagactccgttcttcaaagacgctataccagaaagatcgcgcccctctgcaccagataagggcaatgatacgtgcccgccatgtttcaattgtatgttgccaattttccagtgtaaacaattttctgaatgtgattcatacaccggcagatgtgaatgtatagaagggtttgcaggtgatgactgttctctgcctctgtgtggtggtctctcaccggatgagagcggtaataaggatcgtcctgtaagagcgcagaatgatacctgtcattgtaacgatggatggggtggaatcaattgtgacgtttgccaagacgattttgtttgtgatgcattcatgcccgattccagtatcaaggggacttgttataagaacggtatgatcataaacaaagtcttttcaggatgtgatgtgactaatgagaaaattctacaaattttaaacggcaaaattccacaaattacatttgcttgtgataaacccaatcaggagtgtaatttccagttttggatagaccaattagaaagtttttactgtggattgaacgattgtgcttttgagtacgacttagaccataatacctctcattataaatgtagcgaggttcaatgtaaatgtgttcccgatacaatgttgtgtggtgctaaggggtctattgatatctcagagtttctaacggagactataagaggccctggggatttcagctgtgatttagaaacaaggcagtgtaaattcagcgagccttccatgaatgatttgatcttaactatttttggtgacccttacatcactctgaaatgtgagtctggtgaatgtgttcattacagtgaaattccaggttataagtctccttcgaaggacccagcagtgtcatggcagggaagattggtactggctttgactgctgtgatggttttggcactctttacgtttgccactttttacatctccaaatcgccattatttagaaatggagcgggatcatcaaaatcccctattcgtttgccagacgaggatgcaatgaataattttttgcaaaatgaagatgatacattggcaacattaagttttgaaaacatcacatacagtgtaccctcgataaattccaatggctttgaaaaaacagtactgaatgaaatcagtggtatcgttaaaccgggccaaattttggctattatgggtggttccggtgcaggtaagacaactttgttagatattctagcaatgaaaaggaagacgggccatgtctccggtagcattaaagttaacggtactagtatggaccgtaaagccttctctaagataaccggattcgtggaccaagacaacttcttattacctacactaactgtctatgaaactgtcctgaatagtgcattactgagattgcccaaagtgttatcctttgaagccaagaaggcgcgcgtttataaagtgttggaagagctcagaatcattgatatcaaagaccgtattatcgggaacgaatttgatcgtggtatcagtggaggtgagaaacgtcgtgtttccattgcatgtgaactggtgacgtctccattggtattatttttggatgaacccacgtctgggttagatgcgagtaacgctaataatgttattgaatgcctagtgagactatccagcgactataacagaactttggtattatccattcatcagccaagatcaaacatattttatttatttgacaaattggttttattaagtaaaggtgaaatggtatactcaggaaactctaagaaagtctcggaatttttgagaaatgaaggatacgcttgtcctgataattacaacatcgcagattatttgatcgatattacttttgaaaccactccccaggggaagagaagaagaatacgaaatatctcggatttagaagccggcgccaatgttaacgataatgttaacgataatgataacatcattcatcaagcaacgttcactaacagcgacggtaccacacagagagaatgggctcatctcgcagcccatagagacgaaatcagaacattgctgagagaggatgaggatgaagaaggagccgacggaacacgaggcaccaccgagatcgatttgaataccaagatattacacgataaatatagagatagcgtttatttcgccgagctttcacaagagattgaagatgtcatgagtgaagcggacgaaaacagcaacgttttgaacggagatttgcccacgggtcaagaatctgctagtttcttacaacagttatcgatattaaattcaaggagtttcaaaaatatgtataggaaccctaagcttttattggggaactacgtcttaacgattctactaagtttgttcttaggaacgttatactacaacgtctctaacgatatcagtggtttccagaatagaatggggttattcttcttcatattgacctactttggcttcgttacattcacgggcctgagctcatttgctctggagagaattattttcatcaaggaaagatctaataattactattcgccatttgcatactacatgagcaagataatgagtgaagtggtgcccttacgagtggtgcctcccatactgttatcgttaattgtgtatccgatgacaggtctcaacatgaaagacaatgcctttttcaagtgtatcgggatacttatattgttcaacttgggcatatcactggagatcttgaccatcggaataatattcgaagacttgaataattccatcatactaagtgtactggtgctcttgggctcactactatttagcggattatttatcaacaccagtaacattaccaatgtagcgttcaagtacctgaaaaacttctccgtgttttactacgcctacgaatccctattgatcaacgaagtcaagacattaatgttaaaggagaggaagtacggcttgaacatcgaggttcccggcgccactatcctgaccacgttcggatttgtcgtccaaaacctggtctttgacatcaagatcctggctttgttcaatgtcgtgtttctaataacggggtatttagcccttaaatggatagtcgtggaacagaaatag

SEQ ID NO: 301 - DNA, 648 bp, Saccharomyces pastorianus
atgagcagcaccaccgataaactactccaaaaacacgattctcttttaaaaagaactacagaacataagttcaccaaggaactgtgttcaggtactttaaatgatcgtagtttgtacatctatttaacacaagatctcctgtttttcgagaccggtttaagattgatatgtaagacgacttctttagcgccaactaccaatgcattgattaccttagccaaaaaaattggtttttttgctaacgatgaaaattcatacttccatgattgtttggaattattagcaccatccctgagtaaggaagaaagagctaactttgacaacaagattattcctggtatcgatacttatattaagtttttagaagatttcacaaaggacagctcagttacatgggcatccttaataacctacttatggatttgtgaagagagttattggatatgggctcgtgacactccaagagctccaggcttgcactggaaacatcaaaaatggatcgatttacatgatggtgagcactttcaagtctggtgcgaatttttaaaagctgaggtcgataagttttccgttgaagaagttgaaagcgtgtttacaagggtcttacaattagagtttcagttttttgaaacttgttacaacgcttag

SEQ ID NO: 302 - DNA, 267 bp, Saccharomyces pastorianus
atggacgcactaaagctgtcggattttattggaagcaccttaatagtctctcttgcggaagaccgtattttaattggaagcttagttgctgtagacgcccaaatgaatttgctactggatcatgttgaggagcgtattggctccggaagccgtatgatgggcttggtcagcgttcctaggcgttcagtacaatctataaaaatcaccaaacctatgttgcgtgacctcgccgcgaacaaatttgaattgatgggtaatattgtttag

SEQ ID NO: 303 - DNA, 990 bp, Saccharomyces pastorianus
atgaacaatacgctttcaagccttttaaatcgtaacgaggcattgggacttaaccctccccatgggctagacatgcatattaccaaaagaggctcagactggttatgggccgtgtttgccttattcgcccttattttgctatgttacattgtaatgttcttcattgcagaggccaagggttctagattgaccagatatgctttagctcctgcgtttttgattgcattttttgaattttttgcttatttcacgtatgcctccgatttaggttggaccggtgttcaagcggaattcaaccatgtcaaggttgacaaatctattactggtgaagttcccggcgttagacaaatcttctactcaaagtacatcgcatggtttttgtcatggccatgccttttgtttttaactgaattaactgctggcaccactggtgagactgaaaatatctcggctttggatgtggttcattcgttattgattcaaatcgtgggtaccctattctggatcatttcattattggtcggttcgttaatcaagtccacctataaatggggttactatactatcggtgccctagctatgctagttacacaaggtgtactgtgccaacgtcaattcttcaatttaaagactagagggttcaacgcggttatgttgtgtaccagtgttgtaatcgtgtggttgtactttatatgctggggtctaagtgagggtggtaaccgtattcaaccagatggtgaagctgttttttacggtgtcttagatctatgtctatttgcaatttatccatgttacttagtaatcatgatctgccgtactggcaggttccccaaaatctctttgtccggcggattcccccatcatcatcatgctgccgacgatgtggaagatgaggttcctgaagcaaaagatgcctccccagaaagcccaagagcatctggagagactgctatccatgagccagaacaaatcgtcgacgatgctgcttag

SEQ ID NO: 304 - DNA, 1476 bp, Saccharomyces pastorianus
atgtttcgtgctcgatacccgtttaagagcattagatcttactcttctctgacggttaagtcgttatatgagcaactacatcaacctcgtcatgactccatttcagttgatggatggatcaagtctataagattattaaaacgtatagcgtttttagacttacaagatggtacctccgttaacccattgagaatagtggttccgttagcaaacgctgattatgtacactttttgaaaaatctgaaaactggccaaacattgtctatttccaacgctatctggcaggatacgcccagcagagaacagccttttgagctgcaaataaaagaccccatagaatcgatcaaaatcataggtcctgtctcagaaaactatcccttgcagaaaaaattccagactttaccatttctaaggtctttacccacactaaaatacaaaacctcttatttgagcgcaattttgaggttgagatcatttgtagaattgcagttcatgcatttttttcaggaaatccatttcactaaagtttccccaccaatactaacttcaaacgactgtgaaggtgctggggagttgttccaagtttccaccaatcaattgtcgtctccatcttcgtattttggtaaaccaacttatttgactgtgtctacacaattgcacttagaaatcttggccttatcgctatcaagatgttggacgttatctccttgcttcagagctgaaagaagtgatactccgagacatctctccgaattttggatgcttgaagtggaaatgtgttttattgatagtattaacgaactaacatcgtttgtagagactacaatgaagacagtaatccagtcttgtttggataaccagaaggagcttttgccaaagcagtttatctctttgaaagaagatgatgcactatctacatcactagaccaagaaaggcaagatatcataacacgttggcaaactttggccagtgaaaaatggcaaactataacgtatacgcaggctatcgaaatcctcaaaaaaaactacaacgaggttccgctttttaaatacgagccaatctggggacagcctttgcaaactgaacacgagaaatggttagccggcgaatacttcaaatcacctgttttcgttactgactacccacgtgtttgcaaagccttttacatgaaacaaaactctactcccgacaatactgtggcatgtttcgatttactggttccgggaatgggtgaaatcatcggcggaagtctaagagaagatgattatgacaagctatgtaaagaaatgaaggaacgcggtatgaataaatctggtgaattggattggtacgtttccctgagaaaagaaggtagcgcaccacatggtggatttggactgggatttgagagatttatctcatatttgtatggaaaccacaacataagggatgctatacctttccatagaacagccgcgggctccataaacttctga

SEQ ID NO: 305 - DNA, 123 bp, Saccharomyces pastorianus
atgactttaccaggtggtgttattttagttttcattctggtcggtttggcttgtatcattattatctctaccattatctacaataaatggaaagctagacaacaaggtttgcaaagattttaa

SEQ ID NO: 306 - DNA, 2262 bp, Saccharomyces pastorianus
atggtacttgaaaacgatttagaatcgctggataatgggttggaagacattaatgaagatctatttcgtgacgattatttattggatgaagatgcttcaggatcgggattacaatccgcatggactagaatgaagtactggttttatagaaataaattgaagtggacgaacaatggcatagtgattaacgaggggaaagataataggagtaatgccaacctaagaagaggtataccattgtacgaattggatgcaaatggccaacctattgatacaggttttgaggatgagtttgcactcggaacaggatccttttccaaagtaccatggaaattaatacttcgtgtgttgtttggcttactggtatttacagtctttcttatccttgtgatcaatatcacaaagtccaatcgtaccataaaggttttatcacactttggcaaccctgatttcgatccttacgtaaaatattttaacggtacccacgaatttttccccttgaccatagtgatttcgttagatggtttccacccatcactgatatccaaaaggaatacgccgtttttgcatagtttatatacactggattatgacaccggtatgaatatcacatccacaccattcatgattccaagtttccccacggaaaccttccccaatcattggacactggttactggacaatacccgatacatcatggaatagtatccaacgtattctgggattcagatcttagcgaagagtttcacccaggcgtattggatcctcggatatggaatagcaatgttagcgaaccaatttggcaaactgtccaaactgcatttgacagcgatatgtcattcaaagcagctacacatatgtggcctggtagtgacgtgaattatactaaatacaacgaaaagaagttgctacccgaacataagaagcccattgcaatagagagaacgccttattatttcgatgagttcaatgccaaggaatcattaccaaagaagctatccaatatcatgaaatacgtggatatggacgcgttggacgaaagacctcaactaattctcggatatgtaccgaatgtagatgcttttggacataaacacggattccctgcagaatctgattattactacgaagaattcacgaagacattaagcgaagtggatacgtttctacaggggttagttgagtctttacgagaacggaatataacagacttcactaatttagtcattgtaagcgaccacggtatgagcaatattatggttccctcaaatgtagttgtctgggaagatatactgaacgagaaattaaggaaggattacgtatcgcatgcatatttggagggcccaatgatggccatatcattgaaggattccaccgaaattaacgaagtttaccatgaattaaagtcatcgatagatgaagaaaagtacaaagtatatgtgaacgggaactttccggaagagtggaatttcaatgatagaagaaaccatcacatggcctcgatctggatcgtgcccgaacccggatatgcagtgatgaagaaagcacagctgaagaaagcgggaaaagatgaccataaagataaaaacgaagaacaagtgtttacgatcggatcgcacggctacaataatagtgccgtcgatatgaggtcgatatttattggcatggggccgtatttcccgcagggttacatcgaaccattccaaaatacagagatatacgatttattatgtgacatctgtggtgtggcagaaaaggatagaaactccaacgacggctccggggtggtcatgcagcaactccgcgagcctgagaacagcgacgaagtggagattactgacgatttcgagtatttgagtagcgtgtttggtaaagccagtacatacaacataatctggggcgggtaccctgacgaggaagaatatgaagcacaggaagatgatgaagacaatggagacgccgaagacaatgccaatgacaatgacaatgacaatgatgacgacaatgataacgacgccaaagaaatagccgccgtgtccacttcgtcattaacgactacactaccgatgacgacttccacgccatcgacgactagcaccctactgagcggcacactaccgtcatcgagaggcagcagtatacgagctagcgctaccaccagtgcagcagggaatttgttccaagagattatcagcgatgcaaaggaactcatcgatgatataatcgaaggtatcgatgacttaatcgattccaatacgtaa

SEQ ID NO: 307 - DNA, 630 bp, Saccharomyces pastorianus
atggaatattcttccatcacctcttcaaaccccaaacatgattttcaaagaaagatcgctcttttaggtgctagaaatgttggtaaaacaactttaaccgttcgcttcgttgaatcgcggtttgttgagtcctattatcctactattgaaaatgaattcactaaaatcatttcttataagaatcatgactgcactttagagattcttgacactgcaggccaagatgaaggctctctgttaagtatgaaatccttgacaggtgtacgaggcatattattatgctacagtatagttaatcgtgctagctttgatcttattcccgttctgtgggacaagatagtggatcatatgggtagggacgatctgccggtaatacttgtgggcaccaagagtgatttggaaagagatgcaaaagatgaaagtaggtgcgtgacaaaagctgagggtgagaaattggcctcaacgataggcagtaaagataagaagaatcaggcaatgttcatagaatgtagtgccgaacaagattataatgttgaagaagcttttactcttgttctaaagcaaatggaacgtgtagaaggaactttaggttttgacggtgaaaataataataagtgcaatattatgtga

SEQ ID NO: 308 - DNA, 2616 bp, Saccharomyces pastorianus
atgtcggaacaaagaaccagatatgcagatagcatattgaccacgaaaaatccttatgaagccactgaaactatcaggatcagactgtcgcaggtcaaattgctaaataaagacttctatctattatttaaggatttatccaacttgaagagaagttatgctcagcaattgagaaaaatagtagcagaaaacgaagatcttactaagatcttaaatgctcagatgcttgaaaacaatgtcttgactccacaggaaatgagtgaattcagatttgagtcattgggagaactgagaaatttgtgggatacagtcattgaagagttgaaaacggacttgaaatcaagtactgaatactatgacactttggataaccaagtcgttcatgaattgaaggagtctgtggagaacaatactagttggagggaaagtaaggacttgcactcgaagctgagcaaaaacgctgcttcaattgaacactatagcaagcatgaaggcaactccagccaattggaagaagcaagaagacaatgggatttacaaagcccatacctgttcgaattgttcgaaactattgattataaccgcttagatactttgaaaaactgtatgttgagattccaaaccggtttcagcgattatttattgaacactaccaatgaatgtgaaactgtgatgacaaaatttttggcatttgaacctcaaagtgaaattgaccgttttgccagagatgcaagccaatataacttcaagccgtcctccacttctaaatcagcgattatgaataacgccccacctgcctctgccgccactgctactcgttcaacttcaggctcagacggtacacccaccttaggcactgaaagggataaaaaatccccacaaaaggagaagcgcaagagtacatttggaaacatcggccatcgccttgcttctgcgtcttcgactcttacccataatgatctcatgaataatgaattttcagactctacaaataataattctttgaaatcgaagaaatcatctcatattttaagatctaaagtgggttcaatttttggtagaaacaaaactaaaaataagagacaacagcaatcttcatcaaactcttacatccaagagaccatcacagaatctccaaataattcttcgactagggtctcttctactgccacttcttctatttatcagaaacaacgtcaacccacatattcatcttcaaaatcaaacaatagaactccagccggcagtactgacactccaccgcttcctccccctgctactcctaataacgtggagctacctgcgtccaccgatccagctcctatttttacaccaacttcagtgccaattacgatgatgcaacagagttcctcacctgccgcacaagaaagtctcccagacgattcttccaaatcggtgctgatatcaatatctcaacctccactacaaccacagtcaaaatctaagcctttaccagttgaacctgcatcccctggtgtttcgattcctgccactactactgatagcctgtcttcggtacaaatggattcgaggcctttgcatattcgtgctcctgctttgccaccttcaaggaagcaaaatgcaattcagaatagagactcgcaactctatgaaacattgcctacgcatggtccaggatctattcctacttcttcttcattatcctccgtacctcaagagcgcccagcttccgtacttgcctaccaaattactggtgacttgaaagaattgaaccctcaagccacaggctcgtcaacctccttagtggggcaatcattgtttcagcactcttctctggaaacatcccacctcggtttgaacgctagtatcgcagaagtgctcaacgcttccttcaaagacggcatgttgcaaagctctcaacttatcggtgaaattgctctgaattacgtgcccaattccgtcatgaatacaccaatacctattggcattaatttaaagattgataatggcgctaattttgagaaagtaatcttaaatcaagcctttatcgagcgtgtggcccctgaagaatttaaagtaaatccatcattcattgattctagaactttaggcgctatcaaatactctataaaggcgccagtcgcccctattgtcatccacccggtttggagatttgagcctcaccaggctagtgttgtactgaccgttaagatgtcgacgagcttacctgaggagatatcgcaaatcacaatagaagatttggttgtttttgtgaacattgacggtgctaacgcaacaagtgctctatcgaaacctcagggttcgttcagtaaagaaaagaagagaataacgtggagattcaaagaaccacttgtcttgcaaagaaatggcgaaggccagagattgatcgcgagatttattacagacaccttagcacatgaatcttccaagggcgtgatcaccaaattcagcattagtgaaacagataacacaatggtgcctcacagtggtgctggtagtggtatttctttgacttgccaggaattggatgaaaacaacccatttgggggtgactggttggatgtaaacacaaagagaactttgaccaccggtaactaccatggtctggcctga

SEQ ID NO: 309 - DNA, 3678 bp, Saccharomyces pastorianus
atgggatatccaccgcctacgcgaaggcttagtgataagaaaagataccattactctaacaatcctaatcgaaggcatctttccggtgtttatccaaaaaacggcttcccaaaaccaattattaatggatttacatcttcccctacagcagaaacttctgcaaacacctccgttagtcctgccactgtaccaccaccaccaccacctccttcaatacctagcacatttggcatcgaagcgcccaggccatcccggtatgatcccggctcagttaataggccttcatcgtcatcttatttgtcaacgaggaagaccggaagtcggtacaatccagaggttgaaaggccctcttcagccggtagttcaacgccggaaaataccaacgcaaataccaccccaaataccaatattgacaccggaaaatcacgctattctcgaaaaaccatgagcagatataaccctcaatcgaacagctcttcaaacatcatgcatttttccccaccaacttcaaacacatcaccattttacgtccccaatggtaattcccggggcagacctagatcgatggatgatcatagtcctgatatagcaaacaaccctgaactgggtagcgtttcattggttaatagcaacagcgctcattcctattactccaggagcaacaaatggagatctgttggaacaccttccagggcgccttttgataaccacgttagtaatacagcaaccaccaacggaactcatcaaagagagcccttttggaaagctaataataatgtactttcaaaatctactcactcacagtcgtcgccttccctttatgatactaaatttcacgagataaataaaatggacaaacccgactctccagttaagattggaggattaaataaagatgaagcaaaagatcttccacatgacgataataaattccaatctgaagaatcagatatcatacgccatgtgtctacaaagcttgatagtttcaaggcacatgaaaacggaagtttagaagaagaaagttcacataaaagagaacctgagataacgaaaacccgccatgagccagaaaaaagaaaagaacacggtagactcgaagacgactttagaaaaccaaaagcaactagtgtggatgtaaaacaagatggattatggacaacgactacaagagctgtcaatacaataggaaaggttaaagaacagaaaaaagaacaaataaacttcatcaagaaagaagaaagctcagaaattagaaactacgaatggatatacgaccctgaagctttgaaaactgatttaacagaactgacacttgagaatgaaaacaagtgttacgaagagccgcttgaaaaagtagaagcatgcatttttccattatcaaagacagaaacaaggttatgggaattaaaaaaccagaggagagacaaaatcatcagtaaacagaagtacttactgaaaaagacggtgaagtctttcacagagtatccattttatgcccaaaacaagcttattcaccggcaagccacaggactcatcttaaccaaaatcatttcaaagatcaaaaagcaggaatatcgaaaaataataagcctaaagcatagctattttggcttacagaagaaatacgaaaaagaatgtgaaattttggccaaattaagtgaaaatttaagaaaggaagagattgaaaataagcgcatagaacatgaattaatggagcagaagagacgtgagggcggtgttgaaattgaaaaagacaaggatttacgcaaaccttcctcgtcctcgtcatctcgtcgcagaaatagagctgatttcgttgacgatgcagaaatggaaaacgtgttacttcagattgacccaaactataagcattatcaggctgctgcaaaaatcccgccactgatattaaatccagttgaaaaatattcttataagttccgtgatgtaaataacttggtaacagacaaaaatcactgggcctctagaatattaaaagacggtgttgatacattttctgaccatgagcattctttatttttggaaggttatttgattcatcccaaaaaatttggtaagatttcacactacatgggtggtctgagaactcctgaggaatgtgttttgcattattatagaaccaaaaaaaccatcaattataagcaactcctcatggataaaaacaaaaaaagaaaaatgtcagcagctgctaagcgccgtaagagaaaagaaagaagcaatgacgaagagcttgaaaatgaccaaggtaaagaagagtctgccggcacagcggataaggaagaaaagagtgaaaactttgtcgaagaaattgtttatcccgttctggtccaaggtcctgaggcggatgctaatctgcaagacaaacccgaaaaactcatcgggaatataaccgaacaggaaagcgaagatgtgacatttaaaccagaagaaactgtacaaactaatgaattgaaaagggtgcatgatgtgattggggacaatgacagaaattttagtattattaaagttaacagcgacttctcattcacggcacccagagaagggatgcaaaacgattattatggggaggagccaagagaactagattttagtttagaaaatgcgctgcaaagaaagaagcacagatccgcaccggaacataagacaagttattggagcgtccgtgaatctcaactttttccagagttgttaaaggaatttggctcccaatggtctttaatatctgaaaaactgggtaccaaatcaactaccatggtaagaaactactaccaaagaaacgctgctcgtaatgggtggaaattaattgttgatgagactgatttgaagcgagacggaacaagttctgaatccgtacaacaatctcagatcatgatacaaccagagcgtccaaatattaatgcttataataacattcctccacaacaaaggcccgccctggggtattttgttggacaaccaacccatggacctagtacatctatatcttctgttgacgggtctatgagaccattcggacctgactttcatcgtgatagcttttctaaagttagtacgcctttaacaactttaccaccaccaagactaccttccatccaattcccacattcagaaatgcctgagcctacggttacagatctgcgcaacagaactttagaccatatcgacacattagccgaagcagcctcatcagtaacaaatagtcagaatttcagtgatgaaagacacgccattggcactaaccacaaatcaacaacgattagtagtttactgaacaatgctgaccgggatgtcaaggttcctttccaaaagacttctaagcagcaagcacacgttgagggtactcctaagttgaataacattgtagtacaagaaataaaacctaacatcactaccccaagatccagttctatttccgcactattgaaccctgttcatgggaatggtcaactgaatccagatgggagaccgttgctaccatttaacaatatcacttctcgtgggcctcctagttttcctttaccccctccgcggactagtacggccattcatgcgcctccaaagttcaatttttccaatgacccattggcggctttggctgcagttgcatcagcaccagatgcaataaatggctttttgtccaagaaggataatgataattag

SEQ ID NO: 310 - DNA, 1044 bp, Saccharomyces pastorianus
  modified_base (1021)..(1021): a, c, g, t, unknown, or other
atgaattcactcgttactcaatatgctgctccgttgttcgagcgttatcctcaacttcatgactacttgccaactttagaacgcccatttttcaatatctcattgtgggagcatttcgatgatatcgtcacgtgtgtgaccaacggtaagtttgttccaagtgaattccagtttatcccaggcgaactgccattgagtacattgcctcctgtgctatacactatcgctgcttattacgtgattattttcggcggtaagtttgcattgagtaagtcgaaaccttttaaattgaacggccttttccaattgcataatttgtttttaacttctctttcattgacactattgattctgatggttgaacaattagtgccaattattgttaagaacgggttatactttgctatttgtaatattggtgcttggactcaaccaatggttacattgtattacctgaactacattgtcaaatttatcgaatttatagacaccttctttttggtgctaaagcataagaaattgacatttttgcatacttatcaccatggtgccactgctttattgtgttacacccaattaatgggtactactgctatctcatgggtcgtcatttcgttgaatcttggtgttcatgtcgttatgtattggtactatttcttagctgccagaggcattagagtttggtggaaggaatgggttaccagatttcaaatcattcagttcgttttggatatcggttttatttatttcgctgtttaccagaaagccgtccacttatatttcccagtcctgccacattgtggtgattgtgttgggtcgactactgctacatttgctggttgtgctattatttcttcatacttggtgctattcatttcattctacgtgaacgtttacaagcgtaaaggtaccaagaccagtagggtcgttaagcgcgcacatggtggtgttgctgccaaagttaacgaatacgttaacgttgacctgaaaaacgttcctactccatcaccatcaccaaaanctcaacacagaagaagaaagtaa

SEQ ID NO: 311 - DNA, 375 bp, Saccharomyces pastorianus
atgaacgtgactgatggaaatgcactactgttcaagtgcggtaagcatggctacatgaatcaaactttctcaccaaatgaagtttataagtgtgggttgcaggaagcgcaacaggtacgtaaagaaaagtacccatcttatgaaattacgtatcaaccatttctggttgatacgcctgcttcaagttcagagacgtttacgtgtggtagcaagggctatacaaatgcaagttacacttcgagagatttttattcctgtggcttttttgaagggaagggtgcagaaactaatgccggcgcacgtatccctacagcttctcattccctcatcaaaatcatgatattcctgatgcttataacttatgccatcgtgtga

SEQ ID NO: 312 - DNA, 1173 bp, Saccharomyces pastorianus
atgttgggactgaaaagctgtttggctatccttattggatatgtcgttgccgtgtgtgctttgttttcaagcaagggaaggaatccgtctttaaataattgggagaagttaaaggatcaaaaatattccactttagataacttcgggctaactggtcactctttgttacagttcttccaggataacttggcaattttaggtttttctgaggagaaagttcatcataaacgctcttctttttattatgatgtttttaaagagtatatcctacgtggtgctaattcaaaaaagtgctcatctgcaaactcagctattgcaaaactgaacaaagatgttaatcctatgccagttcactctcacaatgattactggagaaagctaccgctttttgaaggtctagcgtatggtgcaagaagtactgaagcagacgtgtggaatatagacggaaaagaactagccgtgggccacaacgaagcttctttggacccagtcgaattgacactagataaactatacacgggccctctttcaaaaatattagatgaggtcaattgtcaagattctttttccaatagtaagaacggtgtgttcttcaattcgcctgaaacttcacttttcttttatattgattttaagtccgatgacaatgaactgacttacaaattattgatgcaaaagtatttcaagcctttgatcgactccggctatctaacgtattacgacatgaaaaaggaagaagtttcttggaaccctattacagtaatattaacaggcaattatccaacgtcgctagaggttttagataacggaaatgatgacggctattttaactctaaccaaagatttgcgttcttggatgcaccattattagatttggaacccaaatactctaacctttccgtcactacgactgtatccttcaacgaattaatgagacattgcggttctgatcattggaaggtattgttaagaggccatataggttcggatgagattacttgtgccaagaaggtgattgacgaggcccatgcgttgaagctaacaaccagaatttggggggccccaacctggccttttaacacagttaagaccatttctcaccaaatcttccacgatttgggttctgatttactcaacctggacgatatgttcatggcatcgtcattaatctaa

SEQ ID NO: 313 - DNA, 504 bp, Saccharomyces pastorianus
atgtctaccatcccacccgagatcattaattggacaattttgaacgaaatcatatcgatggatgacgatgattccgatttctctaagagtttaattattcaattcatcgaccaggcacaaaccacttttgcccagatgcaacgacagctggacggcgataaaaatctcacagaactagataacttagggcattttttaaagggctcttctgcagctttaggtttacaaagaatcgcgtgggtttgcgaaagaatccaaaacctgggcagaaaaatggagcatttctttcccaataaggttgaattgatcaatactctaagtaacaaatcggtcattaatggaatcgatatcaacgaggatgacgaagaaatgaagatacaggcggataatacacatgctgattccatatttttgattttgatagctaaggctttgaatcaagctaggttagagttcaaactggcgagaattgaattatcgaaatactataacactgatctatga

SEQ ID NO: 314 - DNA, 111 bp, Saccharomyces pastorianus
atgatctcagatgaacagttgaacaccttggccatcacttttggtgtcctcatgatgactttgattgtcatttaccacgccattgactccaccatgtcctctaagaactga

SEQ ID NO: 315 - DNA, 1842 bp, Saccharomyces pastorianus
atggctgaaggtgtgttccaaggtgctatcggtatcgatttaggtacaacttactcttgtgttgctacttacgaatcctccgttgaaattattgccaacgaacaaggtaacagagtcaccccatctttcgttgctttcactccagaagaaagattgatcggtgatgctgccaagaatcaagctgctttgaacccaagaaacactgtcttcgatgctaagcgtttgattggtagaagattcgacgacgaatctgtccaaaaggatatgaagacttggccattcaaggttatcgacgttgaaggtaacccagtcattgaagtccaatacttggaagaaactaagactttctccccacaagaaatttccgccatggtcttgaccaagatgaaggaaattgctgaagctaagattggtaagaaggttgaaaaggccgtcattaccgtcccagcctactttaacgatgctcaaagacaagctactaaggatgctggttccatttctggtttgaacgttttgcgtatcattaacgaacctactgccgctgctattgcttacggtctaggtgctggtaagtccgaaaaggaaagacatgttatgattttcgatttgggtggtggtactttcgatgtttccttgttgcacattgctggtggtgtctacactgttaaatctacctccggtaacactcatttgggtggtcaagatttcgacaccaacttgttggaacacttcaaggccgaattcaagaagaagaccggtttggacatttccgaagacgctagagctttgagaagattgagaactgctgctgaaagagctaagagaactttgtcttctgtcactcaaaccaccgttgaagtcgactctttgttcgatggtgaagatttcgaatcctctttgactagagctagattcgaagacttgaacgccccaatgttcaagtctactttggaacctgttgaacaagttttgaaggatgctaagattgctaagtctcaaatcgacgaagttgtcttggttggtggttccaccagaattccaaaggtccaaaagttgttatctgacttctttgacggtaagcaattggaaaaatctattaacccagatgaagctgttgcttacggtgctgctgttcaaggtgctatcttgaccggtcaatccacttccgatgaaaccaaggacttgttgttgttggatgttgctccattatccctaggtgttggtatgcaaggtgacattttcggtatcgttgtcccaagaaacaccactgttccaaccatcaagagaagaactttcactaccgtcggtgacaaccaaaccaccgtgcaattcccagtctaccaaggtgaacgtgttaactgtaaagaaaacactttgttgggtgaattcgacctaagaggtatcccaatgatgccagctggtgaaccagtcttggaagctatcttcgaagttgatgccaacggtatcttgaaggttactgccgtcgaaaagtccactggtaagtcttctaacattaccatctccaacgctgtcggtagattatcttctgatgaaattgaaaagatggtcaaccaagccgaagaattcaaggctgctgatgaagctttcgccaagaagcacgaagccagacaaagattggaatcttacgttgcttccatcgaacaaaacgtcactgacccaatcttgtcctccaagttgaagagaggctccaagtccaagatcgaagccgctttatctgacgctatggccgctttgcaaatcgaagacgcttctactgatgaattgagaaaggctgaagttggtttgaagagagttgtcaccaaggccatgtcttctcgttaa

SEQ ID NO: 316 - DNA, 1761 bp, Saccharomyces pastorianus
atgctttccgaaaatacaactatattgatggccaatggcgaaattaaagacatcgctaatgtcaccgctaattcctacgttatgtgcgaagatggttcagccgcccgcgttataagcgtcacacaaggttgtcaaaaaatctacaatattcagcaaaaaaccaagcatagagcttttgaaggcgaacctggtagattggaccctagacgtagaactatttaccaacgcctgaacttgcaatgtaccgcaggtcataaactatctgtcagggttcctactaaaccactgttagagaaaagtggtagaagtgccacgaaatacaaagtgagatggagaaacttacaacaatgtcagacacttgacggaagaataataacaattccaaaaaatcaccacaaaacgtttccaatgactgtcgaaggtgaatttgccgcgaagcgtttcatcgaagaaatggagcttttgaaaggcgaatactttaactttgacatcgaagtccgagatttggactaccttgatgctcagttgagaatttcaagctgtattagattcagtccggttattgcagggaatggtgttttatctaaatttctcaccggacgtaatgacctagtgactcccgctgtaaaaagtatggcttggatgcttggtttatggctaggtgacggtacaacaaaagaacccgagatctctgtagatagtttggaccccaaactaatggaaagtctacgagaacaagccaaaatttggggcctctaccttacagtgtgtgatgaccatgttccgctgcgtgccaaacacgtgaggctacattatggggatgggccagatgaaaataggaagaccaagaatttaaggaagaataatccattttggaacgccgtcacaaaattgaagtttaaaagggagctcgatggtgagaagcaaatcccagagttcatgtacagcgagcatgtagaggtccgtgaagcatttttggcaggtttaatcgattcagatggatacgtcgtgaaaaagggcgaaggccctgaatcttacaaaatagcaattcaaactgtttattcatcaattatggacggggttgttcatatttcaagatctcttggaatgtccgctactgtgacgactagatccgctagagaagaaattattgagggaaggaaagttcaatgccaattcacatatgactgtaatgttgctggaggaacaacattacaaaacgttttatcatattgtcgaagtggccataaaactagagaaattcccccaattgtgaaaagagaaccagtttatttcgggttcacggacgattttcaaggtgagagtacagtatacggacttcacatagaggggcataaaagttacttattaggcaataaaatagaagtcaagtcttgtggaggctattgtgaaggagaacaacctaaattatcccagaagaaaaacttgaaacactgtattgcgtgtcctagaaagggcattaaatacttttataaagattggagcggtaaaaaccgagtgtgtgctagatgttacggaagatacaaatttagtggccatcactgtataaactgcaaatatgtaccagaagcacgtgaggtgaaaaaggcgaaagataaaggtgaaaaattgggcataacaccagaaggcctgccgtttaaaggaccagaatgtttacgatgtggggggattttgcaatttgacgctgttcgtggaccccataagagttgtgggacaaatatcggggtacgggtttgttga

SEQ ID NO: 317 - DNA, 1074 bp, Saccharomyces pastorianus
atgtcagattggaaagtggacccagatacccgcagacgtctcttgcagctgcaaaagatcggggcgaacaagaaatgcgtagattgtggtgcgccaaatccacaatgggcaacgcctaaatttggggcttttatctgtctcgaatgtgccggtatccacagaggtcttggcgtccatatctcgtttgtcagatctattaccatggaccagtttaagctagaagagctggttcgcatggagaaaggtggtaatgagcccttgactgaatggttcaaatcccatggtatcgacttgagtttaccacaaaaagtgaagtacgataatcctgtagctgaggattacaaggaaaaattaacctgtctttgcgaagataggccatttgaagaacgtgagcatccaggtttcgatgcttccaaattatcagccactgctcccgctgctagtactggcgcgtcaggtacagttcaaagtcgagagggcacacctttggaaaaccgtcgatcggcaacaccggcaaactctgccaatacttccaacctccaaaaggagaaaaacgaagtttatttcgctgatttgggtatgaagaaccagtctaagccggatcatttacccccttctcaaggtggtaaataccaaggtttcggcagcacaccggtaaatcctccacaggaacaacaagcgggttctgccaacactttgagcctggaaaactttcaagccgatccattgggaacattaactaagggatggggccttttctccagcgctgtttccaagtcatttgaggatgtgaatgaaaccgtaatcaagccccatgttcaacaatggcagtctggtgaattgtcggaagagacaaagagagctgccgcccaatttggccaaaaatttcaagaaaccagtaactatggtttccaagcttttagtaactttaccaaaaacttccaagaccagcgtaatcctgccgcgcaaagcaactctgctgcaggcgtggattcttctcgtgcaggttaccaaaagatcagtaataccgataagaaaaacgaccaagacgaagacaagtgggacgaattttaa

SEQ ID NO: 318 - DNA, 1656 bp, Saccharomyces pastorianus
atgagcgctacttcaacaccgccaatgaatctgtttcgcagaaagaaggaacatagacgcgggatcacatacacaatgttgttatgtgggccagcaggaacagggaagagttcatttgctaataatttgctggaaactaacatttttccacacaagtatcagtatgctgaaacaggcgccaatattagctccaaccccgatgtgaaagtcgttgcccctaccaaagtcgtctcattcaactccaagaatgggattccatcatatatctccgaattcgattcgatgagagccagtctggaacccggtattactatcacttccacgtcactggagcttggaggcaacaaagatcaaggaaaacaggaaacgaatgaagacgacaccgtcttcttcaacttgatcatgacacatggtgtcggtgaaaatttggacgatacgctatgttttgaagaggttacctcatatttagagcaacaatttgatatcgttcttgctgaagagactagaatcaaaagaaacccaaggttcgaggacaccagggttcatgtcgcgttgtatttcattgaacctacgggacatggtttgagagaaattgatgtggagctcatgaaaagcatttctaaatatacaaatgtactaccaataatatctagagcggactcgttcaccaaggaagaactgattcaatttaggaaaggcattatgttagatttggaaaaattcaacgttccgattttcaaatttgaagttgatcctgaagacgatgatttagaatccatcgaggaaaaccaagcattggcatcactgcaaccatttgccattataacctcggataccaaaaacagtgagggaaagtacgtaagggagtacccatggggggtaatatcaatcgatgatagtaaaatttcggacttaaaagttttgaaaaacgtcttgtttggttctcatctacaggaattcaaagacactacacagaatttactttatgaaaattaccgttctgaaaaattgtcatccgtggccaacactgaagagattggccctagttctacaaagagacaatccaatgctccaagtttaagcaactttgcatctttaataaatactggacagttcaactcttctcaaaccttagccaacaatttgagaccagacacaccaagaaaccaagttagtgaaagattcaatgaaaatgaatatgaaggcaatcgtgaacatgattctacgacgaatgaacaagaaatgtcacctgttagacagatgggccaggagattaaacaagaaaatgaaaatttgataagatcgatcaaatccgaatcatcgccaaagtttatgaactctccagatttaccagaacggaccaaattaagaaacatttcagaaactgtaccatatgttttgagacatgaaaggatcttagccagacaacaaaaattagaagaattagaagctcaatcggcaaaggaattacaaaaaagaatccaagaattagaaaagaaggcacatgaattgaaactgagagaaaggttaatcaaccaaaataaaataaatgattcctcatcctcaatcaattctctacaacaaagcacaagaagccaaattaagaaaggtgacacatataccgatttagcatctatcgtatctggtagggactga

SEQ ID NO: 319 - DNA, 1965 bp, Saccharomyces pastorianus
atgtcgttagtacacggtcaaacaaatctaaatgaatctgaatttcttatagaaagggcgtttagctcaagttcagaaaatgttgcattttctaaggaggcaacgtaccctatgcctaatgcatatagtttttcaacagctaggagtaacagcgagactaacatcaaaagagagagtccacagggtttggtcggagaacctcatatgacttctatgcttcacaatttttccatgtccacggcgcatgggaatgggaacggaaatgatagcagctctttggcgccaaatgatattgacgttggcccttactgcctattattaaggaacttaccgaaggacatcaccttaagagaatgctattgtatattctcgttggctacgggagtatcgagtatagaactaagaaaggataacaaagaaccctccaatgaaaatgaaaaagttattgtggttaaatttggatccttaccgttagttacacattatgctaatattttgaattcgaaatctgaaattttcggacctagctttccattcagatctcatattgatgtggtgaatgaacaaacgcaactgccagtgagttttcaagaacatgctacagctagcacaacaaacagctcacccaggaattaccaattatcttctagtgcgcaaaacgaaatccaaactcaaactttcaatactgtatcacacgcggcatctaattcttctcctctaggaccggcgtcagccaaaataaagccctcactactttctgaaagatccttgcgtttttcattcaatgatccttttgggctagaaacaggttctcagaggaaggaatcagtgcctttcctgcgaaacagtatctcacagcacgatttatccactgtaaccaccactccattaccagcaggaattccgccctcaaaagatgccggtaaatccctattgctattagaaaaagatgaaataaatgaaagcatttggaatggtgatgaattggctaatgatgttggtggttcttcattcagtgcatctttacaacagcctccgatgtcttcaacacctgtaatggagtggaattcttcctcgtctactaatattcctgtttttcaattatctggccaagacaatcgtcaatctgctctgttacagccatcgcatcattctatcagccagaatgttccacatattcaatcacaacccaatttgaacaattcaggagtaatacgttctacagcctctctaccacagtatcatatgttgaatcaaatgagtggtactaccaatgcgcataacgtgcaacagcatctttcaaatgttccatctaatttagagcttaacttgcaaaccgaacataaccactcacaatcttctgctcctaatggttcttcaattttcaataaccaaaaaataaatcaaggttttttaacaagtgaccaagatactactggactaccacaacagaaagaatcatcttctactgctgcttctgcttctgcttctgttttcccgaagaataatgaaacaaatgtggcaggttccacaactatatcacaggctgacttgtcattattggctaaagtgcctccaccggctaaccctgcggaccaaaatcccccatgtaatactttatatgtgggtaatttaccgcctgatgcaacggaacaagaattaaggcaattgttttctaaccaacagggattccgcaggttatctttcaggaataaaatgaacacgcacggccatggcaacggtcatggacatggtccaatttgtttcgtggaatttgaagatgtcagctttgccactagggcattagctgaattatatggtagtcaattgcctcatcctcgtccttcattaaataacaaaggaggtattagattaagtttttccaaaaaccccttaggtgtgagaggttcaaacagcaggagcaaaactggatatagtttcaatggaagttacggaaaatcatga

SEQ ID NO: 320 - DNA, 969 bp, Saccharomyces pastorianus
atgaaacgagtcactggagtctttcttacacttttgagattttcgcagtttgtatcatcagttttggtgatgtcactcttggcgtatgccatccatgcctacaatgataaaggtaacaagaaaaccaacttcacgttggcaacaggcgtaatcagcgtgttctatctgattattttgggtattttatgtttggctttacctactctaatctacataggaatgtatttctgtgcagaattgatcatgtgtctactatggttggccgctttcatcgttctcgcatatgctcaaggtcgtcacagctgtaagagcagaaattcaagtggaggatattatgacccatatagtgggcaatacactagtagcaatcatagaagagcctgtaactcttcccaagcagcaattgcctttgccggactcacttttttgctattcttgactagtgtagtattattgggagtcaatgttttaacaccaattagaaggcgctataaatctcaaggattatggagaactggtgcttctatgggaacgaaacttcatagatggagtggattggctttaagtgagccgtttgaagaaactgccggttacgggaatggtaatataagaaccgaggacgttgaagcaggtacaggtgcaggtacaggtgtagattcaaataccgcttatgtatcagatcctaacgctgacacacgctatgctactaatgatcctcatggccgctacaccacaaccacaaacactaatacacgttatactactaccacccctaatgcagatgtgcgttacaccactaatgagcgcactgcaaataccccaaacgctgtaacggaccagcatacttattctaccgacgaatcaggtgggcattcctatgaccaagagaaacttgtagagggggccgcttctggtgcaatgagcggcagtactacagacccaaataggaacgtcaaccctatgccatga

SEQ ID NO: 321 - DNA, 630 bp, Saccharomyces pastorianus
atggtgtatacgggatttggcctagaacaaataagtccacctcaaaagaagccctataatgaattaactcccgaggaacagggagagcgaggtgcagaaatgattatgaacttcatgacttcatgtcccggaaaatcagtaataagtggtgtaacggggttcgcgcttggtggtgtcttaggtctatttatggcatccatggcttatgacacaccacttcatacgcctactccagccaatacggctgcaactacagctacggcttcaggaaacgtgggtgtgggcgggatatcaaggaccgttcagcaaatatctgacttaccattcaaacaacaaatgaaactccagtttaccgatatgggtaagaaatcatactccagtgctaaaaactttggttatattggtatgatatatgctggtgtagagtgtgtgatagaatcgattagggccaaaaacgatatttacaacggtgtaacagcaggttttttcactggcgctggattggcgtataaagctggaccacatgctgctttaatgggtggtgctggttttgctgccttttcggctgcaattgatacgtacatgaagagcgaagatggtaggccacctcgaaatgattttaaagaataa

SEQ ID NO: 322 - DNA, 2091 bp, Saccharomyces pastorianus
atgtcgttttctaagctactacgatataatcagagaaacaatatgacaacggcatctttgaccacagagcacgccttttctgagaactggaccacttctgccattctgagcgatcctaccagtattgatgttaacataccagccgagataagtagggtattaccaccatcaaatgaatcgtacgattccgtattatcttccttgcccactagaggcatgtcaaagatgaattccacggaatcttctggcgacgacgaaggcacccatttgcaaaaactgacaacctcttggctggagaaaattgacacggaaatgcccgaaaacatttccaaaatcgactcgaatatcatttcctcccctattgttaatcaggttgaggctcgattcattgttcacacgggtaaactgaggaagaactccactgactttgcatcgtctttctcgaactccctaggtttttccaaaagttatggcaagtatatttttttcggctctaagaaaagcgaaaatgccgccaagaagaaccattctattgacagtaatcatggcagccactctctcactgatcatggccgcaacctcccacaaacttcagaaacaataatatgcgacgctttcgcctccacttctgcggaacatgagtacggggcccatggcccggatgggatgttcaccactcgcatttattccctagagggttcgttctcttctctttctacaaattgtcctgaggacacgtattcggaagccattcacataaatactaagcatattgagaataccggtagcacgacacactcaaggaagtcgtcatatactacttcattatcaaacatcaaaagactgttcaagagaacatctttgaatagccactgtagtggctcgtatgaccacacgaacacaatcgctgatgattatgccattgcatcatctgtgaatgaaactacttcttcatgcatttcatccggatcattgtatgccatgagtgaaaatgaagataacgatagagaccaaatcgtacaaactttatacaacaacattgatgcgtccactgatttagtgtctaagaaatacaaagatctaaacgttattctaggtgaaggttcgggtggtaaggtgaaacttgttcaaagggtcgtggataacaaagttttcgcactaaaggagtaccgttctaaaaacaaaaaagaatctgaaaggaagtacatcaaaaagataatttctgaattttgcatcgcttccactttgaaaaatccgaatatttgcgaaacatcaaaaatactgtacgaaaatggtaaaatcttccaaatcctagaatactgtgaatatgatttatttgctttggttatgagtgaaaaaatgcaatatgatgaaatatgttgcctttttaagcaactgatcagtggtgtaaaatatctgcacgacatcggcctttctcatcgggacttgaaactagacaactgtgttgtgacacaaagggggattttgaaattgatcgattttggtgcctctagtgtcttccattatccactatcttctcagctcattgaagcgcacggcattgtcggtagtgacccatacttgtcacctgaggttttttatttcgaaaagtacgatcccagagcgctagacgtttgggccatcgggataatgttcttctgcatgatcaccaggagatttccttggaagtatcccaaagtgaaagatcttcaattcagagcattttgttccggaagaggggcgacatcttttaaagacctagtgacaagacccgccaccggtgacaacaatcaatataatgatggttacgaagaagatgttattgatatgggccctaatttccttctacacaggctaccggaagagagccacaacataatgaggcagatactggatatttcgcccttcagaagaattactgtaaacggaatcctgcaagatgactggatcaaagaaatagaaatgtgccaagtagtgggtgcagaagtcccaaaggatgcgtcacctcgaattataaacaaagaaaaccatatccatacgaacatcgaccaacgatacgcccatatcggcggaatgcatgaacgaacatga

SEQ ID NO: 323 - DNA, 687 bp, Saccharomyces pastorianus
atggggtccgaggaagacaagaaactgactaagaagcagctcaaagctcagcagtttagaaaaagtaaagaggaaaaagaccaggagaaagaggtaaagcaagagcaagagcaagtgtcagatggaaaaagacctaatggtgaagttgggaatgaaggagaagaacccgtgaagaaaaagagaaagacacgtagaggtcggggtggtaaaggcaaaaatgggaagaagggcaacaggttcattgtttttgtcggtagtttaccaagagatattacggttgctgaattacaaggccacttcaaaaacagttcaccggaccaaattcgtctcagagcagacaaaggtattgctttcttggaatttgacgccgataaagatcgcagcggcattcaaagacgtatggatattgccttattgcagcacgggactttgctgaaggaaaagaaaatcaacgtggagctaaccgttggtgggggtggtaacagtgaagaccgtttggaaaaattaaagaacaagaatatcaaattggacgaagaacgtaaggaaaggttgactaagatgatcaccgacgacaacgagaagaaaaaggctaaaattaccgcttcagctactcccacggccacaaccggttcggataagcctgttcctgcaggaattcaccccgatagagctaggttgctcaaataa

SEQ ID NO: 324 - DNA, 633 bp, Saccharomyces pastorianus
atgttttcatattcagatctttgttccatcggttcggccatgatattatcggccaccacctttctaatgggtgttttcttcagtaaccagccatacgattaccaccttttattcaatgctaacgccactcaagaacattttgatctagctttgaaacattatcaaatcctgcatgacactccaaggccaatcgttattgccctgtgtgtcattgcattaattggtttgatcggtggtacaatcaaaatctacaagccaaacccagaattgcagatgtttgaatattgttcattgggtttatacgtgctggctatttgtgtctttattactaatgtcaagactggtcttgactgtactataagccataaatggggggaagtttccgaaaatcaagggctggccgtcattgcttcttctaacattatcctattggtcatgttttccggtgttatcatcttacaaattggtctatggtacagtaactgggatttgcaaaaaagattaaagcaattttatgctgaagaagaacaagaagctgccagtgctggtaaaaaatccgaaaaagctgaaaaagtgaagaagaatgacaataaagctaagaatgttcaaaagaggaacaacgccaagaaatag

SEQ ID NO: 325 - DNA, 1137 bp, Saccharomyces pastorianus
atgttagtaaatgtaacgtcttcgcaatttataaacagacatcaaccgacgagtttgaataaggttactaccacagaaagctgttcgagttcacctctatttacagagaagtcgaccattacgtgttccattgggactgaaagcacaattacgacgaaatatcgtaacagtctgacgaattcatgccacggcctgtcatacgctgaatactgtgcgccttcttcgcataattacacatctattccaaggtctttaacggcaagtgcatcttcatcttcgtctgtaaagagtaatattactactgacgtatggttgacaagtacatcaaaggctttgtatttaacaccaacaccaaccatgcagccatcgacaactgaactaacaacaccgccatccacaaaatttgcatcaaccattaccacatttgaatcatacaccatgttcaccagtaaaaaatctatttatgtcgtctatgaacaagaatatgaaattacggaatcaacaacaagctttagtacacacttcccccaaacaacaaggcttaaagagacaaatgccccactaacttttactattccatgcagtaccatcactggagatgctaagctttaccgccaattgttgccaggagcgttggatacacaaaacgcttcagacaaggataacaacaatacgggtgtcatagttggctccacagttgggattatcattggagtggtaatagtaatttttatcgggtttgtagttatcagaaataagagaaacgttaaaactcgtagcaaaaatggcttcagtcatgatattggcaaaagggtaggccatgatgaggtgatgaagggagaaccaatgctaaacccgtttcgaaatgaatttgatttcaaagcaagagccactagcgaaagtacacaagatttgtttggggatggtagagagatacgaagaagcgattacttagaaagcgcatatgcagcgcatccttattatggtatggaagatcatgatactagaaggctctcctatctgtcatcacttaatgagtctacagggtcatcgattggggaaacaagttccaacgcgtccactataactcggccaaatattgatcagacgaatagttttctgagagagattatataa

SEQ ID NO: 326 - DNA, 1614 bp, Saccharomyces pastorianus
atgaggtttgttttcgatgaagttttcagttcggatactgagtctccagaattcgaggaaacgtgctctataacttcttctgcatcatcacaatgcgtaacacctgaaccgagtccggctgcgaagttacctctcttcaccacaatttgcaccaagcaattgactcaggaatctgtagtggagctggatcctgctctagagaattttttgcgtgacttgaacctacaatccaaagtaattcctataaatgagcccatcgcaactccatcatcaatgtttacaccacgtgctgacaaaccgctagcaaatccatcttctatttcagtgacgagcactgctaaggaccaagatacaaggctgcacctactaaaggcaatggaagactcatttcaaagaaagatgcaaaatttggtgcttacgaatcagaaggaagttcaggctataagagacaagaaacgacgcattgaagagcaacgtaagcgaaaagaggaggaggagcggaagcgcaaagaagcagaagagaaagccaaacgagagcaggaattgttgcgccaaagaaaggaagaagaagagcgcaaacgcgaagaagctgaagcaaagctagctcaagagaaagaagaagctcaaaagaaaaagatagaagaacaaaatgaaaaagaaaaacagctgaagaaagaccaagaagcaaaattgttgcaacaaaaagataaactgggtaaagcaattacaagtttcgatacaatttccaaaacgttttggcattataaagacaaaattgcccaaataaagcaggatatagtcttgcccgtcaagaaggccgatgtaagtgtacgaaatttgctttcacgtcacaagagaaaaataaaccctaaattcgggcaactaaccaacagtaaccaacaacttttcaaaattcaaaacgagttaacgcagttgataaacgacactaaaagcgataccttagcatatcaatggatcttaaactttattgcaaaggccgtagttcaccaatcagaaactgaagtcagagtaaaaccggagtctgcgctgcctctggggaaattaactctatatctactaattcagttcccagaactgcaggagttattaatggctagacttgtaaagaaatgcccctttgtcattggattcacatgtgagattgatactgagaaaggccgtcaaaacatgggctggaaaagaaataatgaggacaagtgggaagacaacacatcttacgatgaaagaatgggcggtatattatctttgtttgctatattaacaaggctgcccctgcctcaagaattcatcaccactaaaaatcacccgttcccaattgcgttatcatggcatatcttggctagaatttgtaatacaccactagacttattaacgaacacccatttcgtaatcttgggctcatggtgggatgccgctgccgtgcaattcctacaggcatatgggaaccaagcctcgaaactactatttttgattggtgaggaactaacgtctcaaatggctgaaaagaaatatgtaggtgctgcaagattaagaatcctgctagaagcttggcaaaataacaccatggaatcgtttccggaaatgtctccttaa

SEQ ID NO: 327 - DNA, 984 bp, Saccharomyces pastorianus
atgggccacgaaactctgcatattggtgggagaaaatctagtttggcggtaatacaatccaaccatgttttaaaactgatccaggaaaaacatccggaatacgactgcaaggttttcactttgcaaacccttggtgatcagatccagttcaagcctctctactcatttggtggtaaggccttgtggacgaaggagctagaagatcacttgtatcacgatgatcctttgaagaagcttgatctgattgtccactccttgaaggacatgcccacactattgcccgaggggtttgaactgggaggtatcaccaagcgtgtcgacccgacagattgtcttgttatgcctttctactctgcgtacaagtctctagatgaccttccagacgggggcatcgtgggcacctcttctgttagaagatctgctcaactgaaaagaaaatacccaaaattgaagttcgaaagtgttagaggcaatatacaaactcgactacaaaaacttgacgaccctaagtctccataccaatgtatcatcctggcatccgccgggttgatgcgtatggggctagaaaatagaatcactcaacggtttcactcagatactatgtatcatgcggtggggcaaggcgccctgggaatagaaattagaaaaggcgactccaagatgatggctattctggacgatatttgcgatctgaatgccactatatgctgtctatcagaacgtgccctgatgagggctttggaaggtggttgttccgtccccattggtgtagaaaccacatataacgaaaaaacaaagaaactgctactaaaggccattgtcgttgacgtagatggtactgaggccgtggaagacgaaattgaaatgttgatagaaaatgtcaaggaagattccatggcttgcggtaagattttggctgaaagaatgattgccgacggtgccaagaaaattctggatgaaattaatttagaaagaattaagtga

SEQ ID NO: 328 - DNA, 1155 bp, Saccharomyces pastorianus
atgaatagaaatacgactaaccataagaacacggattcgagcgctagtagaaatgctggcataccggaagagagagtccatctgaacaagagaggcttgatatactggaccaaccctaggaagtcgggtgcaacctttgctgccactctagtaggtttaattgtcttcagaaacgtcaatattatttcagttttgctcaagatcgggtacatggtcttattcacaagcttcgcggtggagctatctacgaagatactctttgatcagggcatagtgtctaggctgggaatgaaagaatctccagacgttgttgggttcttgagaccacgtattgaccgtgcattggaccacgtgcctgcgttgcaggataagatcagaaagttggtgtttgcaaacagaacaagaaacaatctaaccattggtatgtctctatatttcttgcacgggctttttgccattttttccatgaacactgttctgatgatgaccaccatgctactttacaccgtacctttgatctacgacagaaaacaggaaagaattgaccgtgctattgacagagtgaagaacatgctcgtccacagattccacagaaactactccaaggttgtcgaaaagaccgaaccatacattgacaagattattccagctcaaaatgatcaagacagctactcaacctctgtaagcggcaaggatagctcttcaacctcccaacgcaacaaggacagcttcccaacatctcaaaacggcaaagacatatactcgacttctcagcacagccaaggaacctacccaacctctcaaaacgaggccagtagcaccctaaaatctggcaaacatgaactaccatcagaaaaggacttcaaaaacagacacggagactttagcaagcctgacgtcaagacgtacgacccaagacaaatggatatcgatgcagaactagaggctcaccagcgtgaaatagaacaaaagctaagggaaggtgattataatttagtaggaagcaaggaaattccggacccaatcaccgtaccagctcctgctcaacgcaccgttatccctaacgaagataagccattccctatcagcaaaaacaatgaaaccttacaacaaaagagtactcacggtttgaagcagaaattgcaacatgcctaa

SEQ ID NO: 329 - DNA, 747 bp, Saccharomyces pastorianus
atgttgcgtttggggtttatgcctagatgggtccctagaagtgggctttttgccttgtcagacacaatcggtgcacataagagattctatgctctggcttctgagcaattgtcaagaaagacggtgaaaccgctagaatcgaggaaaacgtttctcatagacacatacaaatacctgatggagaagagctccgtagttctatttgtccattacaacaatctttctaagacggaagatcaccatttcaggtttagaattaagcaaacgggggggaaacttacaaaagtgaggaacaatctgtttgaggtttatttgagaaactcgcatctgcccgatccatgtggtcccgcaaagcgcaaagagcaaaaccgaaagcatccgctcttgcccctactgaagggtcccacggccaccattacgttcgaagatacgaaccctcaacaagtggcgaaactgctgaagctcttgcaatcagcacaggacaagctgttggtgatcggcgccaaagtggaaaaccaagttttggatgtggaaaaactgaacgatttcaagactctccctacaaagacggagctacaatcccagatggttggggtattgcaaatgctcagcggtctcggtttagttcgtacgctggaaagcgggtcgaatgcgctctacctgacattgcaatcgcaccatgataaccaaaagcctaaggaggatgcagattcaagtgcggactccaagccagaagaaccaaaatag

SEQ ID NO: 330 - DNA, 861 bp, Saccharomyces pastorianus
atgaagaccaagccactaagtcaagatccaggctccaaacgttatgcctatcgtataaataaagaagaaaatcgtaaagaattgaaacatgtcaagatagatgaaagttctttagtccagaagggtcagaagatcgatttgcctaagaagagatactaccgtcaaagagcgcattccaacccattttcggatcatcaattagagtacccggtatcaccacaggagatggattggtccaaattatatccttactataaagatgcagaaaccggccagatgacaaagaaggtaactattgccgatatcggctgtgggtttggtgggcttatgatagatttgtcacctgccttcccagaaaccctgatcttaggtatggaaatccgtgtacaagtcaccaactatgtggaggatagaatcattgccttgagaaacaacactctctctagacatggtttccagaatatcaacgttttaagaggtaacgccatgaaattcttgcccaatttttttgaaaagggccagctatccaagatgtttttctgttttccagatccccatttcaaacagagaaagcacaaggcaagaatcatcactaacaccttgctaagtgaatacgcatacgtcttgaaagagggcggtgtcgtttacactattactgacgtcaaggacttacatgaatggatggtaaagcacctggaagagcaccctttgtttgaacgattgagcacagaatgggaaaacagtgacaaatgtgtgaaaataatgagaaatgccacagaagaaggcaaaaaagtcgaaaggaaaaaaggtgacaagttcgtcgcctgctttagaagattaccaaatccaaccatactgtaa

SEQ ID NO: 331 - DNA, 1125 bp, Saccharomyces pastorianus
atgcccacgatgatcaaaaaagatgataaaacaatggacccccctaatgaaaagccacataagaagatcgagagggatgatatcccagagtcttccaaccatatcccccctccagaagctagtgtgttaaggggtggtaagattaattcaaaaaccagagccatgaaggctgttacaagtatcatagtaaacaccgatgagaagccccaaaagtcgagcaataaagtcgatggagccgaaaagccggagacagggcattggagcagtaacataggcaaatttgagtacattttttacaagtttttgcttgtgatgctatacatctgttttgggttgttacgatacggccaataccaatataataagatgaaattaaggatcttcagtattatctacaatcatgcgtacacgccgcaattgattagacaggacgttgtgtctttgaaaaaaattcctaaaaggttagctgccatcttggaaatcaagcccgttggtgatgttggtggtggtgttacaggtttattaaatgatgcgagtgaaattgtttgttggaccgtatcagccggcataaaacatttggtattatatgactatgacggattattacaaagaaatgttccagaattgaggaaggagattcactcgaacttagctaaatactttggaccatctcatgtcccaaactatgctgttaaaatacctcactccaacaagacattttataacttggatggaattgaatccgaaactgacagtggtgaggtagtaaacggcaacgatgaaggaagcggaatcgctattgaagtgtctttgctgtccaacagagatggtagagagacgattgttgatttaaccaagaccatggctgagttatgctcggtcaacgaattaagcgtttctgacattaccatggacttagttgactcggagctaaaacagctagtgggacctgaaccagatttattgttgtattttgggccttcgttggatctacaagggttcccaccttggcatatcagattaaccgaattttattgggaaaaggataacaacgaggtcatatactccgttttcattcgcgggctaagacagtacgcagggtgtaaagtgaacgttggcaaatga

SEQ ID NO: 332 - DNA, 546 bp, Saccharomyces pastorianus
atgggtttgtttgcctcgaaattgttcagtaacctttttggtaacaaggaaatgcgtattcttatggtgggcctagatggtgctggtaagaccaccgttttgtacaagttgaagttgggtgaggtcatcactaccattccaacaattggtttcaatgtcgaaactgtccaatataagaacattgcattcacagtctgggatgtcggtggacaagacagaattagatctctatggagacattattacagaaacactgaaggtgttattttcgttgttgattccaacgatagatcacgtattggtgaagctagagaagtcatgcaaagaatgttgaacgaagatgaattgagaaatgccgcttggttggttttcgccaacaaacaagatttgccagaagctatgtctgctgctgaaatcaccgaaaaattaggtttacactctatcagaaaccgtccatggttcattcaagccacttgtgctacctcaggtgaaggtttgtacgaaggtctggaatggttaagtaacagtttgaaaaactcgacttaa

SEQ ID NO: 333 - DNA, 1137 bp, Saccharomyces pastorianus
atgaatatggaaactgatgaccctatgcacggttctgccgaagatcagctgtatcccacactggatgaagacatgcatagcaatgacagcaagaaacacaatacgaaggcgattgccaaccacgaggatgctgaggaggaactagatgatttcgatctcaggccaggctcctcaggcatagcagaccataaatcgtctaggccactagaaccaactaatacgagtataagccagctcgaccaatggattaagcaccttggtaagtgtgagccattatcggaagacgatgtggctcggctatgtaagatggcagttgacgtgttgcaattcgaggaaaacgtcaagccgatcaacgtccccgtgaccatttgtggtgacgtgcacggtcaattccatgacctgttagagctgtttaagatcggcggcccctgcccggacaccaattaccttttcatgggtgactacgtggatagaggatattactccgtcgaaaccgtctcctatttagtcgccatgaaggtcagatacccgcatagaatcactatactgagaggtaatcacgagtcgagacaaatcacccaagtatacgggttctatgatgaatgtttaaggaaatacggcagtgcaaatgtttggagaatgttcaccgatctgtttgattatttccccattacagctttagtagacaacaagattttctgtctacatggcggtctttcgcccatgatagagaccatagatcaagtcagagagctgaacagaatacaggaagtgcctcacgaaggccccatgtgtgacctcctatggtccgatcctgatgatagaggcggatgggggattagtgccagaggtgcaggtttcacttttggtcaagatatcagtgagcaattcaatcatactaatgatctatcactgatagcaagggctcatcaattggtcatggacggttatgcttggtctcaccagcaaaacgtggtgaccatcttcagcgctccgaattactgttatagatgtggtaatcaggccgcaatcatggaagtggatgaaaatcataatagacaattcttacaatacgacccatccgtaagacctggtgaacctagcgtcagtagaaagacaccagattatttcctataa

SEQ ID NO: 334 - DNA, 78 bp, Saccharomyces pastorianus
atgagagctaagtggagaaagaagagaactagaagacttaagagaaagagacggaaggtgagagccagatccaaataa

SEQ ID NO: 335 - DNA, 258 bp, Saccharomyces pastorianus
atgttaccacgttcagcattagcacgctcattgcaactacagcgtggagtggccgctagattctactctgaggggtccaccgggacgccaagagggtccggttcagaggactcctttgtcaagagagaaagagccacagaggactactttgtcagacagcgtgagaaggagcaattgcgcaatttgaaggaccagctggaaaagcaacgaaagaagatcgactctttggagaacaagattgactcgatgactaaatga

SEQ ID NO: 336 - DNA, 1650 bp, Saccharomyces pastorianus
atggtccgattaaatcatgcagcgtcgtatttcatgcctcttttctgctcgacaaggccttatatagtggtgctctctgcattgtctagtatttcgctattcctattgttctatgtgtcgtcggagttactattgcatgagtatgatgatccgttgatgttcaaacccaactcgcaggactacttcagaactttcctgctggggctcttttcgccctttctttactacttcctgaagactttccttttcaacataaaccagcggttcttgatcctgaatctgattgtcgatttccccatcaatgacgccttcatgcttattattctgatcgggttggcgtatcctcaggtacaagaccaagaaggcacttcacacaagaacaaggaatgttcctggcatatcattccaaggcaggcctatatcttcggtatatcatgggctctgggtgaattcaccatttgcataattggaaatttgtttaactatcaagaaatggccgacctgggcggtaataacgctttaacacgtcaagatagcgctaattggtactctaataatagtataagctataaggatgatcgtggttgcggtgcagagaatcgtcacaactttgtgaaaagaagtgatattacgttgtctaagtgtattggagtaagaaacgactcgtcatccatatcgaacaatgtctactcatccgactatcacccgatcaaacccctgcattccacgtcatcggcatatggtagcatacaacaggaatttcatgagaacaacataggtgcaaacaacgaacttcatatccctgacatttcccaagacgatacaattatcatgatgaatcctatcgacaactcgttgaaattgacaaccctagattctgaagatctgaacttccccatgaatgatgaagatcccattctgaaaagatcgtttggttatacttgggccatccctaatgaaaatacttcaactgctgctaaaagctttacaccagtaaagaaatttgttgcatttacctcggcataccaattggttatgagcatattcttgatggtcttggtggtcggcaataatatcatgttaaccattggagagtcgttgattctatcgatgtattttgtttatgttcgcggtcacgaggacttgtttacccccatagtgaactatttcggttcgagaaccatttcaaatttcatcctatgcgtgataataccattactctttttgaacttcatcgtaaatacagcgatatatctaagaagggagctggacgactggttcaatgattcgcagggggaatatgacgaggatgaccaagacgctgccaagaagagactagccttgagtcgtgattatcagcatccgctgagtgtaaactacaccgcgggggataattccgatgcaatgaatggcgcgggccattttgcattgagtcccggccagccactgggcgactccaccttatattatggtaattctaatagcaactatgacaatacaactaatgaacccgccttcttgaggttttgtaagaaactagtcaaaatttggagggctttggcaagaaacgattcattcgtactcggagtaatggtttcatggagtttagccgtcttcttgacaggtatcgtctccgccgtttatatatag

SEQ ID NO: 337 - DNA, 525 bp, Saccharomyces pastorianus
atgagcaagaatgtggggaaattagtaaaagtatggaacgaatcagaagtcttaattgatagaaaatcaaaatttcaagcaagatgttgcacattaaagaatcagaaggagattccctctgtattagaagaattagtccagaacaataagagcgtttcaaaggcctcccacatgcacatgtatgcttggaggacggccgaattacctagtgattcggattcacagcataagaatcaagaccagaaaaagaaaggtagtaaaaatcacaagaataataacaataatcatggcgacaagacaacgaagataacggttcaaccgaagaatgttgagcaaggctgtgctgactgtggtgaggctgctgctggacagcgcttattgactttgctcgagagagccaatatcttcaacatcctagtaatagtgactaggtggtacgggggtacaccattgggctcgtctagatttaggcatatctcaacttgtgctgtagagagtttgaaaaagggtgggtttctgccctga

SEQ ID NO: 338 - DNA, 2127 bp, Saccharomyces pastorianus
atgactactggtaggattcaatttgccgtttctactccttgtaatgctaagggaaaaccatcgggatatagaatatttgaattcaataatggccggcttgcgctgacaccatcagagaggggctgtaccaaagtggacgtgaatgcaaatatacaggcattctgttacttaaggcccaatgggagagacacatcgacatcatcagatacagcccacattatggattcgagtgattacatgatactggcaaagtccaatgggtttattgaaatcataagcaactaccaatacaagataagaagtggcctacgattaacgccttcctttatccttagatgtaccccagaagactttgagtcaaatttcttcagtgactatatgattgccggtcttgaatatagccaaggtttgttatattgctgtatgtgctccggcagaatatacatttttgtaatgaaccttccatcggattatatccagttcaaaaacatgtacaatcctaaatttccagattgcttctttaacaagcatgaacacaccagtacaagtcattcttcagaggaagaaaaaatatttgaaggccgtacgcggtataccggacgatcatactccaagcacatttgctactttcttttacctatagaaccgtctcatctgagatcatcacctgtagtatcatcgttttgcaatatgtatcaaggcctgcccatatataggccttcgatgtatttacatatagaacgaggtatttctacattccacataaatccattggaccggttttgtttcatgactgtgtcaccacgatcgccactatttatgagaaagataatactgccattaacatacgttacgtttttaagcactttcattgatctgaagaataaaacacaaggaggaatatgtggtgaagtgctctcgtgggacaatatagcgcaacaaaacggattcgggtctttgtttagttggattagcaacaaattcacggtcgattctgatatcataaattccaccatctgggatgacattgtaagatattcaggaacagggatgttagattcaggtatcgtatggaaacaacgccaaggtcacgccaaagatgatatttacgatttatttcatacccaagatatgttagatagtagccgccggaactcttcattcagcgctaccagtaacgaaccaaggcctttaagtagaaggagaagagagtcttttcgaggtttaaccagggacgctttcagagagacaatggatgtaccgtgctcaacaaaatgggagttggattcattcattcgaggtctaagaagaaatacgtttatgatagattttgaaatcgtagagaaaatttctcatagaagtgggaatgatgggatgaatgaggatgatagcaatgaagatgaaagtgacgaaacaatgacctcatttctaacggacaattacaagaaaatggacattgtgtgcattgatcattttgtgacgttaagtgcatttcgacctagatattatgatgaaccgataataaagattgattcgctatcaaataaaaatggttctgagaatatgacttataaaagagctgagaaaaaccaaatagacgttgatgagcaaatggcaaagaatgagacagttcaatttcagcaggcgttaggtgatttatgttcctttaagaaactgttcatgttggatgattctttgtgttttatactggacacacacggggttttactaataaacagattcgaaatcgaaaacaccaagaatttactaaagaatgccaagggtacagtccggataataccttatgatttcggattgattaatgatgcgatagtggtaatcgatgatatatatgcggatccgaacaatgtttccactttgacgtttcatttagtagcaacatcaatggcaggagagataactgtatttaagggcgagtttcttaacgattccaggctagggaaattacagctatgcgactcactaaaattgaacagaaaagatcggtttgtggacaaacttgcattaattgattatgatggtggtctcaatacactgaagaggaaattcggctacgacaaaaagaactcgtacgcattcattgtgaaaaaagtcaaaaaagattaa

SEQ ID NO: 339 - DNA, 1035 bp, Saccharomyces pastorianus
atggacaaaggatcgttaccgtttgtcgttgacacggcgccttcaaacacccccgataaaattgtagcgccctccatagaggaagtggatagtaaccccagcgaattgagagcattaagaggccaaggtagatattttggagtggacgatgacgacgaagatgctatcaaggaagcagctccaaagtgtaataactgttcccaaagaggccatttgaaaagggactgtcctcatataatatgcacctattgcgggtcgatggatgatcactattcccaacactgtcccaaggcgatcaagtgctcgcaatgtgacgaagtaggccattacaggtctcagtgtccgcacaaatggaaaaaagtccaatgttctctttgtaagagtaaaaaacacttaaaggaaagatgtcccagtatatggagagcatatatcttaatagatgacagtcaaatggggaaacacaaagtccttccgtttcataccatatattgctataattgtggcgaaaagggtcacttcggtgacgattgcgaggaaaggaggtcgtcaagagtgcctaacgaggatgggagcgcattcactggttccaacctatcgaccgatctaaaacaagaatactaccagcatataaatagaaatttaaagaataacgaaaactaccaattcagtgggtctatatacgatgaagagcctctaccgaaaccttctcacaaaagacattcacagaacgatcattctcacagtaacagaaacaagcgtagagtatcgaatttccaccctcctccttaccaaaaacgcaatgtcattcagcccaccataagaggtgagaccctttcaattaataacaatagtagtaaccattcacggtaccaaaatcaaaacgtaaatgtctcctcgatatctgaaaatatgtacggttccagatataactcttccgcttatgttaataacaatgacattcccaactcttccaattataagaactataattcttaccaaccgtatagaagcgggactttaggaagaaggagataa

SEQ ID NO: 340 - DNA, 1785 bp, Saccharomyces pastorianus
atgttaagaaaccaaagttgcgccaggcttgtcaagcccatcgcgacccctaaaggaagactgctgagaagaccgtgctacaggcacgtctcgactggcagcagtgccaacgctggcggcggcgccggcagcgccgccagcagccagtggttcaagtactcggttattgcttcctccgctacgctgttcggctatctgttcgccaagaacctgtactctaaggagaccaagcaggacctgatcgagcggctggagatggtcaagaagatcgatccggagaactccacgttgaaattgtcctcgctggactcgccggactatcagcacgaccctgttaagatcgaccaggttgtcggagagctgaagcatctgctaggcgacgacccggaaaactactccgagtcgacctctgacctagacgctcactcggatacatacttcaacacgcatcatccgtcctcggagcagagacccaagatcattctgttccctcacactaccgaccaagtctcccaaatcctgaaaatatgccacgataacaacctcccagtggtgcccttctcgggcggaacctctcttgagggccatttcttgcccacaaggatcggcgacaccattaccgtggacctgtccaagtttatgaacggcatcgtcaagttcgacaaactggatctggacatcaccgtccaggccggtctaccgtgggaagatttgaacgacttcctgggcgaccacggcatgctgttcggctgtgaccctggtccaggtgcccaaattggtggttgtattgctaactcttgttctggtaccaacgcctaccgctacggcaccatgaaggagaacatcataaacatgaccgtggtactacctgacggtaccgttgtcaagaccaagaaaagacccagaaaatcgagtgccggttataatctcaacgggttgtttgtcggaagtgaggggactctgggcattgtcactgaggccactgtcaagtgtcacatcaagcccaaggcagaaaccgtcgctgttgtgtcctttgacactatcaaggatgccgctgcgtgcgcctctagtcttacccaaaacggtatacaactgaacgccatggaattgctggacgaaaacatgatgaaactgatcaacgcctctgaatccacagacaggtgcgactgggtcgagaaaccaacaatgtttttcaagattggcggcagatctacagacatcgtcaacgccgttgtggatgaagtcaaagctgttgcccaacaaaaccactgcaacagttttaactttgccaaagatgatgacgaaaaattggaactatgggaagccagaaaggtcgccttatggtccgtgttagacgccgacaagagtaaagataaatccgccaaagtatggaccaccgacgtggctgtcccactatctcagttcgacaaagtcattcatgaaaccaaaaaggacatgcaggcaagtaaattgatcaacgccatcgtcggtcatgcaggtgatggtaacttccatgccttcattgtatataggacccctgaagagcatgaagtgtgtagccaattggtccatagaatggtcaagagagccctggatgccgaaggtacatgcacaggtgagcatgggattggtatcggtaaaagagagtacttggtggaagaattaggtgaggctcctgttgatttgatgagaaaaatcaaactggccattgatccgaagagaatcatgaacccggacaagatttttaaaattgatcctaatgaacccgccaatgactataaatga

SEQ ID NO: 341 - DNA, 1587 bp, Saccharomyces pastorianus
atgtatcatggtgtggagaagctgaaactcaagtattcaaaagacgggtgtgtcacttgcaagatcaggaagaagcggtgctcggaggacaagcctgtatgcagggactgccgtcgcttgagtttcccatgcatctacatatcggaaccgatggataagcagtctttgaagaagataaaggctgacatacagcatcagttggtccataagaaaaaaaagcacgctgctgacggggaccagcgggcggccatggtcaattatgtgcggcgtagccatgaggatgaatacgataatcagatatacctgtcgaaaccgctggaggactgcatttctcagaagctagactcgatggggctgcagttatacaactactataggtcgcatctggctaacatcatttccattgcgcccatgaaccagaactactacttgaatattttcttgcccatggcacacgagaacgacggtatcctgttcgccattctcgcttggtcagcaaaccatttgtcgatatcttcctctaatgagttccgaaaggacgagatattcgtcaacctggcgaacaggtacacatttatgtcgctaacacatctcaaaaccagcgaggattcaaatgtttatgacaaactaagtttcttgtattcgctagcgcaaatcttgattctatgtggctcggagatttgccagggtgatgtgaagttctggaaaatactgctgaatattgggaaaaacttaatcgagaaccatgttggcaaggacatttcccatatactgaccacaaccacagaggaggcccctctagaggagagagttatcttccctaatttcaactctgttgttaaatactggctgatcgtgaacttcatataccacgacattttaaacttcaatactacatctttccccatcgaacagtatgagaaattcttccaaagagaacatacctcgctgcccaattcagtcagctttatagagccggcggactcgccgatcgaagaaatagaccctttgatcggaatcaacaagcctattcttttattactgggccaggtaacgaatttgacaagattcctacaaaccatggaacaggaggaaatgctggagcatggggataaaatacttaatttgcaagtcgagctctataaattacagccttcgctgatggcgttggactgtttagacgataataaacaattctgctatctagagttattcgaaataatgaaaatctccacgttgatgtttttccagataacactgttgaagatcgacaaaggttcgctggagttgcaaatactgctcaatagactaaattccaagttggacacggccattggaacttttttggaaggctcgttgtgcttcccacttttcatttacggtgcgtgtctcgggatcgacgacatagaaaagaaattagatttggaagccaaatttgatgatattttaaaacgatataaatgctataattttcaaaacgcaagattactaatacggaaaatatggcaaaatgaagcagagggaaacgacgaacataacttggtgcatatgattgatgagttggacttcaatattaatttcgcgtaa

SEQ ID NO: 342 - DNA, 594 bp, Saccharomyces pastorianus
atggaatcaagacggtatgggcccaacattatagttacaggaacaccagggtgtggtaagtcctccacatgcgagttattaaaggacaaactaaaaggctacaagtactacaacatctcggatttcgccaaggacaacgattgttttgaaggatacgacgaaggtcgtaaatcgcacattgtggatgaagacaagctgctagatacgctggagccactgttgagacaaggaaacagcattgtcgactggcatgtaaatgacgtgtttccagagaggctgatcgacctggtagtggttttgagatgcgataactccaagttatattcaagattgcacgcaagagggtaccacgactccaaaatcgaggaaaacctcgatgccgagatcatgggtgtggtcaagcaggatgctgtggattcgtacgaaccgcacatagtggtggagctacaaagcgatacgaaagaggacatagtgtccaacgtggctcgtatcactgcttgggagaagatgtggttggagcaacatccagacggtgtcacgaacgaataccaaggaggccgcagtgacgacgaagacgacgaggacgaagagtag

SEQ ID NO: 343 - DNA, 576 bp, Saccharomyces pastorianus
atggacaaattcggtttgcaagcattagtaccgctgctcaaacaagaagacaaagaactttcaagcacatatgaccattctatgactttaggagcggatttatcgtcgatgctatattcgttgggtattccaagagattcacaggaccatagagttctcgatactttccagtcaccgtgggcagagacatctagaagtgaagtggagccccgatttttcacaccggagtcctttaccaacattcccagcgtattacaatccaacgtaactccaccatgtttcaattccatccagaacgatcaacagcgtgtagccttgttccaagatgagactctattctttcttttttataaacatccaggtacagtcatccaggagctaacgtatttggaactcaggaaaaggaattggaggtaccacaagaccttaaaggcctggctcaccaaggacccaatgatggaacctatcgtgtctgttgatgggctaagcgaaagaggatcatacgtgttttttgatccgcaaagatgggagaaatgtcaaagagatttcttgttgttttataatgctattatgtaa

SEQ ID NO: 344 - DNA, 2268 bp, Saccharomyces pastorianus
atgcgcagatcactggctggcctcactttcacacctttacgtctctcgagtccaagatcgctgctattcatgtcatcctcattaccttcctctgccggtaagaaaccaaaacaggctactttggctaggttcttcacgtccatgaagaataagccgccaggaggctcttcgtctcctgagaaggccaccaaacacaagcttgaaagcggcataaacgagattaatagtgaaggagcgtctgctataaagaaactgaagcatgtgtcggccgtgcaaacgccggtggagccgtctgatatgagtagcaacagctcttctctaccgtcatctgctccctcttctggcggtgttgatgcgtcgcaaaaatctcgggagctcactctcaaggtcgaagaagaacagggcccgattgagaatgaccactactcatccaatatcccctattccgaagtctgtgaagtcttcaatgagatcgaagccacctcttctcgattggaaattattaggatatgttccgacttctttacaaagataatgaagcaatcatctaagaatttgatacctaccacatatctttttatcaataggttgggccccgattatgagcctggtttggaattgggccttggtgaaaatctcttaatgaaaacaatcagtgaatcctgcggcaaatcaatgagccaaattaaactaaaatacaaggaaatcggagatttgggtgaaatagctatgggcgcgagaaacgttcaacccacaatgtttaagccgaaacccttaactgtaggcgaggtctttaaaagtctacgaagtattgcaaagacccagggtaaagattcgcaactgagaaaagtcaagcttatcaaaagaatgttaaccgcatgccagggtgtagaggctaagtttttgattagatccttagaatcaaaactaagaataggtcttgctgaaaaaacagtgttgatatctttatccaaagcacttttacttcacggtggaaatgaggaaagttctcgtgttgatgatatccccatggacgccttggaaagtgctcaacaaaaaatcagagatgcattttgtcaagtaccaaattatgagctcgtcatcaattcatgcttggaacatggtatcatgaatctggaccaattttgtactttaagaccaggaattccattgaaaccgatgttggctaaacctacaaaggcaatcaatgaagttttagacagattccaaggtgaaacttttacgtcggaatacaaatacgacggggaaagggcccaagtacatttattagatgatggaacgatgagaatctactccagaaacggtgaaaatatgactgaaagatatccagaaatcagaatcacagatttcattcaagatatagatgccaccaagaatttgatcctagactgtgaagctgtggcttgggacaaagaacaagggaagattctaccatttcaagttttaagtacaaggaaacgtaaagacgtggaattgagtgatatcaaagtaaaagtctgtctctttgcatttgacatcctttgccataacggtgagagattgatcaataaatctttgcgagaaagaagagactgcttaactaaagttacaaaagttgttcctggggaattccaatacgccactcaaatagtaacagataatctcgatgaactgcagaagtttctcgacgaatctgtcaatcaatcatgcgaaggtctaatggtcaaaatgctcgaaggtcctgaatcacattatgaaccaagcaaaagatcaagaaattggctgaagctgaaaaaagattacttagaaggtatcggagattccttagatctttgcgtcataggggcatactatggcagaggtaaaagaacaggcacgtatggcgggttccttttaggctgttacaatcaagattcgggagaatttgaaacctgttgcaaaatcgggacaggattttctgatgaaatgttgcagcaacttcatgaaagattaacccctacgataatcgatggaccaaaggccacgtttgtttttgattccagtgctgaaccagacgtatggtttgaacccacgactctgtttgaagtactgacggcagatctttccctatcacccatttataaagctgggagtgcaactttcgataaaggtgtttcgttaagatttcctaggtttctacgtataagagaagataaaggtgtcgaagatgccacttcttcagaacaaattgtggaattgtacgaaaaccagtctcatatgcaaaattag

SEQ ID NO: 345 - DNA, 1386 bp, Saccharomyces pastorianus
atgtcaaagcagcttgttaggtctgcgaagaatctggtgaagggttactcttctacccaggtgttggtgagaaatgccacgtccaacgacaataatcaggtgtccaaagactcgttgatagaactggcagaaaagtcatatgacagtgtagattttttcgagatcatggatatgcttgacaagaggctgaacgataaggggaagtactggagacacatcgcgaaagcgctgactgtgttggactacctaattagatttggtagcgaaaactgtgttctttggtgtagagagaacttgtacatcatcaagacgttgaaggagttcaggcacgatgacgatgaaggcatagatcagggccaaattgtcagagttaaggctaaagaattgacgtcattgttgtccgacgaagagaggctaaacgaagaaaggaacatgaacatcaagggcaggaacaggggaggaagaaggagaagaggaaccaaccgtgacggcgaggatgatgatgatttgcagagagccattgatgccagcagaatgactgcggatgaagatgaaagaagaagaaagcaggacgaggactacgaaaccgccttgcaattgagtaaagaggaagaggagttaaagagattacaggacttacaaagaatgcaagcacaacagcaacagcaacaacccatgtactacgatatctttggcaatccaatcacgcccgaagagtatgcacagttccaactagaacaacaacaacaacaactacttcaactacaacaactacaacaacaacaacaacaacaacaacaacaacaacaaccaatgtactacgatatgttcggtaatcctatatcaccagaagagctagcacagtttcaacaagaacagcaacagcaactatacttgacctccttacaacagcaacaggctacatccaacaacccatttgccaagcccaaccaagaagcaagtccacagagacaagatgtaccatcaatgaacgcgtcatctatgccgcaacaacaacaacaaccacaacaggaggagccattaacacaaacaaggacaggtaatcaatcgatgacggacaaatacagtaaattaaacgaactattaggcacaggcacgggcattgacacatttggtaacttcggggatacccgtgttcccgctcaacataccaagacggggacattcattaactcccagggtacaggctataggcaagtttccaatgacccaaagcataatccattcctaaacagtcaatatacgggtctgccaagtaccaacgttgtaccaacacaaacaggctacggatttgggaaccaacaacagcaacaatctcaaactaacggctcaaatagccaaggctatgctttaattgatctttga

SEQ ID NO: 346 - DNA, 1524 bp, Saccharomyces pastorianus
atgagttccaccaataataatttcaacactaataataacagtaatacagacctcgatctggactggaaaactgcattgaatattcccaagaaggataccagaccacagaccgacgatgttttgaacacaaagggtaatacttttgaagatttttatttgaaaagagagctgttgatgggaatttttgaagccggttttgaaaagccatcccccattcaagaagaggctattcctgtagcaataaccggtagagacatattggcaagagctaagaatggtacaggtaagaccgccgcgtttgtcattccaacattagaaaaagtcaagccaaaattaaataaaatccaagcattgatcatggttcccacaagggaattagctctacaaacttcacaagtcgtccgtacattgggtaagcactgtggtatttcatgtatggttaccactggtggtaccaatttgagagatgacattttaagactaaatgaaacagttcatgttttggttggtactcctggtagagtgttggatttggcctcaaggaaagtagcagatctatctgattgctctttgttcatcatggatgaagctgataaaatgttatcccgtgattttaaaacaataattgaacaaatcttgtcttttttgccaccaactcaccaatctctattatttagtgctactttcccattgacagtcaaggagttcatggttaagcatttgcataaaccttatgaaattaatttaatggaagaattaactctaaagggtatcacccaatactatgccttcgtggaagaaagacaaaaactgcattgtttaaacactttattttccaagctacaaattaatcaagctatcattttctgtaactctactaaccgtgtagaattgctagccaagaagatcaccgatttaggttattcgtgttattattcccatgccaggatgaaacaacaagaaagaaacaaagtgttccacgagttccgtcaaggtaaagttcgtactttggtctgctcggatttattgactcgtggtattgatattcaagctgttaatgtcgttatcaattttgatttcccaaaaacagcagaaacttacctacatcgtattggtagatcaggtagatttggtcatttaggtttagcaatcaatttgatcaattggaatgatcgtttcaacctctacaagattgaacaagaattgggtactgaaatcgccgccattccagccacaattgataaatcattgtacgtggccgaagacgatgaaactgttcctgttccatttccaattgaacagcaaagctaccatcaacaaacaacacctcaacaacaattaccacctcagcaacaattcgctattcctccgcaacaacatcacccacaattcatggttcctcctccacaacatcatcaacaacaagcgtatcctccattacaaatgccccaacagcaagggtaccctccacagcaggaacatttcatggcaatgccaccaggacaaccacaaccccaattttaa

SEQ ID NO: 347 - DNA, 1287 bp, Saccharomyces pastorianus
atgcatcacaattctcaatctatgagcgctgcttatatcaggagccccgaggacgaaaacatggcccctatagctagtacaaaacataggactgggtccctgaggcatgttccatccacgcatcctagggtcgcacttagtgatgtgaccaacatagttgcgacgaactccaacaataatagcataagtaggacaaagaccgttccgatgaaggaacggtcggactctgtcacgagacttgagaagcagaggcctgcggtagaaggtgctacacagcggagagaaacagatcataatgacatgctgacggggaaagaacgagaagagaccgttgatgaggattacgaagagagcgaagacgatgagggagaagatcgagaacctttgttgttgcaacattatgccagcgataaagctgtctgggaacatgcatttaaaacctattatagaactacattggatcctaatgatgacgacgtgtacgatgtggtcatggttgctgaattgtcgaacgaaatatttttgtatatgaagcagctggaagaatcatacaaacccgatccgtactatatggatagacagccggaattaaggtggtcgtttcgaagtacgctgatagattggattgtgcaagttcatgaaaaattccaacttttaccggaaacattatatctttgcatcaatataatagacaggtatctatgcaaagaggttgttcccgtcaataggttccagctcgtaggtgctgcttccctgtttattgctgccaagtatgaagaaatcaactgccccacaatcaaagatttcgtatacatgtcagaaaattgctactcaagagaagacttgttggacgcagaaagaaccatattgaatggcttagaatttgaactgggatggcccggtccaatgtcatttttgcgaagaatcagcaaagctgatgactacgagcatgatacaagaacgctggctaagtatttgttggaatgcacgataatggacgaccgactgatctccgcgcaacccagttggttggctgcgggagcttattttctaagtaaagtgattttgggacagaaccaatggtccttggggcatgtttactattccaactacacccaagagcaagttcttccactcgccaccattatcttagaaaattgcaggtatgcatccaaacgtcataacgccatatggagaaaatattcttcgcgtcgttatttgcattcttcacaggtggtagccaaatggatagcattggctgaacacagagtagatcgatctaactaa

SEQ ID NO: 348 - DNA, 1812 bp, Saccharomyces pastorianus
atggctgctaaaagatcaaacagaagcaaggcccccagtagtagggatgagaccgatccatatggcttgaacgaagttgacgattttgcttcgaagagggaaaaagttttacttggaaattccactctcgctggcggtgctaacaatgatgacgatgacccattattagaagatgaggaggaagaagaagttttggctatggacgatgctgatgagtcttcagaagaagaagaagaagaagaagaagaagaaaaactggatggtgctgaagcttataagaaaatatttggcagaaacttagaaaccgatcagcctctagaagaagatgaagagcacggtatgctggataacgaaaatgcctggggctctacaaaaggcgaatactatggggctgatgacttggatgatgaagaagcagctaaagaaattgaaaaggaagcattacgacaacaaaagaagcatttggaagaactcaatatgaacgattatttagatgaggaagaagaagaagagtgggttaaaaatgctaaggaatttgacatgggtgaattcaagagctcgaccaaacagccagaaactaaggtttccattaaggatattctaaatatggatggcgaagcaagagacaactatttaaaaacaatgtttcctgaattttctccactttccaaagaatttacagcgctagcacccaagttagaagaattaaagaaatctgaggaaaacgaattctcaaaattaaaagtaattgctcttggaagctatctaggtacaatatcgtgctactatagcatcatgctgcatgagctccataataatgaagacttcacttccatgaagggacatccagtcatggaaaagattttaacaacaaaggagatttggaggcaagctagtgaactaccatccgattttgacatgattgaagaagaaggatccggaagcgagagaacgtcaaacattgaagcattcaatgaggataagttgaatgctttggagggcgatgaagtttctagcgtggaagaaagcgaacaagaacagaatgaagacggcgaagaggatgaaagcgacgatgacgtggatatcgatgattttgaagaatatgtagcccaatcgcgtgtaccttcaaaaccaaaatcatcagttacatctgaagctgatgattttgtagaatctgaaattgctgatgtagatgcgcaagacaaaaaggcccgtaggagaactttacgtttctacacatccaaaattgaccaacaggaaaataaaaaaatagacagatttaaaggtgatgatgatattccatataaagaacgtttatacgaaagacaacaacgtctgttggaagaggctcgtaaacgtggtgtgcatgacaataatggcgctgatctagacggtaaggagtatggcccagaagatgaagcagtttctaagagtatcaattcccaaggtgagaacgactattatcaacaaatacaaagagggaagcaagacaaaagagcctcccgtaaacaagctcataagaacgctgttattgctgcaagggaaggcaaattagctgaattggctgaaaacgttgcgggtgacggtaagcgtgctatcaattaccaaatcttgaagaacaagggtctaacgcctagaagaaacaaggacaacagaaactctcgtgtcaaaaagagaaagaagtaccaaaaagcgcaaaagaaactcaaatctgttcgtgctgtttattctggtggccaagctggtgtctatgaaggtgaaaagacaggtattaagaagggtttgacaagatctgtcaaattcaagaactga

SEQ ID NO: 349 - DNA, 1263 bp, Saccharomyces pastorianus
atgagtagcaataagggcaatgggcgcttgccgtcattaaaagattcttcatctaccggaggacctgcaaagccttcattaaagtttaagccaaaagcagtcgctagaaaatctaaggaggagagagaggctgccgcatctaaagtgaagctagaggagggccctaagagagacaagaaaaacttcaataacagtaacagtaaaagagtaaacggcaatggtggacaacaaaggcgaatggccaaatatttaaataacacacatgttatttccagtggtcccttagctgctgggaatttcgtcagtgagaagggtgatctcagaagagggttcatcaagtccgaaggaggcggatcatccctagtgcaaaaaggtttagagaccattgacaacggtgctgaaagttcggataacgaagcggaaggtgacagcaatggagacgtagcgtccaggtctaagaagaagtttaatatggggagggaatttgacgctcacaatcttatagaggttgaagaagaagaggatagtggaaaaggcagtgacgtggatatggatgacgaagcatgggggactaaaaagattgaacagttattccctgtcagacccattcgtgtaagacacgaagaagtggacactgttaaaagagaaatacaggaagctctttcagagaagccaacccgtgagcccaccccaggtgtgaaaatagaatcttctaacactgaattacaatcctatttggaagagagggaaaagcaggtcaatggaaaactaggagatcttgaacttcaaaaagactttcagtcggtcgacgaaaaggaaagtgctgctgaattagaactgctaaaggcagaccaccagcatatattaaagaagctgaaaaaaatggacagcaaacccgaaagattcatggtattccagttacctaccaggctaccaaattttgaaagaccggccgtaaagacagaggaagttgaagtggaagcacaagccagtgatgctacaaaaaagaagaagaccatcaagaaaaagagcacaacaaacgtcataccgagcgatgaattagctggtaatatcggagccatcagggtccacaaatcggggaaactttctgtgaaaattggaaacgtggtcatggatattggcaaaggcgccgaaaccacatttttacaagacgttgtagcattgagtatggcagacgattcatcatcagctgaacttctaggccgtatagacggtaaaatagtagtcacgcctaaaatctaa

SEQ ID NO: 350 - DNA, 1338 bp, Saccharomyces pastorianus
atgtccagagacgctccaattaaggccgacaaggattatacccagattataagggaagagttccccaagattgattcaattgctcataatgactatagctctgcactagatcaattattgatcttggagaagaaaaccagacaggcttcggatttagcatcctcgaaggaagtcctcgctaagatcgtggacctgttagcatcgcagagtaaatgggacgatctgaacgagcaactgactctcctatctaagaaacacggccaacttaaactgtccatccagtatatgatacagaagattatggaatatttgagagactcgaaaaccctcgacttggacaccaggattaaagttattgaaactattagagtggttactgagaataagatatttgttgaggtggaaagagctagagtaactagggatttggtggaaatcaagaggaaagaaggtaagattgatgaggcagcagacaccttgtgtgaattgcaagtcgaaacttacggttccatggaaatgtcagaaaaaatcgaatttatattagagcaaatggaattgagtatattgaagggtgactactcccaagctacggtactttcgaggaaaatcttaaaaaaaaccttcaagaatcctaaatacgaatcattgaagctggagtactataaccttttaatcaagattggtttgcacaagaaggattacttagaagttgcccaatatttgcaagaaatataccaaacggatgttattagagtagatgagaccaagtggaaaccagttttatctcatatcgtgtatttcttggttctttcaccttatggtaatttacaaaatgatttgattcacaaaacgcaaaatgataataatttgaagaaactggaaagtcaagaatctctaataaaattgttcaccacacacgaattgatgagatggccaattgttcaaaaaacttacgaacccgttttgaataaggatgatttggcattcggtggagaagccaacaagcatcactgggacgatctacaaaagagagtcattgaacacaatttgagagttatttccgagtactattccagaatcactctatcgagattgaacgaattgctggacttgacagaaactcaaactgaaacttacatcagtgatttagtcaaccaaggtatcatatatgcaaaagttaatagaccagccaagattgtcaattttgaaaaacccaaaaattcaagtcaattactgaatgagtggtcacataacgttgacgaactattagaacatatagaaacaatagggcatttgattacaaaggaagaaattatgcatggtttacaagctaaataa

SEQ ID NO: 351 - DNA, 1473 bp, Saccharomyces pastorianus
atgatactagatccattgtctccaaatattgaaaatcattcccatgatgaaatcatcgacttttgggagaaaattgagtccattgccaatataccaaaagataaactggatgagtcccacgtcaattcaagccttgtcgcgtacctcaagtttgccacggattcctataaagtgtttatcaataccgatcgagatctctatcgaatgtcactgattttattggaatcgcctctatttgaatttgaaaaagagttttgcctgagcaaattgcaatcactactcaatatagacctactggaaatgaatatgaagtttattatagtttatgtccttctctgcgaggcaaagaaaaacgtccactctttagaaattatgcttaaattccaagggtttaccgtattttataacgctttatacactcaatttgcttatttgagcaagtatggagaagaaaagagaactgttaataaacagcgatataaaactgatgctgctaacacaattacgcctttggactgtttggtcccaagtttgactgacattgatttgggtattatagatgaaatgaagcaaatttctaccgttttgatggatttgttatttcaaatcttaaagtattgtaaatgcgttattgccaaccttcaaattgttgatgatttctttgtttactttttgatggaaacgataaggtctgatattatggatgatatgttcaacaatgcacaatttaagctgttgttggcattaaatgaacaatatatgatgtttgccaaagaatacgaaatcgaaaataaagtttataagtatttgatcaacgaatcagtgtccaaatgcttcagtgagttgctgttattaaaatttaatagagtatcggatcctcctttacaaatcatgatgtgcaaaatcatttatctaatcttgacaccaaggagcgatcatgctccaataagttttttttatacaaatgatttgcacgttcttactgatgtattaataagagagctccagaacataagtgaagatgaggagatattgagaaataccctcttaagggtccttatcccattattaaaaaacacacaattatctaaaactcattatagaaaggacgatttgaataaattattgcagtatctgtcaactctagataatatatgcgctgacagtccggtactacacgaacacctagtcacagtaaggctatcacaaaagtgtcttcaacaaattccttggctagaggatccgcctacgcctccgaacgaaaattcaccggcttctagtaatacgactagtagagactccagtatatttactctaggagggtctgataaccaaaatgtcttgacccgtaaaggccatctttatagtaatcgtggactagacgtctctgcagaatctttaactaaaagaaaagctagagctccaccaccaccaccaccaccaccatcaagaaaatgtggaactctgaaatga

SEQ ID NO: 352 - DNA, 2073 bp, Saccharomyces pastorianus
atgaacgttttagtctacaatgggccgggaactacaccaggatcagttaaacatgccgtagaaagtctgcgtgactttttggaaccttattatgctgtgagtacggtcaatgtcaaagttttacagacagaaccatggatgacgaaaacctcggccgtcgtgtttccaggtggtgcagatcttccgtatgttcaggcatgtcaacccattattcctcgattgaagcattttgttagccaacaaggtggtgtattcatcggattttgtgcaggaggttatttcggtactagtcgtgttgaatttgctcaaggtgaccccacaatggaagtttctggtagtagggatctacggttttttcctgggacaggtaggggaccagcgtacagcggatttcagtataacagtgaagctggtgcgcgtgcagtggggttaactcttcctgacggctcacatttctcgacgtatttcaatggaggatctgttttcgttgatgcagataagtttgacaatgtcgaagtcttggcaacgtatacagaccacccagatgttccttcttctgattcaggtgatggccaaagtgaacgcccagctgctgtagtactctgtaacgttggaaaagggaaagtgttgttgaccggccctcatcctgagttcaatgttcgtttcatgaagaaatcaacagacaaacatttccttgaggctgtcgttgagaagttgcaagcccaagaaaatgatagattaaagtttatgagaacgattctcaccaagacagggctgaactgtaataacgattttgattatgtaagggctccaaatttgacaccattgtttattgcaagtgcccctggtaaacgaaactttttggaagagatggaaagcaatttggtacatcatggtgcgcatgaaaatgatgttgaacagtactcagaattaagtgccgagagtgattctttccacttttataaaggttacatatcctcttacgatgcggctagtacctctttacttcataaagagccagacgaggtttctaagacactaatattccccggtgaaaatgaggatgttccaccatcccggtatacgcccaattttgatatgtctgagtactttagacatttgaattcgcaaaatacactaggtactttacttctgtatggtgaggttattacgtcaacaagtaccgtgttgaatagtaacaagtccctattaaattcggtacccgaaaacaccttactccatgtaggcaccattcaagtctctggtcgtgggagaggtggtaacacttggatcaaccctaaaggtgtttgcgcttcaacagcagtggtcaccatgccactccaatcgccagtaactaatagaaatatatctgttgttttcgtccagtatctttccatgcttgcttattgtaaggccattctttcttacgcacctgggttttcggatattcctgttaggatcaaatggcctaacgatttatacgccttaagtcccaattactataaacgtaaaggtttgaaattggtgaatactggttttgatcacacaaagctgcccctaggtgatgtagagcctgcgtacctcaaaatatcaggtttgcttgttaatacgcactttataaacaacaaatacactttgctagttggttgtggtataaatttaactagcgatggtcctacaacttctctacaatcctggattgatattttaaatgaggagcgtcaacaattcaatcttgatttgttgccagctattaaggcagaaaaactacaagctctttatatgaataaccttgaggtcatattaaagcaatttattaattatggtgccgcggaaatactgccaagttattatgatctgtggttacacagtaaccaaatagtcacattaccggatcacggcaatacccaagccatgattactggtattacagaagactacggtttattgattgcaaatgaattagtaagcggtagttccactcagttttcaggaaatgtttacaatcttcaacctgacggcaatacatttgatatcttcaaaagtttgattgccaaaaaagttcaagcttaa

SEQ ID NO: 353 - DNA, 5118 bp, Saccharomyces pastorianus
atggtaggacaacagtattctagtgccccattgcgcacagtgaaagaagtccaattcggtcttttttcgcccgaagaagttagagcaatcagtgtggccaaaataagatttccagagacaatggatgaaacccaaacgagagccaaaattggtgggttgaatgaccccagattaggctctatcgatcgtaacttgaagtgtcaaacttgtcaagagggtatgaatgaatgtcccggtcatttcggtcacatcgatctagctaaacctgtttttcatgttgggtttattgccaaaatcaagaaggtttgtgaatgtgtctgtatgcactgtggtaaactactacttgatgaacataatgaactaatgagacaggctttggcgatcaaggacaccaagaaaagatttggtgcaatctggactttatgtaagactaagatggtttgcgaaacagacgtcccttcagaaaacgaccctactcagcttgtttcaagaggcggttgtggtaacactcagcctaccgttcgtaaggatgggttgaaactggttggtagctggaaaaaagatagagccacaggagatgccgatgaaccagaattaagagttttaagcacagaagaaatcttaaatatattcaaacatatctctgcaaaagactcctccagtttagggttcaacgaagtcttttctcgtccagaatggatgattttaacatgtcttcctgttccgccaccaccggttcgaccatccatttcctttaatgaatctcaaagaggtgaggatgatttaacatttaaactggctgatattttgaaggcaaatattagtttggaaactctagaacataacggtgccccacatcatgctattgaagaagcagaaagtttactacaatttcatgtggccacctatatggataatgatattgctggccaaccacaagctttacaaaaatccggtcgtcctgtcaaatctattcgtgctcgtttaaagggtaaagaaggtcgtattagaggtaaccttatgggtaagcgtgtagatttttcagcgaggacagtcatttctggtgatcctaatttggaactagaccaagtcggtgttccaaaatccatcgcgaagaccttgacgtacccagaagtggttactccttataacatagaccgtctgacacagcttgtccgtaatgggccaaatgagcatcctggtgcaaagtatgttatccgtgatagcggagaccgtatagatttaagatacagtaaaagagccggtgacatccagctacagtacggttggaaagtggagcgtcatatcatggataatgatccagttcttttcaaccgtcaaccttcgcttcataaaatgtctatgatggctcacagagtgaaagttattccatattctacattcagattgaatttgtccgtcacttctccatataatgccgattttgatggtgatgaaatgaatcttcacgttcctcaatctgaggagacaagagcggagctttcccaattatgtgctgttcccttacaaatcgtgtcacctcaatctaacaaaccttgtatgggtattgtgcaagatacgctatgtggtattcgtaaactaacattaagagatacatttatagaatttgatcaagttttgaatatgctatattgggtcccggattgggatggtgttattcctacacctgccattatcaaaccgaaacctttatggtcaggtaaacagatcatgtctgtagccattccaaatggtatccatttacaacgttttgatgaaggtacaacgttactttctccaaaggataacggtatgcttatcattgatggccaaatcgtttttggtgttgttgaaaagaagaccgttggatcttccaatggtggtctaatccacgttgttacaagggaaaagggaccacaagtatgcgccaaactatttggtaatatacagaaagttgttaacttttggttgttacacaatgggttttcaacgggtattggggataccatcgctgatggaccaacaatgagagaaatcacagaaacgatcgcagaggccaagaagaaggtttttgatgttacgaaagaagctcaggcaaacttattaacggctaaacatggtatgactcttcgtgaatcctttgaagacaatgttgttcgtttcttaaatgaagcaagagacaaagccggtcgtttggctgaagtcaatttgaaagatttgaacaatgtgaaacaaatggttatggcaggttccaagggttcatttattaatatcgcacaaatgtcagcttgtgtagggcagcaatctgttgaaggtaaacgtattgcctatgggttcgttgatcgtaccttaccacatttctctaaagatgattattctccagagtccaagggttttgttgaaaactcttatttaagaggtttaaccccacaagagtttttcttccatgcaatgggtggtcgtgaaggtcttatcgatactgctgttaaaacagctgaaacaggttatattcaacgtcgtttagtcaaagctctagaagatatcatggttcattacgacaacaccacaagaaactctttgggtaacgttattcaatttatctatggtgaagatggtatggatgcctcacatatagaaaaacaatcactggatacaatcggtgggtcagatgtcgcttttgaaaagagatacaggattgatttattgaacccagaccacatcctggatccttcattactggaatctgggtctgaaattcttggtgatttgaaacttcaagttttattggacgaagagtacaagcaattagtcaaagaccgtagttttttaagacatatatttgttgatggtgaagcaaactggccattgcccgtcaacataaggcgtattatccagaatgctcaacaaactttccacattgaccataccaaaccatctgacttaacgattaaagatattgttattggcgtgaaagatttacaagagaacttactagtgttacgtggtaaaaacgaaatcatacaaaatgcccaacaagacgcagttactttgttctgctgcttgttacgttctcgtctggcttctcgtagagtcatagaggaatacaaactaacaaagcaggctttcgaatgggtgttaagtaatatcgaagcacaatttctccgttctgttgttcatcctggtgaaatggttggtgttcttgcagctcaatctatcggtgagccagctacacaaatgacactgaatactttccatttcgctggtgtggcttccaagaaagtcacttccggtgtcccgcgtttaaaggaaattttaaacgtggccaagaacatgaaaactccttccttaactgtttaccttgagcctggtcacgctgctgatcaagaaaaagcaaagtttattagatctgctattgaacacactactttgaagagtgttacgattgcttcagaaatttattatgatcctgatccacgctccacagttattccagaagatgaagaaatcattcaacttcatttctctctgctggatgatgaagccgaacaatccttcgaccaacaatcaccttggttactacgtctagaattagatcgtgcggcaatgaacgataaagacttaactatgggacaagtaggtgagagaatcaaacaaactttcaaaaacgatttgtttgttatctggtctgaagataatgatgagaaattgatcattcgttgtcgtgtggttcgtccgaaatcattagatgccgagaccgaggcagaagaagatcatatgcttaagaaaattgagaatactatgttagaaaacattacattacgtggtgttgaaaatattgagcgtgttgttatgatgaagtatgatcgtaaagtgccaagtccaacaggtgaatatattaaggaacctgaatgggtattagaaacagacggtgtcaacttatctgaagtcatgactgttcctggtatagacccaactagaatatacaccaactcctttattgatattatggaagttttgggtattgaagctggtcgtgcggctttgtataaagaagtttacaacgttattgcatctgatggttcttatgttaactaccgtcacatggccttattggttgatgttatgactacccagggtggtttaacttctgttactcgtcatggtttcaatagatctaataccggtgccttgatgagatgttcattcgaagaaaccgtcgaaattctgtttgaagccggtgcctctgccgaattagatgattgtcgtggtgtttccgaaaatgttattctcggtcaaatggctccaatcggtactggtgcgtttgatgtcatgattgatgaagaatcattggttaaatacatgccagagcaaaagattactgagatcgaagatggccaagatggtggcgctactccatatagcaatgaaagtggtttagttaatgccgatcttgacgttaaggatgaattaatgttttcacctctagtcgattcgggttcgaacgatgctatggcaggaggatttacagcttacggtggtgcggactacggtgaagccacatctccgtttggagcttatggtgaagcacctacatcccctggattcggagtctcttcaccaggattctccccaacctctccaacatattcccctacctctccagcatactctcccacatcgccatcgtactcgcctacatctccatcgtactcgccaacatcgccatcatattcaccaacatcaccatcttactctccaacatcaccatcctactctcctacatcaccaagttacagcccaacatctccgtcttattctcctacatctccatcatactctcctacatctccaagttatagcccaacatctccaagctatagccctacatccccagcttattccccaacctcaccaagttatagtcctacttcaccttcatactcaccaacatcaccatcatattcaccaacatcgccttcctactcccctacttctcctaactatagccctacttcaccttcttattccccaacatctccaggctacagcccaggatctcctgcatattctccaaagcaagacgaacaaaagcataatgaaaatgaaaattccaaatga

SEQ ID NO: 354 - DNA, 546 bp, Saccharomyces pastorianus
atgggtctttatgcttctaagttgttcagcaaccttttcggtaacaaggaaatgcgtattctaatggtgggtctagatggtgctggtaagaccaccgttttatacaagttgaaactgggtgaagtcatcactaccattcctacaattgggttcaatgtcgaaactgtccaatataagaacatcgcattcaccgtctgggatgtcggtggacaagacagaattagatctctgtggaggcactattacagaaacaccgagggtgtcattttcgttgtcgattctaacgatagatcccgtgtcggtgaagccagagaagtcatgcaaagaatgctgaacgaagatgaattgagaaatgccgtctggttagttttcgctaacaagcaagatttgccagaagccatgtccgctgctgaaatcaccgaaaaattaggtttgcattccatcagaaaccgtccatggttcatccaatccacttgtgctacctcgggtgaaggtttgtatgaaggtctggaatggttaagtaacaacttaaagaatcaatcctga

SEQ ID NO: 355 - DNA, 609 bp, Saccharomyces pastorianus
atggtcgaagaaactactgatttcagtcaattcgaagaagataaaaacaacgatcaatacaaagtctccgccaagaaaaccgttgatgaatataaaaacttggatgcggaagatgaatccttagccaaatggaaagaatctttaggcttaggctctgatgttttaccgttagaattcgctggtgacaaaaggaaagtggtggttcagaaaattcaactattagtcaacacagaaccacagcctattacatttgaccttaccaatgaaaagacaatcaaagaattggcatctaaaagatataagatcaaagaaaactctatttacaagttgaagattgtcttcaaagttcaacatgaaattatcacagggttacgatatgtacagtacatcaagaaagcgggcattgccgttgacaagatagatgatcatttgggatcgtatgctcctaatacgaaaactaaaccattctatgaggtagagctaccagaaagcgaagctcctagtgggtttttagcaagaggtaactacagtgctgtatcaagatttattgatgacgataaaacaaaccatttgactttgaactggggggttgaaattgttaagaaatga

SEQ ID NO: 356 - DNA, 78 bp, Saccharomyces pastorianus; identical to SEQ ID NO: 334

SEQ ID NO: 357 - DNA, 1326 bp, Saccharomyces pastorianus
atggaggataccaattccagcaaagaagtgtattctaatacattgtcaccgacatcttctagaattacagaccaaaaacaaattaatttggatgtggacctagagaaaaaccaaactgcgaaaagctcagattcgctggagtccctgccgaatgccaagatacgtaatcctaaacacggtgagggttcaccgttagactatccaaaactaaacacatacacgtttgtaccgactacagtgccaccatatgtgctcgaggtgcagtttgacaagctgaggtggcagggcaagggcccagttaatggaagtgtcaccgacgataatgaaattccaaaagaatttaaatgggggcaatttgcgtctaacattggcaatcacgccgcatactccagagaccaaaacgagaatcatagccacctcctgaaaccatccgcccaggacaactattctctgacatcatcaacgtcttcgaaaaatgctgctcgaagagaaattttgagtgatatggccagtgaatggggtggtgaagaacgtttagaaggggtattgcattctgaaataggtgcgaacttggaattcaagaccatggaagagagaaaggaatggttacaatatatcgaaaaggtaaaagatttttattacagcgataagaaaaagaatacagaatcacctgattccgcccacaataaaagttacaaatcagattgggtaaatgatttaagtaaagagagagaaaagtggcggagattaaaacagaagaagctacaacaatggagaccacccctgacgtcattattactagatagtcaacacttagtcttgggtttgagaatattcatcggtattttgtcgtgtgcctcacttgcgttagcgatcaagattttccaaaactcgaggtcgaataataccatcagtgaaagtaaaatcggacaacaagcaagtacaataatggccatctgcgtaaatgcaattgcgattgcgtatattatttatattgcccatgatgaatttgccggtaaacctgttgggctgagaaatccattgagcaaactgaaattgattttgttggatttacttttcataattttttcaagtgctaatgtagcattggcattcaacactcgttttgacaaagaatgggtttgtacttcgattcgcaggtcaaatggaagcacatacggatacccaaaaataccgcatatctgtagaaaacaggaggctttatcttcttttctatttgttgccttgtttatgtgggtgataaccttttccattagtattgttagagtggtggaaaaggttagttcaatcaccaacagaaactaa

SEQ ID NO: 358 - DNA, 2448 bp, Saccharomyces pastorianus
atgtccgaaactctacctagatcagatgatttagaggccacttggaactttatagagccaggtatcaaccagatcctaggaaacgaaaaaaatcaagcatcaacctctaagaaggtgcagaaaattctctctccaacgatgtacatggaagtttataccgcaatttataactattgtgttaacaagtcgcgttcttctggtcattttagcactgatagtagaacaggccaatcgacaatcttggtaggaagtgaaatttatgagaagttgaagaactatttgaaaagttacattttgaatttcaagaaaaccgattcagagacttttttacaattttacgttaagcgttggaaaagatttacaataggtgccatctttttaaaccatgccttcgattacatgaatagatattgggtccaaaaggaaagaagtgatggtaaaagacatattttcgatgttaacactttatgcttaatgacgtggaaagaagtcatgttcgatcctaataatgatattttagttaacgagctattagaacaaattaccctggaaagagaaggacagattattcagagaaacaatatcagtacagccataaagtccttagttgcattaggtattgacccacaagatttgaaaaagctaaatttgaacgtctatatccaagttttcgagaaaccattcttaaaaaagacacaagagtactacacccaatatacgaatgactatttggaaagacattcggtcactgagtatatttttgaggcacatgaaataatcaagcgtgaagaaaaggccatgacaatatattgggatgaccatactaaaaaaccactttccatggcgttaaacaaagttttgattacagaccacattgaaaagcttgaaaacgagttcattgtcctactcgatgcaagagatatcgagaaaatcacttcattgtatgcactaatacgcagagatttcacactaattccaagaatggctacagtctttgaaaactatgttaaaaagacaggtgaagatgaaatttctggcctattggccatgcataagcataacattatgaaaagcgaaagtgcaaaccaaaaaaaattggcattaatgactgtgcattcgctttctcccaaggactatattaagaaattactagaagtccatgacatattttccaatatctttaacgaaagctttcccgatgatatacctttagccaaagcattggataacgcctgtggttcgttcataaacatcaacgagtttgcgttacctgcagggtccccaaagagcgctacatcaaagacctctgaaatgcttgctaagtatagtgacatgctattaaagaaagctaccaagcctgaagtggcaagcgatatgtcagatgaagatattataacgatattcaaatatttgactgataaagacgcttttgaaactcattatagaaggctttttgccaagagactgatccatggcacttccacgtccgcagaagacgaggaaagcatcattcaaagattgcaagctgcaaacagtatggaatacactggcaaaataaccaagatgttccaagatattagactttctaaaatcttagaggaagattttgctgtgactctgaagaatgagcccgactactccaaatctaaatatccagacctacaaccatttgtattggcggagaacatgtggcctttttcatatcaagaagtagaattcaaattacctaaggagctagtaccatctcatgaaaagctaaaagactcctatagccaaaagcataatggtagagttttgaagtggttgtggccattatgtcgtggggaaataaaggctgacatcggaaaaccaggtagagttccgtttaatttcactgttacattgtttcaaatggcaattttactgctatacaacgatgccgaaacattgacattagaaaacatacaagacggcacaagcttgagcattcaacacattgctgcagcaatgataccgttcatcaagttcaaactgattcaacaagttcctccagggctagactcactagtgaaaccagaaacccaatttaagatatcacgtccttataaggcactaaagaccaatataaatttcgccagcggggtcaagaacgatattttacaaaccctatcaggcggaggacacgacaatcatggcaataagttgggaaacaaacgcttgacagaagacgaaaggatcgaaaaggagctgaacacagaaagacaaattttcttggaagcatgtattgtgagaataatgaaagccaagaggaaccttccacatacaacgcttgtcaacgaatgcattgcgcaatcacaccaaagatttaacgcaaaggtttccatgatcaagagagccattgacagtctaatccaaaagggatacctgcaaaggggagacgatggggaatcttacgcgtaccttgcttaa

SEQ ID NO: 359 - DNA, 261 bp, Saccharomyces pastorianus
atgttaagtcgttgcatctcccgtaatgccaagctgccaacaaacttcagaatagcctctcgcttatactcggatggccctctaggtggttccggccccggtggggttcaggacattttcatcaagagggaacgtgccaaggaagatttctttgccaggcaacaagagagagaacaattagctcacgtcaaggaacaattaaaagaacacaaaaagaaactagaacatttagagaacaagattaataatctttcaaagtga

SEQ ID NO: 360 - DNA, 2511 bp, Saccharomyces pastorianus
atgggtgaagaacataaaccgcttttggacgcctccggtactgatcctcatgaagaggataaaaccgccaccgccattctaagaagaaagaagaaggataacatgcttttggtcgacgatgctatcaatgacgacaattctgtcattgccatcaactccaacactatggacaaactggaattgttccgtggtgacaccgttcttgttaaggggaagaagagaaaggacacggtgttaatcgtcttgatcgatgacgaattggaagacggtgcatgtagaatcaaccgtgtggttcgtaacaacttacgcatcagactgggtgatctagtcacaatccatccttgcccagacatcaagtacgccaccagaatttccgtactaccaattgctgataccattgaaggtattactggtaatcttttcgatgttttcttgaagccttacttcgtggaagcttacagaccagtgagaaaaggcgaccatttcgttgtgagaggtggtatgagacaagtcgaattcaaagtcgtggatgtcgaacctgaagaatatgccgttgttgctcaagataccattatccactgggaaggtgagccaatcaacagagaagacgaggaaaacaacatgaacgaagttggttacgatgacatcggtggttgccgtaaacaaatggctcaaatcagagaaatggttgaattgccattgagacatcctcaattgttcaaagccattggtatcaagccaccaagaggtgtcttgatgtacggtccaccgggtacaggtaagactttaatggcaagagccgtagctaatgaaactggtgcctttttcttcttgattaatggtccagaagtcatgtcgaagatggctggtgagtctgaatcgaatttaagaaaggcctttgaagaagctgagaagaatgcaccagctattattttcatcgatgaaatcgattctatcgctcctaagagagacaagaccaatggtgaagtcgaaagaagagttgtttctcaattgttgactttaatggacggtatgaaggcaagatctaatgtcgttgttattgctgcgacgaacagaccaaactccattgatcctgccttgagaagattcggtagattcgatcgtgaagtggacattggtatccccgacgctacaggtagactggaggtcctgcgtatccacaccaagaacatgaaattggccgatgacgttgacttggaagcgctggcagcagaaacacatggttatgttggtgctgatatcgcctccttgtgttctgaagctgctatgcaacaaattcgtgaaaaaatggacttgatagatttagatgaagatgaaattgatgcagaagtacttgattctttaggagtcaccatggacaatttcagattcgctctaggtaactctaacccatccgcattgcgtgaaaccgttgtagaaagcgtcaacgtcacttgggatgatgttggtggtttggacgaaatcaaggaagaattgaaggaaactgtcgaatacccagtcttacatccagatcaatacaccaaattcggtttatctccatcaaagggtgtgttgttttacggaccaccaggtacaggtaaaactttgttggctaaagcagtagccaccgaagtctctgccaacttcatttcagttaaaggtccagaattactaagtatgtggtacggtgaatcagaatctaatattcgtgatattttcgataaggcaagagccgctgcgccaactgtcgttttcttggatgaattagattccattgctaaggcaaggggtggttctgtaggtgatgctggcggtgcttctgatagagttgttaatcaattattgacagaaatggatggtatgaacgctaagaagaatgttttcgttattggtgccaccaacaggccagaccaaatcgatcctgctatcttgagacctggaagattagatcaattaatttatgttccattaccagatgaaaatgctagattgtctatcctaaacgcacaattaagaaaaactccattagaaccaggtatggaattaactgcgattgccaaggctacccaaggtttctctggtgcagatttattatatattgtacagagggctgctaaatatgccatcaaggattctatcgaagctcacagacaacgtgaagctgaaaaggaagtaaaggcagaaggtgaagatgtggaaatgacagatgagggggcaaaggctgaacaagaagatcaagaaccagatccagttccatatatcactaaggaacatttttcagaagctatgaagaccgccaagcgttctgtctcagatgccgaactacgtcgttatgaagcatactctcaacaaatgaaagcatctagaggtcagttcagtaatttcaacttcaacgatgctccattaggtactactggcacagacaatgctaatgctaataacggtgctccaagcgggtcaggtgcagcatttggctctaacgcggaagaagatgatgatttgtatagttaa

SEQ ID NO: 361 - DNA, 420 bp, Saccharomyces pastorianus
atgtgttgctactgtctttgctgcacagtgtccgacttcatactatatgtcattgcgcttttcttccctcccatcgcagtcctatttcgttccggtctgttctcatctgatttcctactgaatgtactgttgacgctactggggttcttgcccggtatgctgcacgcattctactacatcacgattacaagccccataaggaacgccgactacgtctactattaccaacaaggctgggtggatagcgaaaggaacgaaccctcgagccgtcctcaaaccaccgacgcctcccagcaccgccatcagcagggaagctccactagaaacgtttatccaaatatccaaactcctctgctgcaagccgcacctcacgataacaaacagtctactgtggaatctccccctccgtatataccatga

SEQ ID NO: 362 - DNA, 2364 bp, Saccharomyces pastorianus
atggatttgtttattgaaagaaaaataaacagtttattacaatttttatttgtttcccgacaggattttttgaagaatttgagattttggaacaacaataataacaacttttcgatttacttattaatttttggagtagtagtatttttttataaaaaaccagatcatttgaatcgtatcgttgacagcatcagtgaaatgacaacgaatttcagagatagtaatagtctcagccgttggttgcccagaagcaagttcacccacttggacgaagaagttctgaagaggggtggcttcattgctggtttggttaatgacggtaacacctgcttcatgaattccgtattacaatcattggcatcatcccgagaattgatggatttcttggataacaacgtcatcaagacctatgaagaactagaagaaaaagcagaaaataaagaagaaagcggatacgaacacgaagacgagcaagatgctctcaagaagaagtctgccaagaacggtaaagtttacggtaagcacaagaaaaagctaaacaggaaattaagctccagagaggaagaagaagagaaccaagagccggatgtcacgtttagcgtcactttaagggatctattagctgctttgaatgataagtattatagagacaaaccatattttaagaccaataggttattgaaagcaatgtccaaatctccaagaaaaaatatgcttttaggctacgatcaagaagatgcacaagagttttttcaaaatcttttagctgaattggaaaataacatcaaatcaatgaactctgaaaagcttgatactaccccaatcgctaaaactgagttaccagctgatgctttggtgggtcaaaataatcttgagaaagtcggcactgtttatattccgactgaacaaattgatcccaattctattttacacgacaaatcgatcaaaaatttcacacctcataaattgattactcctttagatggtattaccgcagaaagaattggatgtttacaatgtggtgaaaacggtggcataagatattccgtattttcagggttaagtttaaatttacctaacgagaatattggttgcaccttgaagttgtctcagttgctaagcgattggagtaaacccgaaatcatcgaaggcgtggaatgtaatcgttgtgccctcgctgcagctcattctcatttattaggtcagctgaaagaattcaaacagaaatcagagggttctattccagaaaaattgattagtgctgtccaaaacagggtacaacaaattgaaggggtactcgccaaaccagttattgatgacgaagattatgagaagttgcacacagccaacatggtccgtaaatgttccaaatctaaacaaatcttaatatcaagaccaccaccattattgtctattcatatcaatagatctgtcttcgatccaagaacctacacaatcagaaaaaacaattccaaagtactatttaaatcaaggttaaaccttgccccatggtgttgcgatatcgacgaaatcaatttagatgctcgattaccaatgtcaaagaaggaaaaggctatgcaacaagattccagtgaagatgaaaacattggtggcgagtactattccaaattgcatgagcgcttcgaacaagaatttgaggatagtgaagaagaaagagattacgatgacggagaagaaaaccagacctctcactacaatgacaacagggatactaataattatgacccactaaatggtgaagctgatggattatcgtcagatgatgaggatgaatacatcgaagaaaccgacgccttaggcaacaccattagaaagaggaatatagagcatgccaatgctgaagaagaacatgaacatgtagtagaagacaatggggaagggatgaacaacaccgacaacgtaaaccacagcgagctaaaggttaatgttgaggaccaattagactcatcatcagatgaggaagatgctataccggctccgcccatcaactatgctaggtcattttccactgtgccagccactccgctgacatattctttgcgttcagtcattgttcattacggtactcacaattatggtcactacattgcattcaggaagtacagaggctgttggtggagaatatccgatgagaccgtgtacgtcgtggatgaagctgaagttctttcaacacctggtgtgtttatgctattttatgagtatgactacgatgaagaaaccggtgagatgaaagacgacttggaggccattccaactaacgaggaagaagaagaaggagagcaagagcaagagcagcaaaaccaggaagtccaagaaggtatatctggtaaagatgtaaattaa

SEQ ID NO: 363 - DNA, 450 bp, Saccharomyces pastorianus
atgcatttatacggctactttgtgctcctcattgccgtggttcttttcattgcattattgcctttgttttctggtattggaaaattcaagttgactaaaccgagctcatcggtaaaagcgcaatcaccaacaggaaagctaggtaagagggagtatttagagagcaagcttaaccacaccaatgtgctgaagttcgacctaaatggcgagaaagatggctctggcgatgatagcacaggtgtttcttctgatttgagaaaatttgaagttgattcaaaaacaggtttgaaaagacgcgtgattggacaatataaccaggaccccaatgattttgatttcgatatcaatgacttgatcgttgaagatgaactagatgaacaaagagaagaagagaaaaagctgaaaaaatataacggtaagaaaaaccaagcttacgaaggatttgtatga

SEQ ID NO: 364 - DNA, 522 bp, Saccharomyces pastorianus
atgtttaagcgtcctctagcaagtttagtacgaatgagtgccgtgctcggaaaaaaatcgatggtaacagtaatgagaacacctactagacttcgtcccattgtagcaaccaacatgggtctcactttaaatctttttcagaggagatttgtagaatcctcaacagatggtcaagtggtccctcaagaagtggtaaacttaccacttgaaaagtaccatgaagaggcagacgagtacttagatgctttactagataacttagaagaactgagtgaggctcacccagattgtatacctgatgtagagttgagccatggagtaatgacattggaggtaccagcttatgggacatacgtaattaataagcaacctcccaataaacaaatctggctggcatctccactgtctggacctgacagatttgaccttcttaatggggaatgggtatcactgagaaacggcacaaagctaacagatattcttaccgaagaagttgaacaagccatcgccaaaacccaatga

SEQ ID NO: 365 - DNA, 924 bp, Saccharomyces pastorianus
atgtccgaaccggcaaatacgtcaaagaactcttcccacttaattggaggcttttttggtgggcttacatctgctgttacattacagccattagatcttttaaagactagaatccaacaagacaaaaagtcaacgctatggaagactttaaaagacatagataaccctttacaactatggaggggtactctaccttcagcattacgaacatcaataggtagtgcgttatatttatcatgtttgaatatcatgcggacttccttggctaagaacaagcataaagtgtcttcatcaggggatgatctgaatgttatatacaacaagagcagtagtctaccacggctaacaatgtacgaaaacctgttaacgggggcattttcaagaggcctggtgggctatatcactatgccaatcactgttattaaagtccgatatgagtctactctgtataattattccagtttgaatgaggcaaccaaccatatatacgccaaagaaggtatttctggatttttcagagggtttggagctacatgtttaagagatgccccttatgctggattatacgtattgttgtatgaaaaatccaaacaattattgcccatgatcctacctagcaaatttatacattgtaatgctgagggggagtttactacctatacttccacaacgataaatacaacgagtgccgtgttgtctgccagtttggccaccacagtaacagcaccattcgacactataaagacgagaatgcaattggagccatcgaagtttaccaattcctttaaaactttcgcatctatagtcaagaacgaaaccgcttttaaactgtttagtggattgagcatgagactgacaagaaaggcgctgagtgccggtatcgcatggggcatatatgaagagttggtaaagagattcatgtaa

SEQ ID NO: 366 - DNA, 1923 bp, Saccharomyces pastorianus
atgtctgactcaaatgatggccaagaaagcactaagaagaatatggaagctcagaatgtaggagaggctgaattaccacacgaaacgccagaacatgcggaaaagccagagatctctaggaaagatgataaattaacaaagaagaaccgaaaaaagggtaaggctagaaagggcggcaacaatagagtggaaactgagctagttcataccgctctactagagaaggataatccattcatggaggaacaacaggaaggtctcaagaaatcagctttattagaaatacctggtatgaaaagccataaactaaagaatccgaatgaagactacgaagacgactcagagggactgttacccttaaatcatgaatcgaatacagaaacgtgtaggactagtccaagcggaagcattaactctatgaatggagaaacgtctccctccgaagatctctctgtgggaaatagaagcaagtctaccaggatacatattcttgaagcgaaaagagcttcagagggtcagggcagagcctacattgcctatgttatacaatttgaaaattccattgttcagaggcgttatagtgacttcgagagtttgagaagtatattgataaggttatttcccatgacattaataccgccaataccagaaaagcagtcaataaaaaattatggcaaatcaataactggatctagttcaaaatacctgctgccctctgaaggttcgggctcagtggatctttcgttgtctgtcatacatgcatcggttaataataatgaggaaaagttaatacgacacagaataagaatgcttaccgaattcttgaacaaacttctgactaatgaagaaattacgaaaacttccataattacagattttttggatcccaataaccataactggcatgaatttgttaatagttcggccacgttttcatccttgccaaaaagtattcttcaatgcaaccctttagaccccaccaataccactagaattcatgctgccttaccgataccaggctcttcatcacagtcggtgttgaataaggaaccaagcgacaagaaggtggataagaaaagaagcaagtcgtttactggtgttgagcaagaatataagcagtatgagaatctattagacggtggaatttataagtataataggcgaacgacgaaaacatatcatgacttaaaaacagactacaatgaaatcggtgaagtatttgcacaatttgctaatgaacaggctcaggttggagaaatagcggagcaactttcttatttaagcaacggattttccgaatcttcaatcactttggaaaaattggttggaagattatactacaacataaacgaacccttaaatgaatcggttcacatggcaacatctgcgagagagctaataaaatatagaaaattgaaatacttacaaaatgaaatgattagaaaagctttgaactccaagaaggtacaattggaaaaacttgaggcacaaaataacgaatacaaggacgttgataaaataattgatgatgaaatgtctaaaagtcataccattaatctggaacgccctaacaacaacgccggcaatggtggaaaatcgtatggtggaaaattatttaacggatttaacaaattggcatccatggttaaagaatccgtgaagtatcaagaaactgatcctcacaccgcgagtgtgaacttgaagaaggaaattgaacaactttctgactctttgaaagttacagacaatgatttagaggttatttcaaaagttattcaaaatgaccagttgcccagattttcgaaagaaagagagactgatttatcagagatcctaaaacattattctagatatatgagaaattacgcccggaagaacctagaaatttggaaagaagtcaagaaacatcaagatttcgcataa

SEQ ID NO: 367 - DNA, 4314 bp, Saccharomyces pastorianus
atggtagaaggggctctcattggtaaatatctatcacaagcgagtcaattgaaactcatatcggacttgattcaaaacgatgatttgggacaggtactggaactaatagaaagtgcctcattgaatatacctattgatagcgagattgttttttctatctttgaaaaaataacggagcaggttgtcgagtatgccaggatgaaggatgaacaaagtgaaatgttctctccttcaagaactgaaatgaacgattccctaaggacctctgcacgcttactatgccatttgcctggtgtatgggaaaaatttcagacctggatatcttaccgactaaacgatatcattagcaagaactacaaacatctttttgatgataaatttgacaaaatgactgtacaaccattttttgatgcctttgctaaacaacaaaatgtcgatgtcgcacatgaaaaactggatttgaatattcttagtttgttggactctttagaagtggtgtatctttttgaccaaagtgaaaatagcatctccactaaaagcttagattttatcgtagttccattattgggttgcaattccgaagaaattgctgaatcatgctccaaattaatgagatggcatataaaaactctatcggagtgttgtaatgctgatgaaaattttgataagctagtttggaatttcatcaagcagttgtataccagagatgattctcagcagccttggaagcagaagaacagtttgtcggttcttctgagattcctcttgacatcagacttatcgcctgaacttattggttacattagaactgatatgtattgggaacatattcaaagagaactggatcacgaagttcatgagcacaaaaaactggctctctcaatcctcaaattgacaattcaaaagttaccagctcacactacagactttaagacaacctattttacatggagtgcgactcccagcatcgacacgcttaacagctggaagaagtttacaactttgtacgaaatgattgcgctcgatacatcactgaatcaaattgaagcagccaaacaagatgtcataaaaatttttgacaatgtgcatttgcaccctagttgggggctcatcttgctttccacaggtttgaaatcttcgatggaaagtgtcagaaaatacgtgatgaagctaatgttttcagttactcatatgtctgtcttttcgtcaaacatacctttgctgacaaagactcttctaccagctgcaatgctggctcattactttagcgtcaaggacaatatttgtccccatggcgaaagactatcatcatttgtcaaagatgtgctcgccgaaacaactaatgatttatctgaattgctgtcggaaattttaaggttattggttgaaaaagcgacttcttttgatccttctagaatatatgtgtcttatggtatactggagtttctccaaaaaaacaaactaaaagcaattaactctgatcatttgaatctgatcagaagactgtatgaattcgaaggtgaagacgtggtccttgaaactacgattcaaacaatttacttgaaactcttactatacattgacccatgtatctccgcatctgaattactgtttacattactttcacacataaagtataagaaagggtcataccaatatgtcgagcctctttttgaaaattacagagacctcgctgtttcctactttgacgatttacaagctgaagaaaacataatgccgaacattggaaaagatgccatttttgatctcttggcgttagttatcttcgatttcaaaaatatcgaagtcactcctaatttattgattgaaattgcaaaatcgaaacaagatattcctgattatacttcaagtgcaattacgttcttaactgaattactttctggtaatccttccaatgggtatacttatgaaaatgccactgtcctactgtcttatccaagttttacaatttctacatggaagtctttaaaagtcgaaaatctatttgaatcagtaaaggaaaacttttctgctgaaaagttcaaattttttgctgaagtttacaaaaagatcaacgaatgtagatttgacattattgaactaaaatttgatggacttttggttatatacgaattgattaagacttctgtcgaaaaaggttcaagagagagctttaaagtaaaggatagtttatactctactttttttgatctcatgagcatttttttgagaacgtatgccttgaatcgcgattgttcaaatccagatgtggacgagctccacgtattgctccatttgattgcggaaaatattaataaagataatggaaattttctcggaaacctggctgtttgcaatctaatgtacttcatcttagacacttacattcattgttctgatagtgtttccgcggatgaaattgctatagtaaaattcatttttgagagattctcgtccatttgggaaagtgtctgtagcgaaaggttggttttgaaggaaagagatctacaattatcactgataggggggttattccatcccgctatcctgtactttggttcgaaacaatatatagaaaacctcactttggaattagaagaacatgcacaaacgattatttctttaagttatactagaagaagcttactacctcttcttggatcacaactcagggctttcatgaaattttacggggactctttgaacgcgggtgtcgacttttggtggttgattaacattttggtaagtacattcaaagaattacaaatggacgtaaaccttttcaagcttaaacctgttatttcccacttgtatgatcggaaactaaacagctattatactaaaggtgaagagctttatgagaaagtgtatggtccagacgaagtattagccagagtttccattattgattctattttatacgcaaatgaccaatttaaggtccaactaattgaaaaagtcactgaaaagacaaatgttcttcatgctataaagaggacagacggcgctgaagcgttacaacgtttgttacagtggcagttattactattatcgctgcaaactatcaatgaaggaacgctagatgactctaccatgatgaaaattttgaagagtattgaagatgaaagttctccattggtaagagtgtacaaagaatggtttatttctactaaggtagtcgaatactataaaacaggtagttctgaatttgctgagaattacctcttctcattactcgaggatcacagcaaaccggttttcgccgttagtgcggaaaagatatgcttcttggtattgaaagagttaatgaatgatgatggaaaatacggattcgaccagcttttagacaagtttctttgcacattggttcccaacgcagcctcaaacaagcctctagtgaggcatttttccaattctctggtgatttcattatggccggcatttgaaagctatctatcaaatcacacattaagaagcatcatcgagaacttgtacattaatgccaaaaagactcaagtctttggtgaatatcgtaccggtgatgccaatatatgggatttgaaaagtgataaaaaattaacgaacatgtttggtggtgtcgccaaaaagattactgatcataatagcccttacatttccgaagctgtttttgagaagtatttacaagtcaaagacaccgtacctatcggcatcgatgaaaggtcattgtggctgaacaaaagagacaccgatatagatgctggcgctagcgggtgtacagactctgacacatctccattgcagacaaaaagtggtgcctgggagaccgttcttgacctggacaataagaaattcaacgaggtcgttacgcgttccgacttgattgttgtttcttcattggtggacaagccacccaatcttggaggtatttgtagattatgcgatgttttaggggtcggactgttgactgtgcaagacattaaagtcaaaagccatcctcaattcaagaatgtagctgtcactgctgatagatggatgcccatggaagaagttgccttggaaaatattgcaagtttcatgaaggaaaagaaaaaagaagggtacacattaattgggttggagcaaacagataaatcactgaaactcgataacagtttccgtttcccgaagaaatcattaattttgctgggtacggaagcatttggtattccaggtcctttactgagtgagctggatttatgtttagagattcaacagttcggggtcatcagatcgatgaatattcaaactgccactgcagtcattgttcattcctacaccgttcaacacatgtaa

SEQ ID NO: 368 - DNA, 798 bp, Saccharomyces pastorianus
atgtccctttcagtcgctgaaaagtcgtatctatacgactcgctagccagtacgccttcaattagacccgatgggaggctgcctcatcagttcagacccatagagatctttaccgattttctaccaagttctaatgggtcgtccaggatcatagccagtgacggtagcgaatgcattgtgagcatcaagtccaaagtcgttgatcattccgtggagaacgaactgctccaggtcgacgtggatattgcaggccaaagagacgatgccctgatagtggagacgatcacttccttgttgaataaggttctgaagtccgggaatgggatagactcgtcgaaactgcaattgacaaagaaatacagttttaaaatatttgttgatgtcttggtcatttcttcattctcatacccagtttctttaatatcgtttgccatttattccgcattgaactccacatatctaccgaagcttatttccgcgtttgacgatttggaagtagaggagctgcccaccttccatgactatgacatggtcaagctcgaaatcagcccacctctggtgtttatactggccatcgtgggcaacaacatactcgtggaccctgctgccaacgaaagcgaagtggccaataatggtctaattgtcacgtggtcgaatggcaagattacgtctcccatcagatcggtagcattaaacgactccaacgtcaaagggttcaaacctcatttgttgaaacaaggtcttgcaatggtagagaagtacgcctctgatatagtacgatcattggagaatttataa

SEQ ID NO: 369 - DNA, 1674 bp, Saccharomyces pastorianus
  modified_base (878)..(916): a, c, g, t, unknown, or other
atgatggaggaattcacatatgagcacgatttcaactctcacttcgccaccgatctggactatttgcaacaacccgtccaacagcaacaacaacaacaacaacaacaacaacaacaacaacaacaacagccaggacagactcaaagtctggaacaagaccaggatcaggagcgacacatgaatgacatgagcgtttcatccaatacatcagatggtggcgctcaacggccaaagaggactcgggcaaagggtgaagccctagacgtcctgaaacgcaagtttgaaatgaatcctacaccttctttggtggagaggaagaaaatatctgatctgataggaatgcctgagaaaaacgttaggatttggtttcagaacagaagagctaagttgcggaaaaaacagcacgagggaaataaggatccgaacccctcatcacagtcccatgataatactaacgattacgaccgtggtaacgaaaacaattcagtaaccacaacgagtacgtcttccatttttcacgatgaagatctgactttttttgaccgcattccactaaatagtaacaacaactactatttcttcgacatttgctctatcaccgttggaagttggaacagaatgaaaagcggtgctctgcagaagaagaactttcaattcattaaagacttgagaaacttatcgccaataaagatcaataatatcatgtcgaatgccaccgatttaatggttttgatttccaagaaaaactcagagatcaactattttttcagtgccatggcaaataacactaagattctgtttagaatattcttcccattaagttcggtcaccaattgctctctaactttagagaccgatgatgatataataaataatannnnnnnnnnnnnnnnnnnnnnnnnnnnnnnnnnnnnnnatgacaacgatgataatgataacattaatgaggataacgataatagtagtgaagataagagggatatcagagataattttggcgaattgaaactaacggttaccagatcacccacctttgctgtttattttctaaataattctcctgatgaagatccaaacctaaataaccaatggtcaatctgcgatgatttttcagaaggcagacaggtgaatgacgcctttgttggtggttcgaatattcctcacactttaaagggtctacagaaatctttaagatttatgaattctctaatcttagactataaatcttcaaatgaaataatacctgccattaatcctgcaatcccaactactgcaattccacaacaaaatattactgctccatttttacatacaaattcaagcgcaacagattccaatccaaatacaaacttagaagaatctctgttcttcgaccatgatctattatctagttcaataactaatacgactaacagaccaaatcttgatggcggacttcaaggtaataaggatgatacgctaaatttgttggatactacggtcaacagcaacaccaaccgggatgccaataatgaggaggaccatctagttcaagaacatttgcccgacgacactaatttaatagcaaatccaaccgatcaattattgtctttaccagctgatagtgagcttccaaatactccagactttttaaaaaacaccaatgaactaaccgatgagcatagatggatatga

SEQ ID NO: 370 - DNA, 1212 bp, Saccharomyces pastorianus
atgtccagtaccgtggtgtctagaaagaggagagtcagcactgttacagaacaggagaatagtggagacgcgaggaagcatagaaagaactctaaaagagatgacaagaactcatcgactaaggatggcgatccgcagctggaattcaaagtcttacaggggtacagggacctggaaggcgagatacataagggtagggctcaagtggccaggacaggagatataggtgttgccatgaacaatctggatactgtagacaccttatttaaccaggttgttggcatacggaacaatgggctattcgctcatgatgctagagccatggtcagtataagtgaactggcccagatatcggtgaggaatctaaagttcgatgattcaaggagcatggtcaatttagaggacatggtaaattcaatgaaaagatatatgttaaaggagcatttcaaactgaataacatcaccgaaaataggaacgatttgacactggacgccgagaatcgttcagaatcaaaccaggaacaacaagaaggcgaagatgaggacgggattgcgagcggtgatcgtacaagtaaaagcacatcttcttttaaggccacctccatgaggcataattatttacagcagttctcgcaccacaatgatttctcccagtttaattggtttaggatgggtgccctctacaatgttgtgagcaaagacgctcccatggtagaccatctgatgggacccctttccgttgagaggagactcaaagtatctacccaacgaagaagaaataacgaccaaatcggtgaaaaaatcactgctgaaaaaattactcaaaattcgttaaattctacacaacaagaaactacaccagaacaggtaaagaaatgctttaaaaaactttctaaaaaaataggtcctgaaggttccataaaccttttcaaattcataatagacccaaattcattccccaagtccatcgaaaatctcttttataccagtttcttgatcaaagaagggaaattgatgatggagcacgacaaggaaggtctacctacggtcaggataaaacaaagcataagtcataatgatccgaggagcaaagaaattgaaaagcaaagacgtcgtgacgctcatcagaaccatattattttccaaatggacatgcctacttggcgaaaactaatccaaaaatttaacatcacttcatcattcttagattaa

SEQ ID NO: 371 - DNA, 3294 bp, Saccharomyces pastorianus
atgactgaaaaaagatcttttcccactgtagatgtgaagatcgatgacgaagatagtcctcagctagaaaaaaaaatcaagcgacagtcaatagatcatggcgttggtagtgagcctgtttcgacgattgagattattccaagcgattcttttcgaaagtacaacagtcaaggtttcaaagccaaggatacggatttgatgggtacgcaattagagtctacatttgaacatgaattatcgcaaatggaacatgatatggcagaccaagaaaagcgcgatctttcttcatacgaacgtgataagttgccaagcgatttcgacccagataaatacgatatttctttccaacagatcgatgctgaacagaatgtgttaaatggtatgaaagatgaaaatacttctactgtcgtgagattttttggtgtcactagtgaaggatattctgttctttgtaacgttacgggttttaagaattatctttatgtcccagcgcccaactcatctgatgctgatgatcaggaacagatcaataagtttatgcactacttaaacgaaacatttgatggcgccgttgattcgattgaagtagtaccaaaacaatcaatctggggttattctggtgataccaaactgccattctggaagatttacgtcacttatccacatatggttaataagttacgtactgcatttgaaaggggtcacctttcgttcaactcgtggttttcaaacggtaccaccacttatgacaatatcgcatatactttgagattgatggtagattgtggaattgttggtatgtcatggataacgctgccaaagggaaaatattcgatgatcaaaccagatagcagagtctcttcttgtcaattagaagtgtcaattaattatcgcaacctaatatctcatcccgctgaaggtgattggtcccacacagctcctttacgtatcatgtcctttgacattgaatgtgctggaagaatcggcgttttcccggaacctgaatatgatcctgttattcaaattgccaacgttgtgagtattgcaggggctaagaagccgttcatccgtaacgttttcactttaaacacatgttcacctataacaggttcaatgattttttcgcatgccacagaagaggaaatgttaagccattggcgtgactttatcatcaaagctgatcctgatgttatcataggctataatacatcaaatttcgatataccgtaccttttgaatcgtgcaaaggctttaaaggtaaccgattttccatattttggtagattgaagagcgttaaacaagagattaaagagtcagtgttctcgtcgaaggcctatggtacaagagaaaccaaaaacgttaatattgatggccgtttacaattggatcttctacaatttattcaacgtgagtataaactaaggtcttatacattaaatgctgtttctgcacactttttgggtgaacaaaaagaggacgtgcactatagcattatttctgacttgcagaacggtaatagtgaaacaagaagacgactggctgtttactgtttaaaagatgcttatttgcctttaagacttctagaaaaattaatggcattggttaattataccgaaatggctcgtgtaacaggtgttccattttcgtatttattggctcgaggtcaacagattaaagttgtttctcagttattcaggaaatgtctcgaaattgacacggtaataccaaatatgcaatctcaggcctctgatgatcaatacgaaggtgccactgtcattgagcccattcgcggatattacgatgtcccaattgcaacgttggatttcaattctttatatccgagcattatgatggcgcataacttatgctatacaactctctgtaataaagacactgtggaaaggttaaattttaagctggaagtagactacgtcattacaccaaatggtgattactttgttactactaagaggaggcgtggtatcttaccaatcattttggatgaattgattagtgctagaaaacgtgctaaaaaagatttaagagatgaaaaagatccatttaaaagagatgtcttaaatggtagacagttggctttgaaaatttcggcaaactccgtttacggttttacaggtgcgacagttggcaaactaccatgtttggccatatcttcatccgttacggcttatggtcgtactatgattttgaaaactaaaaatgcggttcaagagaaatattgtatcaaaaacggttataaacatgatgctgttgttgtctacggtgatactgattctgttatggtgaaatttggtacaggagatttaaaagaagctatggatcttggtacagaggcggctaagtatgtttccactttgttcaaacagccaatcaacttagaatttgaaaaagcatatttcccatacttactgatcaacaaaaaacgttacgcaggcctattttggactaatcccgataaatttgataagttggatcaaaaggggcttgcatctgttcgtcgtgattcgtgttctttggtctctattgtcatgaataaggttttgaagaaaattttgattgaaagaaatgtggatggtgcgttggcttttgttagagaaactattgatgacattttgcacaatagagtggatatttctaagctgatcatatcgaaaacgttggcaccaaactatacaaacccacagccacatgctgtcttagctgagcgtatgaaaagaagagatggagttggtccaaatgttggtgaccgtgtggattatgtcattaccggtgggaatgataaactttataacagggcagaagatccgttattcgtgttagaaaataatattcaagtcgattcgcgttattatttatcaaatcaattacaaaatccgattattagtattgttgcacctatcattggtgacaagcaagcaaacggtatgttcgttgtaaagtccatcaagattaacaccggctctcaaaagggaggcttgatgagttttatcaaaaaggtagaggcttgtaaaagttgcaaaggtcctttgaaaaaagatgaaggccccctctgttccaactgtttagccagatctggtgaattgtatattaaagcattatatgatgttcgggatttagagcaaaagtactctagactatggacacaatgccagagatgtgcaggtaacttgcatagtgaagttctgtgttccaataagaactgtgacattttctacatgcgtgttaaggtcaagaaagaactacaggaaaaagtggagcagttaagcaaatggtaa

SEQ ID NO: 372 - DNA, 1545 bp, Saccharomyces pastorianus
atgtgttcaaccacgaagagggaacactctggtgaaatatctgatccttcattcaagagacaacaacgagataacgatgccaaaccaagccttgaatatgcttgtttgtgccacttggtgaacctgatacctggtaaggaacaaaagattgagatatcgaataggaacatcactactatcggtaggagcaggtcgtgcgatgttattctgaatgagcctgatatctcgactttccatgcggaattccatctgctccagatggacgtagataactttcaaaggaatctgatcaacgtcattgataaaagcagaaacgggactttcattaacggcaaccgtctagtgaagaaggactacattttgaaaaatggtgatagaatcgtctttggcaagagttgctcttttttgtttaagtatgcatcgtcttcttctgctattgagaatgaagacgaaaacacaagcccagaagtacgtacatccaagaatgacgatgaagtcttcaagaaaccacaaataggtgctgcaagtagtcaaaatgcgatgaccagttctacatgcaaaaaaataatcaagacaaagcctgtttcgttctttgataaatatctattggggaaagagttaggtgcaggccactatgccctggtaaaagaagccaaaaataagaaaactggccaacaagtggcggtgaaaatatttcatgctcagcaaaatgacgaccagaagaaaaataagcagtttagggaggaaattaacattctgatgagagtgcatcatccaaatattgttaacttattagatagttttgtggaaccgatcagcaagtcgcagatccagaagtatttagtactggaaaagattgatgacggcgaactgtttgaaagaatcgtcagaaaaacaagcttaggacaagatgaatcaagggccttattcaaacaactgttaactgggttgaagtacttgcatgaacagaacattattcatagagatatcaagcctgaaaacattctattgaatataacaaggcgtgaaaactcgaatcaaatccagttaggcccatgggatgaagatgaaatcgatattcaagtcaaaatagcagattttggtttagccaaatttacaggtgaaatgcaatttacgaataccctttgtggtactccatcttacgtggcgcctgaagttcttacaaagaagggatacacttcaaaagtcgatctttggagtgcgggtgtcatactgtacgtttgcttatgcggtttcccccctttcagtgatcagttaggccccccttcgctaaaagaacaaatcttgcaagctaaatatgcattttactctccatactgggacaaaatcgatgattcagtattacatctaatttctaatcttttggtgctgaatcctgatgagaggtacaatattgacgaagctatgggccatccttggttcatagactcaaagaaacataattcagtctcaatggatttacaacgtttgcaaattaccgacaataagatacccaaaacttactctgaattatcctgcctctaa

SEQ ID NO: 373 - DNA, 1065 bp, Saccharomyces pastorianus
atggatttgaccgtggaacctaatttgcactctttgattaactcaaccacccacaagtggatttttgttggtggtaaaggtggtgttggtaagaccacttcatcatgttcgattgccatccaaatggctttgagccaaccaaacaaacaattcctactgatctccacagatcctgctcataacttaagtgacgcatttggtgagaaattcggtaaagatgctagaaaggtatcaggcatggataatttgtcatgtatggaaatcgacccatccgctgctttgaaagatatgaatgacatggctgtttcccgtgcaaattccaacggaagtgatggtcagggcgacgacttaggaagcttgctacaaggtggtgcccttgccgatttgaccggctccattcctggtatcgatgaagctttgtcatttatggaagtcatgaaacacattaagagacaagaacaaggggaaggcgaaacctttgatacggtcatcttcgacacagccccaaccggacacacgttaagatttttacaattgcctaacactttgtccaagctattggacaagttcggtgaaatcaccaataaattgggcccaatgctaaactccttcatgggcgcgggtaatgtcgatatctctggcaaattgaatgaattgaaagccaatgtggaaacaattagacaacaattcacagaccctgacctgaccacttttgtctgcgtgtgcatcagtgaattcttatctttatacgaaaccgaaagactgatccaagaattgatctcctacgacatggacgtcaattccatcatcgtcaaccagttgctatttgcagaaaacgaccaagaacacaactgtaagagatgccaagccagatggaagatgcaaagaaagtacttggaccaaatcgacgaactgtacgaagatttccacgtcatcaagatgccattgtgtgctggtgaaatcagagggttgaacaacttgacaaagttttcgcaattcctagacaaggaatacgaccctgttgctgacggcaaggttatttacgagctagaagataaggaatag

SEQ ID NO: 374 - DNA, 1008 bp, Saccharomyces pastorianus
atgtctgagcaggacgctgaagctaagcgtgcgaagcaattggaagaagccagaaagagagtggaggaattgaagaagaagaaaaataagaagggtaaaggtaagaagaacaagaacaataatgtcactggcactacaggatcagacacacccgaagtagagagcacgccaggtgaagaattgccgcaagaacaaacaccagttgttgactctactaaaagtgaaaacgaacccgaacacgtcgaagaaaacgaggagaatgaagaagaggaagaacttgaagagaacgaagaattggctgcttcaaatgattctggtgttaatgaggaagaaaccaaagtggaagatgaaccacacgcttctgtggaagaggaaaattcagaaaatgtaaaaaaggaggaggatcaagaaattttgagccacgcagaaaataataaaactattgggactgcaccggtagtcgctgaggagcctaaagaagtaagggaaacctcccattcatcagctgaggcagacgatttatttggtggtgatgacaacgaagaatccgatttcctgaccaccatagaaaatcaaagagaagaagacgaattaagcaaactaaggacagagcttgaaacactaatacaagaaaataaacagttaaagtttttaagcatggataacgaaactacgattgatgatttacaagagcaattgcaagagagagacgatacgataaatagcctacaatacgatttacaaacaacaagggatgaactcacagctacacaacaacgcctaagggaagccgaaacaaaatcagtaagaactaccacagcatcgcctgttcattttgcagattttaatagcaattcaacttcttcgaaatccgccgctaattttgcgccaatggctcgtggtaaccatgcagaagtcgatcgtgtcatgttggataaatggcgtaactggaacgttgacatgaccggttggagaagtattggttcgggcccaatcatggagttttga

SEQ ID NO: 375 - DNA, 2454 bp, Saccharomyces pastorianus
atgtcggaacaaaaaacgtacaagcgtgtggggcaggacgatcccgtgcccgaactggacatcaagcagggacccgtgagatcctatatcgttactgacccgagcgccaaattggcctcgttgcggtccatggttaccgtgaaggagaaattgatcgtggcgtgtctggccatctttacagcgattgtcaggctgcatggtctggcttggccagacagtgtggtgtttgatgaagtgcattttggcggttttgcctcgcaatacattaagggcacctactttatggatgtgcatcctcccttggctaagatgctgtatgctggtgtggcatcgctcggtgggttccagggcgatttcgatttcgaaaacattggtgatagcttcccatctaccacgccatacgtgttaatgagatttttctcagcctctttgggggccctcactgtgattttgatgtacttgactttacgttactccggtgttcgtatgtgggttgcgttgatcagcgcactctgctttgccgttgaaaactcctatgtcaccatctctcgttatattctattggatgctccgttgatgtttttcattgctgctgccgtgtattctttcaagaagtacgaaatgtaccccgccaactcgtggaatgcctacaagtctttgttggctacaggtattgccctcggtatggcttcttcagccaagtgggttggttttttcaccgttgcgtgggtgggcctgctatgtatttggaaactatggttcatgatcggagatctgaccaaatcctccaaatccatctttaaagtagcattcgccaaattggccttcttattgggtgttccctttgccctatatctggttttcttttatgtccatttccaatcgctatacttggacggtgatggggcaagctttttctcgcctgaattcagatctacactaaaggacaacaacatcccacacgacgtcgttgctaatgtcgggatcggttccactgtcagtttgcgccatctttctaccatgggcggttacctacattcccattcgcataattacccagccggttcagaacaacaacaaatcactttatatcctcacatggatgccaacaatgaatggttgttagaactgtacaacgtgcctggtgaatctttagtgaccttcgaaaatgtaaccgatggcacaaaggtcagactattccattctattactcattgtagattgcattcccacgaccacaaaccacctgtttcagagagcagcgattggcaaaaggaagtctcctgttatggttatagcggattcgacggtgattccaacgatgactgggtagttgagattgataagaagaactcagctcccggtattgctcaagaacaagtgagagctttggaaactaagttcagactgagacatgccatgaccggttgctatttgttctctcacgaagtcaaattgccagcttgggggtttgaacaacaagaagttacctgtgcctcctctggtagacatgatttgacactttggtacgttgaaaacaacagcaacccattattgccagaagacaccgagcgtatctcttacaagccagccaacttcatctccaaatttattgaatcccataaaaagatgtggcacatcaataagaacctggtcgattcccacgtctatgaatcacaaccaacttcatggccattcttattgcgtggtattagttactggggcgaaaataacagaaccgtttatctcctgggtaatgctgtagtatggtgggctgtgacagccttcatcggtatctttgggttgattgttatgactgaattgttctcgtggcaattgggcaagccaatcttgcaagattcgaaggttgttaacttccatgttcaagtcatccattatttgttgggtttcgccatccattacgcgccatccttcttaatgcaacgtcaaatgttcttacaccattacttgcctgcttactacttcggtatccttgccctaggccatgccttggatataatagtcagttatgtcttccgtaacaaaggacaaatgggctatgctgtattggtcaccttctttgctgcttctgtatattttttcaagagttacagcccacttatctatggtactccatggactcaagaactgtgtcaaaaatcgcagtggttgtctggttgggattacggctgtaattcctacctctctacatttgaagaatacaaaaatcaaactttaacaagccgtgactcccaacctgccactactagtacgattgaagaaattactatagaggaaaatggtccatcatatgaagacctcatgaacgaagaaggtaaaaaaatcttcaaagacaccgaaggtaatgagttagatcctgaagttgtcaaaaagatgttggaagaagatggtgctaacatattgaaagtagaaaagagagctgtcttggaataa

SEQ ID NO: 376 - DNA, 441 bp, Saccharomyces pastorianus
atgactaataccggttgtttatccccaaacgattttttatcaaaagttccggaattttttaagactgcaaatgaaaaacatataactgtacgtttaacagccaaaaggctcatagagcacgatccggtagaagggaatcttgaatttgatgctaccaacaatcctgaatatgacgtttccagaaaagcgcccgagatttccgtcaattcaagctctgacaaggaatacccattgctaatcagaatgtcctatggctcacatggcaagaaggctaaatgctctacaatggtaaaagctaatgaactagatcaattttggcaagaatactcatctgtgtttaagggaggtatgcaagatttgattaagaagaagaaaaagaagagcaagggcagtgccagtggtaaaaattctaaaagaagcaaggtaggaaagaaaaattga

SEQ ID NO: 377 - DNA, 1368 bp, Saccharomyces pastorianus
  modified_base (219)..(219): a, c, g, t, unknown, or other
atggacatattcagacagacttttggaaacaatgacgaatcatttattcgaatcccaggagctttcaatgaggaaccgcccgcaaatgtgaatggagagggagataatgggaacaacagtgcggatgaaccaataagaagtcaaagtacgcgttcgaggtcagtccttcgttttctgttccaagctcccttaatagttctctactatgttattatttanttattccgaagttcacgtcttctgaaaccactgttaagatttcatgggttctatcaaagaaagcacaatcgtttgttggatcatggctctcaattgaaccgtctattggaaggcttgcagaatgagtctcaggttgtaatgccttctgaaggtaacggaaatgctgacggcggcagcaatagtgaaaatacgggcaacagtcaaagtagccaagttcagttcagtttcggttccttatacaatcctgaaaatggaatgttttccaaaggtatcatgcaaaatagttataccgaattgctggacaattgcagcgaacaagtaaaatttggagtgatttacctgcatgacccgcttttggataatcatatggactatgttaataagatattatgctcagagacctttgttaatatgatacggaaataccaagtgctattatggtatggtgatgttaccacctccgaagggttgcaagtttctaatgcattgaaaattagacaatatcccctacttggaataatttctttaaaagctgaaagaaaaatagaactaattgcgagagttgaaggctctatctcaaataataaacctcaagacctagagactatcttttctaaaaattatcctcgtttgatccaattgcgtcagcaaaggcagaatattgaaatgcaaagactgataaaacaacaacaagattcgagatatcaagattctttaaggcgcgatcaagaaagagacacagaacgattggaggagatgcaaaggcaacaaagagctcaagaacacgaaagattggaaaaggaatggctactgtggagaaaaggacaactgaaaccagaacctttgtctgaaaaaaatgctagcaaagttgctattagattagaagatggccaaagactagttagaaagttcgatgcatctttaccaacggaggaaatatacgcattcgtagacttacatttacatggcttacttgatccagaagaaccaactcaacttgctgagcgacctgctaatttccagcaccagtatgggtttaaattgatcacaccagtaccgagaagagagcttgagatgtctaccataatatctgaagttagtggtatatatccatcgggaaatatagttatggagcgtcttaatgaataa

SEQ ID NO: 378 - DNA, 1467 bp, Saccharomyces pastorianus
atgaatcgaaaggatgtggtaaacgaagtatatgacgattcggatttgattgacgaagaaggggaatctagactggcatggattaagagatggtatcagctaatcacttcgcccttggatttgcagctggtaataaatgaacaattagaaatgatcgactgggatgttcatgccaaaagccttgctaagccgctggggaattttttgactgtgtgtttttttgttatgagacttttgcaagacaacctaatcaagcccaactattacaaactaaatgttaagtcggatgcctttgatctctctaaatcgaacaagttaaaagagtttgattacttgacggaaatatcttctaatttccaaaatgataatcagttcgatgcctttcaatcttggtattttgttactttaagatttctggataatctctttaaaatttcgattttcgcattactgtcattaaacttttatctgacctttaagttcatttttggttatttcaagacttacaatttgtttcatctaaaaaatgaacttagttctccaaatttgaccaaacatagcttgagtgatctacgcaaagaatattacgaagacatctataagcagtcactgtggtctatgttgaaacacttttttagaggttctcgtgatgatacaccatatattgatcaggatgaagatgaaatattttatcaattaaagaaatggactcccactaaatttataaccaattttattgtgtctttttcaccaacagctattgttttcctaagcttttctgaagtttcgttcacaacggcaatttccctaatcttacatcaatacgttctaaatttcgttataattaagagatttcaggcaagcctggaagacggtttgattttatcgagcgcagctttacaggaatatgaagataagcacatcatgacacgcgtaaaccgacaagccagtttatgcactcgatcgaatggtggaggtactggccgatttggatcgggatctaaagcaccaaaagttttcaccactcattcattaaatggtgaagagattagagaagtatataattacaagaaaaaggagttcgaagtactgccaagtgagagtgaaaatatatcggagcctttcaaaacaagtagacaatactttgatgacgaacctcaaaattttggaagctctacagatcctggcgaagtccagttttcaccacacctttccccatatttccgggagaagatttccaagaataaccctgttcgattatctccacaccagtatttgcaggaggatgaaacctacttgtcaaaccaagaccaaaatagatcaaaatcattgagcccgttgagacaaacacctttaagtgcaagaatgaaaagttttgaagattcggaattcagtgcattgaataaacatgacatcaatgccatacttcgttcgcccaataaaatcaagtactatcgtaagaaatag

SEQ ID NO: 379 - DNA, 1596 bp, Saccharomyces pastorianus
atgttcggagtacattctagcagcaataacggtgggtttacaaacctcacatcgcagcaaccacaaacgaaccagatttttcaaccacagccacaatcacagcaaccacagcaacagctgcaacaacgctcgcaggtcaatgcatctctcggcccaggcccttcgcagtttggcacgtcatttaacaataataacataaacattaacaacaatagtagtagcattagtaataatagcattaacaataataacaatataaacaacagcagcagtagtataagccaacagagccagggaaataaccctagttgggttaataatccgaaaaagagatctactcctcacacggtgatgaggaggaaaacaacaaagcaaaactcttcatctgatattaaccagaaggatgattcgtcacccataaacatcacaatgaggagttttagcaagcagaaccaggactccaaacaaaatgacagtaacaaatcaggagcaaataatgatctgaattcttttttgtcgagttttaacgacactccacccaccatcactctacaagactggcaacgggaagatgagtttggttctactccatctttgacaacgcaattcgtctctaataaatgcccaaccaaaaaattgaaaaatccatcttatgactccaagaatactccgaatgtctttgataaagattcatacgtcagaatagcaaacattgaaaacaacgatttggataataacaacgccatcaccgatactagcaatggcggtgctcatgaaactttagcatgcaactcctttaagccttcaaacctaagcgcaattatcgtatttggctaccccgaatcgatttctaatcaagtgatcaagcacttttcccattttggacatatcatggaagattatcagatattaaggttaagtcgtggaatcagccccagctcattcagaatatttcacaacgacgatacggctaacgatcatactgattcttctgccaataaagccatcagtctgaaaaatagggataatgaatcaactaatagaaaatatccaatatttactggggaaggttgggtcaaattgacctacaactgtccatcttctgcattgagggcactacaggaaaacggaagcatctatcacggtgccttaattggttgtatcccgtattccaaaaatgcagtagaacagctggctggttgcagaattgataatatcgatgatattggcgaatttaacgtctcaacgtatcaaaactcctctacatcatccacctcaaatacaccgtccccaccaaacgtattattaactaacgatgcttttctaaataagggaaccatcactcctgcaatcgatgttggtaatggaacacacttgtcgaatccaaatatgacccattctccgaataagcgattaaatgttaaagatggcaagtcgctcttcattcaaaacacgagtacaaatacaaacgccccaacacttttacaaagtctagaatcgaaaatgcgtcaacaggaggagaaatataaaaataatgaacccgctggactcatacataaactaaataattggttatttggctggaacgatctataa

SEQ ID NO: 380 - DNA, 822 bp, Saccharomyces pastorianus
atgttgattaccgagaccttccatgatgtgcagacgtcgtacggcaccactttgcgtgtctacgtgtactctcctaaaattgcgggctatccgcaggcgaagttccccggtgtggtcttgtacagtgagatctaccaagtgacgggccctgttcgtcgttttggccaaagaatcgcctctgaaggctacgtggttgtggcgcctgccatctaccacaacttcatgggtcctgaggcgttgccctacgacgtgcaaggcaccgatatcggcaacgagtacaagatcaagaagccgctggagtcgtacgatgaggacaacaagctgtgttgcgacctgcttttccaactaccgcagttcgacggcaaaagaattgggtccacagggatgtgtctgggggggcacctggccttcagggcgttgttggacaagagggtcacgtgcgcaacgtgcttcttccccactgatattcactcgagaaccttggggctgggcgagaacgacgactcactggaacgtgtttcgaaggagctgggcaacgaccaggaaatggttctgatcttcggtacttcggacacccatgtggacccggagggccgtgacctgatcaggaagacgctcagagaccacggcgtgaagttcacgttcttggaggtcttggccgcccagcatgcgttcatccgtgatgagttcagcaagggtagattcgactcggccatcacccagagctgtctcggattcctgttcgagcaattcaacaggaaactgagacttgacctgggcgagttcgaggacgataacagcccactcgaacacgtttgttga

SEQ ID NO: 381 - DNA, 1638 bp, Saccharomyces pastorianus
atgctacccagatttggtttggcgaggaccgctaggtccgtgcaacgttttaaagtgacacagatctccaaaacgttcttccattccaccgaagttggtaaaccggcaccaccgcacaagctgtcgaagtcttacgcctcggttttcaagaagtggtttgtcaggggcttgaagctgactttctactccacgctggcgggcacgctgtacgtttcgtaccatctttacagggaatcgaacccacccaagcagattcctcagtccactgcgtttgccaatgggctgaaaaaaaaggagctggtcatcctgggcacgggctggggcgccatctctcttttgaagaagctcgacacgtcgttgtacaatgtcaccgtggtgtcgccaagaagtttctttctgttcaccccgctgctcccctccacgcccgtgggtaccatagagatgaagtctattgtggagcccgtgaggtctattgccagaagaacgcccggcgaggtccactacatcgaggctgaggcactggacatcgaccccaaggcgagaacggtgctagtgcagtctgtgtccgaaagcgaattcttcgtttccaacgtgaagtacgactatctggtcgtcagtgtgggcgcgaagacgaccacttttaacatccctggtgtctacggcaacgcgttgttcttgaaggagattgaagatgctcagaatattcggatgaagcttatgaagaccatagagcaggcgagctcttttccaagaaacgacccagaaagaaagcgcctactaacgtttgtggtggttggcggcggccccacgggtgtggagtttgccgcagaactgcaagactacgtcgaccaagatttgagtaagtggatgcccgacttgagtaaagaaatgagcgtcatcctgattgaggccctgcccaacatcctaaacatgttcgataagacgttgatcaagtacgctgaagatctcttcgcgagagacagaatcgatctgcaagtgaataccgctgtgaaatccgtagaaccaacttacatccataccttgcaaagcggccagaaggccagcgatatcccctacggaatgctcgtttgggcaaccgggaatgaaccgatcgagctttcaaaggtgctgatgggcaaagtaccggagcaaaccaacaagcgcggtcttttgattaacgacaaactggagctactgggcgcagaggactctgtctatgccatcggcgattgcacagcgcacaccgggttctttcccactgcacaagtcgcacaccaagaaggtgaatacctggccagaaccttggacaaaaaacttgaaatagaacaactggaatgggacatgctgaacagcactgatgagaccaaagtgtcccgtctgcaaggcgaaatcaacttgaaaaaatctaagctggataaatttaactacaagcacatgggtgcgctagcgtacatcggctccgagaccgcgattgctgacctacacatgggtgactcgtcataccagttgaaaggtatgtttgccttcttgttttggaaatctgcgtacttggcaatgtgtctctccatcagaaacaggattctgatcgccatggactggactaaagtgtacttccttggaagagactcctccgtatag

SEQ ID NO: 382 - DNA, 1341 bp, Saccharomyces pastorianus
atgtcccacgaaggtgaagaagatttattggagtactccgataacgaacaagaaatccaaattgatgcttccaaggccgctgaagccggagaaactggcgccgccacttctgccactgaaggtgaaaataataacaacaccgcagctggtgacaagaaaggttcttacgttggtatccactccaccggtttcaaggattttttgctgaagccagaactatcaagagccattattgattgtggttttgaacatccttctgaagtccaacagcataccattcctcaatccattcacggtaccgatgtcttgtgtcaagccaagtctggtttgggtaagactgccgtctttgtcctgtctactttacaacaactggaccctgttcctggtgaagttgccgttgttgtcatttgtaacgctagagaactagcttaccaaattcgtaacgaatatttgagattctccaaatatatgcctgacgtaaaaactgctgtcttctatggtggtactccaatctccaaggacgctgaactgttgaaaaacaaggacactgccccacatattgttgttgccactccaggtcgtttaaaggctttagtgagagagaaatacattgatttatctcatgtgaagaactttgtcattgatgaatgtgataaagttttggaagaattagacatgagaagagatgttcaagaaattttcagagctaccccaagagacaagcaagttatgatgttttcagccacactatctcaagaaatcagaccaatttgtagacgtttcttacaaaacccattggaaattttcgtcgatgatgaagctaaattgactttacacgggttacaacaatactatattaaattagaagaacgtgaaaagaatcgtaaactagcccaactattagatgatttagaattcaaccaagtcatcattttcgttaagtctaccacgagagctaatgaattgaccaaactattaaatgcttctaacttccctgccatcaccgtccatggtcacatgaaacaagaagaacgtattgctcgttacaaagctttcaaggatttcgaaaaacgtatctgtgtgtccactgatgttttcggtagaggtattgatattgaacgtattaacctggccatcaattatgatttgaccaacgaggccgatcaatatttacatcgtgttggtagagctggtagattcggtaccaagggtttagccatttcatttgtttcatccaaggaagatgaagaagtcctggctaaaattcaagaacgtttcgatgtcaaaatcgcggaattccccgaagaaggtattgatccatccacttatttgaataattaa

SEQ ID NO: 383 - DNA, 321 bp, Saccharomyces pastorianus
atgtctactgaatccgctttgtcttacgctgccttgatcttggccgactctgaaatcgaaatctcttctgaaaagttgttgactttgactgaggctgccaatgttccagttgaaggtatctgggctgacattttcgccaaggctttggacggtcaaaacttgaaggacttgttggtcaacttcagcgctggtgccgctgctccatctggtgtctcctccggtgttgctggtggtgttgctggtgaagctgaagctgaaaaggaagaagaagaagctaaagaagaatccgatgacgacatgggtttcggtttattcgattaa

SEQ ID NO: 384 - DNA, 1032 bp, Saccharomyces pastorianus
atggtcaaagtcgcaattcttggtgcttctggtggtgtgggacaaccgctatctttgctgctaaaactaagcccttacgtttctgaactggccttatatgatatcagagctgctgaagggatcggtaaagacatatctcatatcaatactaactctgattgtgttggttacgacaaggacagcattgaaagtaccttggcgaatgcgcaggtggtgcttatccctgccggtgtgcccaggaaacctggattgaccagagatgatttgttcaagatgaacgccggtattgtcaaaagcttggtgaccgctgtcggtaactttgcgccaaatgcaagggtcttggtcatttccaacccagtcaatagtttggttcccattgccgtggaaactttgaagagaatgggaaagtttaaacctggaaacgtcatgggtgtgacgaaccttgatttggtgcgcgcagaaacattcttagtagactacttgatgttgaaagaccccaagattggacaacaagaggacaagaccataatgcacaggaaagtcaccgttatcggaggccactcgggcgaaacgattattccaataattaccgacaaatctttggtgttccagcttgagaagcagtacgagcaattcattcatagggttcaatttggtggtgacgaaattgtcaaggcaaagcaaggcgctggttcagccacattgtctatggcattcgcaggggcaaagttcgctgaagaaatcttgagaagcttccataatgagaagcctgaaacagagtcgctcaccgcattcgtttacttgccggggttgaaaaacggtaaaaaggcacaagatttgatccgtgacaactctattgagtacttttcattgccaattgtcctgaagaatggtagcatcacgtctattgacactagcatcttggagagactgtctccaagagaggaacagttggttgacaccgctgtcaaggaactacgcaagaatattgagaagggtaagagctttattctaaactcttccaagttatga

SEQ ID NO: 385 - DNA, 3150 bp, Saccharomyces pastorianus
atgttaagggctcagaagttacattcgttggaatcttctaatattagtgcaattctacccatcgaacaatcgcaaaaactggttttagcgaagaagagtggtgacgtagaagtttactctcgagatggcaatacgtataaactatttcaactgtatccggatcttttacagaatgctaaaaatgagtcttcctttccattgattgagaatttctactttgcgaacgagctctctaccatctttgcacagtgtaaagaaaccttaattttactgagtactactaatttacaagaatatgatcgaatcattgatagaaggggcataaaacattgctggctgtttgaaaagacacacaaaaacaaagaagaagtcaccacttacttggcatattcaacaatcaacacttctaagatgcgaatattaatatgggagggaagagcgtataagaacatgatagaagcgtcattatcatttaggaaggaaatcataaggtccatatatcctggagaagtaggcattgttttaacgaccgatctaggaatataccattggccctataacaagtcatctttaattagaattgagaaaactgtgagaaacaaatatcctaaggatatgatatcagcgttaacggaactaatgaatcaaacagaaaaaaccgtagagaagagcccaaaaaaacatcatcgtgatgatactcaatccttctcttctatggaccgtatgtccaggaaatcaagtgtatcaagtatatggtacagaggcataagtagcgatcgttgtaacaaaatacgatatatcttcgaactggaaggcgatgaccctgctcctctaataatcgatggaactaccaagaaactatttaaactagacttcatgcataacaatgaagagccgtttttagtcgctaccgatcatactacattttccgaatcaaattccgaattcgatcacatgcactatttgtcatcccacttgctgatgctatataacacagatactatcaaattcgtcgattacgcaaatggatttacctttttacagcaaaaaataccagagggtataaaatgggtgaagagtctttccggtacttattttttggtatggacttcgaatgacgagttgcagttattctcctaccatgtagatgatggatctgatgattatgatgaagagtcaatttgcggtgacattagtgatcctgacttttatcaactgtggagaaaagttcttttttataagttcttcatcaactctcctaattctacagagttatgtgtatcagaaaacccccaagagtcattagatatatgtgctatgaaactgagagacttaactgtgatgtggtgtttgagaatttttgataaatttcaaaattacataatccaattggaaagtagcaaaaactcaaagatgcttcgatccaaatgtgaagaaataatcgttaaagatatattcgacttatttatcaaattttgggctccgcctcaattagttatattgaaagtatttccttctgctatttcaagtctggtattagaaattactggccaagagcatcattgcttgttcaaggaagccgaagaagctaaagagacatatgacattccgccacatctattgaacaagtggtgcttaccgtatcttactgatactagaagacacctgcagaatttgttaagtggacagcacgatgacgaaaaccgtataacttggttttatcgcgaccgaaaaattaagcagaattttgactttttcctcatcaataaccatgatgacgtggatcttgaaaccatgttaactttgatagacaccgttttatttaaatgctatctttattataacccttccatggtgggtccattcatccgtgtagaaaatcactgcgattcggatgtcattgtgactgagttgaaaatacgtcatatgtttaaagatcttattgatttttactacaaacgtgggaatcatgaagaagccttaaagtttcttacaaatttggttggtgaattagaatccgataatacagaagaaaaacaacgacaaaagattgagcatggcgttaaaatcttagttatttattacttgaaaaagttgtctaattcagaattaggcgttcttttcaaatatactgactggcttttgaaaaggaacaacggttcgattcaggaaattatttcatcgatatattttcacgattctcaagcatgtaacggaagggaccacttaaagatatatgaatatatccagaagtacgacaagttactcgctctccaatacttggaatttgcaatcagtacctttagattggaagggaatagcttgcacactattttgatcaagctataccttaaaaatttggatgttccctcaaccaaaatcaagctaaaatcactactagagacaacatccgtctatgaacccagaacaatactaagattactaactgaaactattgaggccggggcggatcttttgcccgcgaatgacctcaaattcgttaaatatttgaagatatttcctttatcaaaattagaaaaccatgaagaatcggtacgaatattgcttgatgaagtggatgattacaaagcagcaacaaactattgtgatgacgtatacgaaagcgactcaacaaagggagagaagcttttgttgtacctatacgataaactagtttctatatatgattcaaacggaaattccaagctgattctggggtttttacaagaccatggttcaaaattaaattcggcggagatatacaaaaacctacctcagggtctccccttgtatgatatcggtagagtgatttctcaattgttaaagaagcactcgtcgaaaatggacgaaactagaatagaaaagaatctccttcaagttgagcttgtgaccactactttctgtctcaatgacagtttatcttcatacggagtcttgtcggatagccataaatgccctatctgcaagaaaataatctcgaacttcggaaccgattctatttcatggtttactagagagggtagaaatatcgtcacgcactataattgtgggaaagtactacaggatcgttttactgctcaaactaaagcatcttccaaaactgaacaaaagactttgggagacgttaagaatgaaataagcaacaagtaa

SEQ ID NO: 386 - DNA, 894 bp, Saccharomyces pastorianus
atgtcggtaagtgaacaggaccctaatagagcatacagagaaacacaatcgcagatatacaggttgcaggaaacattactaaattctgcaagggcaaaaaatttgcaggaggaagaaaggcaagagaacaatagtcaaccgctagatcagtatgggaattctcaggagcttgcaacgagtggagtttcagccttcaacgcacctgaggtagattcacagtcagttctaacttttactgcagaaaaatatccaaaagaaccaaaaaatttgggtacactctactacaaccgtttcaaagagggatccttccgtgaggattcgacgagctactctgagagacacaaattcccgtataatctttatgacaggacccttccaccaccgttccttccagctatcggtattgataagatcaacaatatagtaatgttgaaaataacatatgaagacgttcaggccagcttggataatttagaatctcctagagcgagaaataatgagatttgggggtgtgatatctactcggatgattcagaccccattttagttttaagacattgtgggttcaaacccgttgcatctccaggtaactcgttccccaaactaaggagaacgccagcaaatatggcaaaccaagatagtgtcataggcaaccttcccctgctgacagggacacctttcgatttagaggtggagctcttgctactacccactttacaaaagtaccctagcgtgaaaaggtttggtataacctcgcgagaatgggggtcggaggacacggttttacacgatgggataagttatggtatctatagcattgcaattaagcaaaggttggatagcaatagacctcatgaaccaaacgggtacataaaaaatttgaagtggacttga

SEQ ID NO: 387 - DNA, 2103 bp, Saccharomyces pastorianus
atgacggccgaacctgctgctaagaaaatcaagctaggattaagtgatcctagcgaacctctcactcaatctgatgtgatagcattccaaaaagaagctttgtttaggtgcataaaccgtcgaagagttgattttgaagcattacgaaaacaatacgagctttcgaggagggagtgtattgatgtttcgcgtaagctggcgaatattatggctctcatagtaaccttggctagatttattgaaacattttgcacggacgctaacgaaaaaaaattgtgtgaagagattgctcaaggtgatgagacgctaatagttcaacgcagtgactcttttatgaaattattgaccaagtacgggaaacctaattctgtggacggtaattctaataatagtacgtcggaccatattcaagaattaacaacagagttgaaaaacttgcggaagagcaaagaggagctgttttaccaaaactcacagttgactgaggagatttctgctttaaaagaatattatacaagcttaatacgcaagtacgatagggatgagtcctttacaataaagcgtgtttttaaagaagagaagtcagatgatgcaaaggaaatacaagaaactaaaagtgaaaccaatgataatagtatcaaggccgaaagtaacgacttgcttacggctaatggtaaagaaaaatccgggagctcggacaaaggtgacgaattcgtgcagcaggaagatgaaagaaaggagaatgctgaacgtgaaaaattggatttagatcttaaattttctgattttcgttcagaagtaagttctctaaagtccactattaacgaccttgagaatatcagaaaagaaaatgaggaggagcttatcaaaacgcgttctgagatatctaatttgaaaaagcaacaattggtagtggtgcagcaagatccaggtatcacgtcatatgaccacgactctttgctagcgaaaattcaacgtctaacggaacaaaacgaggaattgtcggaagtcaacggtttctttctatcaaaattccaggttttatccaaagagaaggaggtgtatacaaaccaagtccgagatgagttccaaaaaaaccttgattctttgattgaaatgaacaattcgttggaaaaggacgttgtaagaataagaacagctcgtgatgatttgctaagtaaaatagccattctagaagctgaaaaatctaagactgaaatattagaagatttgcaacatgccattgatattttgaaggagcaatggattaaaaccgagcaaagatcaaacaatgtaaataccgtacagactcaagatgcactgatgaaggaaattcaagatttggagaaaggctttagagaattatcgaatttaactcacaaaaagtattctgaggtcattaatcatgaatccgtcatatccaagctaactgtcgaaaagacgaaagctgatcagaaatattttgctgcgatgaggtctaaggactcaattttaattgaaaataaaaatctctcgaaaagcttaagtaaatcgaatgaattaattctacaattaaaggattctgatagactactacaacaaaagattggaaatttacataaacagttagagctttctcaaaataatgaaagaagattaatcgattcgagtaaaacagagacaataaaaattattgacctaaacaatgaatcaataaagctgaagaggtcgctagacaaactacaagaagaaagcaacgaaagcattgtaagcctgacgcatctggaaactaaattaaacgatactgaaatagaattgaaacagtttaagtcaaaaacgtctcacctagaagctaaatgcgataaattacacgatgcactattcaacaacaacaacaaaaacaagggctcaaacgacgaggcactcgttgaagagcttgcaaacttccgtaccctagtttattgctctttgtgttctaaaaactggaaaaatatggccattaagacttgtggccatgtcttttgtgaaaactgctgtaaagaacggttggcagcaagaatgaggaagtgccccacatgcaacaaagcgttcagttccaatgatttattaacagtgcacttgtaa

SEQ ID NO: 388 - DNA, 612 bp, Saccharomyces pastorianus
atgtcgttgtattacactttagtgtttgccattctggtggtcgagatttttatgttctccatcctggccatcccaatcccctccagataccgtagacccctcactctacttttattaaagccgttcaagtcctccacagtgcaagtcgcgatcaaatgcatactcgggttcattcttttgctcttcgttgattgcatcaacagagtatacagtatcgacaaagagctgcagttaagcactacttctccgaacaatggcacggtcattgctcaggatagagttgaggtactctccagaaagttttttgcacaaagaaacatgtacctcactggcataactttgttcttgacgtttgtcgtcgtcagaacatttggtttagtcatcgagctcttgaccatgaaagacgtgtacagagcttcgccaccagtggcctccagcgatgtcaagaagaatgactctgttaccgctgaggctgccgctcaatcaggcgcctctaaggacgaccacggtgatgaggaaaattttgaactcttgaagaagattcaggacatcgatgatgaaattaaacgcttaaaggagaagtctgaatcgctacagaaggaaatggactga

SEQ ID NO: 389 - DNA, 1869 bp, Saccharomyces pastorianus
atgtctcgtactaacatgaatacaagacacgcacactcttctatgttggctgctacaaacagcaacaacaataacaacaacaatgccagcgctggtgtcgacagcggcaatgtcagtgcggtaagtatcgacgatggaccccacttcagggatatcttccactatgaacacgaggggaactacaaactcgctagcagcggtatcactaacctgaactattcttcccatatccatcaaactttgtctcccatatccattagtaacgcctccactccggaaagtttccccgaccactccttaggcttagagcaggaaccggagccggaagtggaagcggcagtggatgagggagcactgccacctcaccagaccaagtatcttttgaactccgttaaggccactaaacgattaaaagacgctaaaccgtttttgaagccggttgaccctattgctttgaacatcccgcattatttcaattacgtgcaaaccccaatggatttgtccttaattgaaaaaaatgtgcaggagaacgtgtatcattcagtagaccaggccaagttggatttcaaaacaatggtcgataattgtttagcctttaatggtccggaatcttcaatctctttgatggctaaaagaattcaaacgtatttcgaaagaaagttatctgcattcccaccaagagttttacccgcttctgctttaaagaaaacaagcagaagtcggaagaaaaatgaagattcggattcaccacttgtcattaggcgttcagtgagcactcctaatggtaatagtgttgaaagtgcaaacgaagacggcggtagtggtggcaggcctaagagaactattcatccaccaaaatcgaaggatttattcgaaatttatgaaaactctaaaccaaagtcgaaaactttgcagaaaaaattcagaacctgcttaaagattctgaaaattttaatgagtaaaaaaaattcggatataaattacccctttttacaacctgttgatccaattgctctaaatttaccaaattattttgatgttatcaagaatccaatggatttaggtactatatcaaataatttgatgaattggaaatacagttcaattgatcaatttgttaatgactttaatcttgtttttgataattgtttccaattcaacccggagggcaatgaagtccattcaataggccaaaaattaaaagagcttttcaatttccattggttagaaaatcaggatgttttgaatgaagttgaaacggattcagatcttgatgaagatagctattcttcttcatattcatctgatgatgaatatgatgatgaagacataaatgaaaacgatataactaatccggccatccagtatttagaacaaaagctacaaaaaatggaggttgagttgaaacaattgaaaaagcaagagataagcaaattatcgaaaagaagaaagaggaattacccgaagagaaatattttgcgtaaaagattagggagaccttcagttaatgatttgaaaaaaatcataactgatagcatcaatgaattgaataatttggaaatgaacggaatgattcaaatcatcaaaaattcattacctaaagacgaaatactaacttccaatgacgatgaaatcgaaattgatttggatattttaaatgaacggactattataaaaatttacgaaagttatttcgaaaaaaaacatagcaacaatacaaaaagaaagttgaatcataacgatttgacggcgcaagcaaataagaaaaagaaaaccttgaaatttttagaaaaagatgaaattataaataataattattccgattctgatgatgatagcagtgatagtagcgacagcgacagtgattga

SEQ ID NO: 390 - DNA, 180 bp, Saccharomyces pastorianus
atggctattgctccaattactggtacgatcaaaagaaaagtcatcatggacatgatcatcgggttctccctcgggggtgctatggcctcctactggtggtgggggttccacatggacaagattaacaagagagaaaaattctatgcggagttggctgaaagaaaaaagcaagaaaattaa

SEQ ID NO: 391 - DNA, 1290 bp, Saccharomyces pastorianus
atgagcatgctagctagaagactgttttccacctctcgccttgctgcgttcagcaaaatcaaggtcaaacaacccgttgtcgagttagacggtgacgagatgactcgtatcatttgggacaagatcaagaagaagctgatcttgccctacttggacgtagacttgaagtactacgacttgtcaatcgagtctcgtgacgccaccgcagacaaaatcactcaagatgctgcagaggcaatcaagaagtacggtgtcggtatcaaatgtgccaccatcactcctgatgaggctcgtgtaaaagaattcaatctgcacaagatgtggaaatctcccaacggtaccattagaaatattcttggtgggactgtgttcagagaaccaatcgtgattcctagaatcccaagactggtccctcgttgggaaaagccaattatcattggaagacacgccttcggtgatcagtataaggccacggacacgttgattccagggccaggctctttggaattggtctataaaccatcgggatctaacgctactgctcaaccacagactctgaaagtatttgactacaagggcagcggtgtagccatggccatgtataacactgacgaatccatcgaagggtttgctcattcgtcttttaaaatggccattagcaaaaaactgaacctgttcttgtctactaagaatactattttgaagaaatatgatggtagatttaaagacattttccaaaatgtctacgaagctcaatataaggccaagttcgaagaactgggtattcattatgaacatcgtttaattgacgatatggtcgctcagatggttaagtctaaaggtggttttatcatggcattgaagaactatgatggtgatgtccaatctgatatcgttgcccagggattcggttccttggggttgatgacttctatcttagtcacaccagatggtaaaacttttgagagtgaggctgctcatggtactgtgaccagacattatagaaaataccaacagggcgaagaaacttctacgaattccattgcgtcgatttttgcttggtcaagaggtctattgaaaaggggtgatttagacaatactccaagtctatgcaaatttgccaacattttggagtctgccaccctaaacaccgttcaacaagacggtatcatgaccaaggatttggcgttggcttgtggtaagaatgaaagatctgcttacgttaccacagaagaatttttggatgctgttgagaaaagattacagtcggaaatcaaatcgattgaataa

SEQ ID NO: 392 - DNA, 171 bp, Saccharomyces pastorianus
atggctcacgaaaacgtttggttctcccacccaagaagattcggtaaaggttcccgccaatgtcgtgtctgttcctctcacaccggtttggtcagaaagtacgatttgaacatctgtcgtcaatgtttcagagaaagagctaacgacattggtttccacaagtacagataa

SEQ ID NO: 393 - DNA, 2373 bp, Saccharomyces pastorianus
atggcgggtcattcacacagaacgtcgttgaagaatggacacaagtctttcaaatcaaaacacgcttctaaaggtgctttgaagagactgtacaaaggaaaagtggagaaggagctcatcggaactggcaaaccagacaagcaagtctcgaagctgcagcgtcgaaacaagtctaagcaattaagagcacaaaaaatcttagattctattgaaaacagaaaacttttcgaaggtaaaaatggtgctgccaaaatcgtcactattcttccgctagtaagtgatctggacccattggatattatgtacaagctattgaagtctgcggacgacgaggagattatgatccaggaagtagaatcgaagcgcatattcaatgttcacatcaagaaatttaagagcaatctaaagatcatcattccagacatgaccaactttttgaacattttagattgtgctaaagtggctgattttgtcatttttgggctaagtggtgtgaacgaagttgatggagaattcggagaacaaatcgtccgtgctttggaactacaaggtattgcatcatatattggtgtcataagcaacctttcagcggtccacgaaaaggagaagttccaactggacgtcaaacaatccctggagagttatttcaaacattttttccccaacgaggaacgtgtttataacctagagaagaactcagactctttaaacgtcttaagaactttatgtcagaaacttccaagatctattaactggagagataatagaggttatgttgttgcggatcttgttgattttgttgaaacttcccctgactccggtgagttggtcgttgaaggtactgttcgtggtattggtttcaattctaatagattggttcatatccctgattttggtgactttcaacttaataaaatagaaaaaattagcgagtcctcacaaaagagaaaaaacatcaagaacaaatccaacaacacaggcgatgatctagacttggatttacaaaccgtctttgaaagtgatatgaatagagatactttagacgagtacgctccagaagacgtggaagattggtctgattatgatgatgactttggatacgaagatttgactacagcaagatatgatgatcacgggtatttacctggtagagaacaagcatccaaaaaggtagcggtccccaagggaacttcggattatcaagccaaatggtacctagatgacgttattgaagctgccgatgaagaagaaatggaacaggccgatgaagaagaggaaacaatgatggatgttgacgacggaatgacggtgatagaccaagacaatgaagagatggaaaacgacgaaagatatgaaatagaagatgatgaaaaatttgaagagttttcacctgaagaagaagaacgtcaattgagagaattcagagatatggaaaaggaagacagagaattcccagatgaaatcgaactagaaccaaccgaatctgccgtggaacgtctgaaaaggtacaggggtttgaagaacctatacaactgtgactggaatgttgatgaaaaagaccccacgtcaccacccgaatggaaacgtttattaagagtgggtaattataaaaacaccaaaaatagaattatcaaagaaaccaagaacgaagcacaagctattgcaggtgaccgtattagaatgttcatcaaattccccaaattcttattagaaaagattcaagaccccaaacagctattgtttgccgtttatggattacttctacacgaacacaagaatgcagtggtcaacttctcgttacaaagatgggaagaatacgacaaccctgtaccttctaaggatcctatcgtggtacaatatggtgctagaagatataccattcagccactattttctcaggattcgaatagtcccaacaacgttcacaagtatgagagatatttgcattcaaatacagtatcgatcgccacatgtattgcacctgtagatttcacgcaatcccctgcaattttcttcaaaccttcacaaacagattctaagcaagttgagttgattggtcacggtacattcttaaacgcagaccattcaagaatcttggccaagagagctatcttgacgggtcatccatttagattccacaagacagtggtcactgtacgttacatgttctttagaccggaggatgtggaatggttcaaatctatcccattattcaccaaatctggtagatctggtttcattaaggagagtctgggtacacacggttatctcaaggctacgtttgacggtaaactttctgcacaagatgttgttgccatgtccttgtataaacgtatgtggccattgccttcattaccttggaatggtatgtaa

SEQ ID NO: 394 - DNA, 987 bp, Saccharomyces pastorianus
atggaaaagagaagcgttggtgtgaaaataccagatgctcctcccacttatattaaattagatcaaaacgaaaaattcttatatattactagcaaaaccaattatgcgtcttatcagatagcagctataatctcatacccaggtatggaagatgtgccaaatgttaatttagaaaatggaaaattaccaagtgaagacaataaactagcactactgctgcacgggagccaatctcacaagagtgcaatttatcagaccttattagccaagagactggtccaatcaggatattgggtactaagaatcgattttagaggtcaaggggattcgactaataactacgacgctgccattggcaggacgctcgatcaagatttagaaggtatgagtgttgtgtaccaaacaatgcttgatagatctgtcagggagcagctatacaagacagacacgatctcactgggtgtgatcgtggcacactctagggggtcccttgctatgttcaaattctgtctgaaattgctttcaatggaatacccgttgccttctcacctgattaattgtgctggaaggtatgatggaaagggacttattgaacggtgttcacggctacacccgaattgggaaaaagaaggagggttctgggccaacggtccacgatatggtgaatacaacaatttttggatcccatcaagcgaaacttatagtatagccaacgtttgcgtcccggactttgccacaataccgccaacttgctcggtaatgtcgtgctatggtacctgcgaccacgtagtgccgcttagtgcggcttcaaactatgcaaaactgtttgagggtagacatacactgaagcttatagagaatgcggaccacaactattacggcattgaggatgatccaaacgagctaaacctaccgacaagaaggggcagggtcaactactcaccactagttgccgatttaatcatggagtatctgaacaatacatag

SEQ ID NO: 395 - DNA, 1086 bp, Saccharomyces pastorianus
atgaaaggtttaattttagtcggtggttacggtaccagattgagacctttgactttgaccgttccaaagcctttggttgagttcggtaacagaccaatgattctgcaccaaatcgaagccttggccaacgctggtgtcacagatattgtgcttgccgttaactacagaccagaggtcatggtcgagactttgaagaagtacgaagctgaatacggtgttaacattactttctccgtggaaactgaaccattaggcactgccggtccattgaagttggctgaagaagtcttgaagaaggacaactctccattcttcgtcttgaactccgacgtcatctgtgaatacccattccaagaactagcagacttccacaaggcccacggtggtaaaggtaccatcgttgccaccaaggttgacgaaccttccaaatacggtgtcattgtccatgacatagccactccaaaccttatcgacagattcgtcgaaaagccaaaggagttcgttggtaacagaattaacgccggtctgtacattctaaacccagaagtcattgacttgatcgaaatgaaaccaacctctattgaaaaggaaactttccctatcttggtcgaagaaaaacaattgtactctttcgacttggaaggtttctggatggatgtcggtcaaccaaaggatttcttgtcagggtccgttctttacttgaactccttggccaagagacaaccagagaagttggccaccggctccaacatcgtcggcaacgccttgatcgacccaaccgccaccatctcctccactgccaagatcggcccagacgtggtcattggtcctaacgtcaccatcggtgacggtgtcagaatcaccagatccgttgtcttgtgcaactccactatcaagaaccatgctttggtcaagtcctccatcgttggttggaactccactgttggccaatggtgtcgtttggaaggtgacactgtcttgggtgatgacgttgaagtcaaagacgaaatctacatcaacggtggcaaagtcttacctcacaagtctatctccgataacgttccaatggaagctattattatgtga

SEQ ID NO: 396 - DNA, 1470 bp, Saccharomyces pastorianus
atggctctatcaaaggtagagcattgcctgtcgtatcatacgcgcttattgttaccccatgttctatccctcaaatcgtcacaccgtattgcatacatcttctcactattatctgcagtctcggccggcttcatcactttgatatcgctttattctcagccatggcaaaaccatttgaactactcttcgtggcaaatcaataccatcgccagtatgactaacttggggatgtacctgacaccgccgatccttgggatgattgccgattctcacggccccatcactttgagtctgctttccatcattgggtttatacccagctattcgtacctggcttatgtctttaatcatccggaattatcccttgaggggaatagtgactcatcgttcaatctgtcaatattgtgtttcgccgtcataggtatatcgacaagtgccttgtacttcagcgcactgttgacgtgcacgaagctgtaccctcacacgaagctattatccattagtctgcccaccacgtgctacgggatatcttcagtagtggggtctcagttattaagggtcccgtggttctggtcctatagagcacaatcttcttcatcgtccgctaacgacctgaacctggggagggtattccaaacgtttgcatgggtttacgttattatcgggttacttgcatggatagccaccagtgtggtgtcgctattgcatttcaacgaagaacaggataaccagaaacggctggatgaccagactgatgccgagcagttgccgttattggaacaagacagccacacccaagacaagttcgcgcaaacagtactaagaattttcagcgaccctgtgacgtacattctggcgctgtcgattctactatccttggggccattggagatgttcattgccaacatgggatctctaaccaacctgctggtccaagtcgatgcgcccgccttgtccacgaagttactgtccacttatgcgctctcctccacttttgcaagactactcacgggcatagtggcagatttcctcgccaagaaaagaatatccatcaaatggatcctgctaacgctgctgtccctcgggctctgcgcgcagttgaccttgttcaaactggtctcctcgaagacggtgtcgtcctgggggttagtgcccacagggtcgctggtcggaatcatctacggtgggctgttcaccgtctatccgacattggtgttgttagtatggggcgagcgctcgttcgggaccgtctacggcagcctgctcattgcacccgcggtgggctctacgatattctgcatgctgtatgcgaaagtgtacgattccggctgtacagacaacgccggagaccagcgggggtcggcatgcatctcggttgtctacaagtatagcagcattgcattcgttgcatccatcgtcctttcgtcagtggtattctggaagttgaaacgtaaaaatctaagggtatga

SEQ ID NO: 397 - DNA, 909 bp, Saccharomyces pastorianus
atgagtgtgttgggcaagatcttgtactacttgagaaccgtgttggccgtactggtgctttcaggctgcggtctttatggtgtagtggcctctatcttttgcacgttaatcggtaagcagcatttggcgcagtggacgactgcccgttccttttactatgccatgaaactggtgctcggccttgacgttaaggtcacaggcgaggagaatctgcttaagaagccttatatcatgatttccaaccatcaatccactttagatatctttatgttgggtaggatcttcccacctggttgtacggttactgccaagaagtcgatgaaatacctcccatttttgggttggttcatgactttgagtggtacttatttcttagacaggtcctgtaggcagcaagccgtggagactttgaatagagggttggaaaacgttaagaaaaacaaacgtgccctatgggttttccctgaaggtaccagatcttatacaactgatttgacaatgttgccctttaagaagggtgccttccatttggcgcaacagggacatatccccattgtcccagtggttgtttctaacaccagtactttgactaatcctaaatatggggtcttcaacagaggttgtatgatcgttaaaatcttggaacccgtttctactgagaatttgaccaaggataaagtcggcgagttttccgaacagattagaacccgtatgcttgatacattgaaggaaatcggttactctccagctatcaacgataccaccttaccgccagaggctctcaagtatgctactcttcaacaagaaaaaagaaaggctgctataaagaatgggtccgtgccttctgatgacatgaacgaagacgttagtgtccatcacgaagggtcttccatgaagaagatgcattga

SEQ ID NO: 398 - DNA, 1467 bp, Saccharomyces pastorianus
atgcctgtatcgccttcatttgcgtcgagtatagatttgataatatctcatgaagccgtctctttgccaagaaatcctccctttatagatacttcgaataaaatgggtaacccaacgacttcaccccacgccacccttcaacacttaatagatccgcctttgttgtccagcacaacgtcatcttcccgctccaccctcagttctgcgttgaactcgcctccacctccaccgtcgatcacttcgtactcttcttataattcctctgcatgccaatccatcacgagttcgcccacagacaacactactctgccacagagctcgaagttctacttccctcatagcctctcgcctaccccgctgtcttccaacagctcaagccatgtcatcttaccccccatatcttccttcaccaatctgattaccgtggcggaaagagaattcaatggcagatcaaactctctgcatgccaattttacagcacccgtcccaagaaccgtgctggaccaccaaagacacgagttgtcactgtgcaaccccatcaccgcggctactgtcaagaacactacgccctcgccaccggcccaacacacccagcatatactgtccactgtggaaggtgtaccgagatcaaaatcagtttctagtctgcctgttaacgggtttccggcactgatgggcagacagcagcagcaaaacaccggtagtagcactgcctcgaccctaccatctattcattctccattaaccaatgaacacactaacaaatattcttcgtcgctcagggattcgtccaagataatcaagcaaagaaagaaaaaggaatgccccatatgccacaatttctacgccaacctgtccacgcacaaatccacccatttgaccccggaagacaggcctcacaagtgccccgtttgccaacgtggctttgctagaaacaacgacctgataaggcacaagaaacgccattggaaggacgagttcatgcagatatacgcaagggatccgcaaagcaatagcaatactgacgatactgacgataccccacacgtttccgcaaccaacgacgttgacgattctgacgataaatcggctgctttggcctcatcttcttccgaggacacgaaactactgaagaaaaatcaattaagatcactatacaagatcaaaggtgccttcaaatgcccctacaactccaccttgatcaacttagacatggaggtgtacccgcacaagaccagatcgctttattttgagccaataaactgccatcaaacaggcgtcttttcgcgctgtgacactttcaaaaaccatctcaaggccttgcatttcgaatacccacccaaaaccaagaaggaagatagaagcattgtgcccggaaagtgcaagcactgtgggctacagttccccaacgtcgacgtctggctgaacaaacatgtgggaaaaggatgtggttacgcataccactag

SEQ ID NO: 399 - DNA, 936 bp, Saccharomyces pastorianus
atggtatcaagaggccccgacgaatggctagagaccataaagaaatgccaggcgctgaccgaaaacgaaatgaaacaactatgtgaaatggtaaaagaacttctgatggaggaaagtaacatccaacccgtacagacccccgtcacggtatgtggcgacatccacgggcaattccatgacctgctggagcttttccgcactgcaggcgggttcccggacgatataaactacattttcctaggtgattacgtggaccgtggctactacagtctggagactttcacgcttttaatgtgtttgaaagtcaaatacccggccaagattactctggtgaggggcaatcacgagtccaggcaaattacccaagtgtacgggttctacgaagaatgcctgaataagtacgggtccaccacggtatggaagtactgttgtcaagtatttgactttctgacgctagccgctatcatcgacggcaagatcctatgtgtccacggtggactatctcccgagattcgaatgctcgatcaaatcagagtcttgtccagagcccaagaagtgccccacgagggcgggttctcggaccttctttggtcggaccctgacaacgtagaagcctggcaggtttccccccgtggtgccggctggctgttcggcagcaaggtcgccagagagttcaaccacgtcaacggactcaacctgatcgccagggcgcaccagctggtgatggaagggttcaagtaccacttccctgaaaaggatgtcgtcaccgtttggtccgcaccaaactactgttatagatgcggtaacgtcgcgagtgtaatgaaggtcgacgaggatttggaacccactttcaaaatcttctctgctgtccccgatgactacataagagaatcaacagccaaccacaacaaccaaagagccggctatttcttgtaa

SEQ ID NO: 400 - DNA, 522 bp, Saccharomyces pastorianus
atgaatcaaggcttaaaacttttgttcggtttgctatttctctacacagccgcagttcaggcaggcgtaatcagtatattcaatgcactacctccgccaaactccaagccaattagcggtgaatcaccactgtaccagtgtgatgtttcggataagcaactcttagaaattaaggagattgatctgtctcctaacccaccagtccgtggccaaaacttaaccattacggccaacggtgaggtcttcgaaatcatagaagaaggctcttatgtcgaagtcgaagtgcgtctaggttatatcagactgctatcccagactttcgacttgtgtcaaaccctggaagacaacgacatcgagggcttatcctgcccaattgaaccaggttcatacgacgtaaagaaattggtcgaaattccaggtgaagtcccacctggcaggtacgtcgtcctagcaagagcttacactgagagcgaggatttgatcacttgcgtaaccggagaagtcgtcttccccccaaggtga

SEQ ID NO: 401 - DNA, 288 bp, Saccharomyces pastorianus
atgtccggaaaaccaccagtatataggttacctcccttacccagactaaaagtgaagaaacccatcatcagacaagaagcaaacaaatgtttggttttaatgtcaaatttattgcaatgctggtcttcatatggccacatgaaccctaagtgtgccgctttggtgacagaactgaaaagttgcaccagtgaaaatgccctcgggaaaagaaataacgtacagaagagtaatataaattaccatgctgctagattatacgataagattaacggtaaacctcatgattaa

SEQ ID NO: 402 - DNA, 921 bp, Saccharomyces pastorianus
atgcagttaagtaaagctgctgagctgtgctatgagataacaaactcttacctacagatacaccaagagtcccagataatatcaagtacacaagaagcaatacggttgacaaggaagtatttattgagtgaaatttttgtacgctggagtccactaaatggagaaatatcattctcatacaatggcgggaaagattgccaggtattactgctattgtatttaagctgtttatgggaatattttttcatcaaggcccaaaactctcagtttgatttcgagttccaaagcttccccatgcaaagacttcccactgttttcattgatcaagaagaaactttccccacactagagaattttgtactagaaacctcagaacgatattgcctgtcattgtatgaatcacaaaggcaatccgaaacggccatcaatatggcagatgcgtttcgagaattcataaagatataccctgagaccgcagctatagtgataggtatcaggcacacagacccatatggtgaaacgctacaacctattcaaagaacggactcgaattggcctgatttcatgaggctgcagccccttttacactgggacttgactaacatatggagtttcttgttatattctaatgaaccaatttgtgggttatacggggaagggtttacatcggtgggcggtgtcaacaattctttacccaacccatatttgaaaaaagatttaagtgatataccattgctttttgaatgggagattgcccacgcatttggcaagaatgcagcgggagagcatgatcctattgtaaatacttcaccgatatctgtggtggataaagaaagattcagtgaataccaagacgattattatcctggttggtatctgatcgatgatactatagaaagggccggcaggattaaaaactaa

SEQ ID NO: 403 - DNA, 1332 bp, Saccharomyces pastorianus
atgatcagggcgtcgtcgatacttaaaaattgtaactataggtacatacattccattcatagatgtttactgaatgaatccagttcaaaggatggcaaaaccaacaatacagaaggagcttcagcaggaaaagcgtttgaggaagcttttgaggaggaacgtagagtgttcggtgaatcgttcgaagctggagcaagggttgaaagcatgcgacacactaatgctagcaagataattgacaagtattacaacgggctcagtgaggattctaaggggactagattcaagaaagaaaaaattgtctttgatcatagtcaaagagctcaaaggaagcttccaaataaagatcatgaatttttgaaagaaactgcaggcagcgattacgtgtaccagggaaccaatccttctgctgttagtgctaaaaccataagtgagcaaacaagaactttattggagaagatattcgatgaagataatgacgttaacaaaaaggatcgggaatcaaaaaatcatgatcagtacaaagactttgccactggagtgaatctggcatttgaagagccaatcccacacttaaatttgaagtttagcgaggaagtgatgcaagaaattggtaataggatccgttaccaagctacattagaccaggttttgaaactccacaccgattacttgaaggaaactgttcaaagtgattatgatcttttggaatatttaaaacggttgttggaagcatataaaaaaagagacaaaaatttggaaataaagatgaattcagagtcttcaaacatattcgaggatattagagatgcttgtataagtaaaccgaacgagctaccaaaaccatatacaattactttgccatatgttatattgaaatcgcttacatcaagtgattttggttttccatcagatagaaaatacatgttgatatcttatgtttataatgaatgcaagaatagtatggatgtgtctttatacttgaccatttgtaatgttgacttctacaatttactgatgcaactgttgtgggaaaacttccaggaagttcgttatttaaaacgtgtggtcactgagatgagcgtaaatggtgtcatcgggaatatcgaaacggtggatatacttgataaaatcgtcaaagaaatgagaaacctaaatgaagatgtatttttggaagcagaagctgagtatgatacagttgagggcactatatcaaaagacaaccaaattgtaaatgtgggcgtattatggaataaagacacgaatagtgatttactaaatatcgaaaactatctgaaaagtctcaaaaaaaacttaactagagataggtag

SEQ ID NO: 404 - DNA, 2568 bp, Saccharomyces pastorianus
atgtctaggaaaagaggtagtaaggccaagccaatagctaaagcaaacttgaaaaaggaaaatgatcaattcctcgaggccttgaagctatacgaaggaaagcaatacaagaaatctattaagctgctcgacgcaatcttgaaaaaagatggtaaccacgttgattccttggcactaaagggtctagatctatttgctataggtgaaaaagacgatgctacttcttatgtggctaatgccattagaaaaatcgaaggcacttcagcatcgccaatctgctgccatgtattagggatttacatgagaaataccaaggagtacacggaatccatcaaatggtttacagcggctttgaataacggttccactaacaagcaaatctatagagatttggcaacattgcaatcacaaattggtgatttcaagaatgccttgatttccaggaaaaaatactgggaatcattcctcggataccgtgccaattggacatcgttggctgtcgcacaagacattaatggcgaaaggcaacaagccatcaacacgctatctcaatttgaaaaactcgctgaaggaaaaatatctgattccgagaaatatgagcataacgagtgcttgatctacaaaaatgatgtgatgtataaagctgctggcgacattcaagataagttgcaaaatgttttaaagcatttaaacgacatcgaaccatatgtctttgacaagtttggtttattagagagaaaagcttctatttatatgaaactaggccaattaaaggatgcctcgattgtttatagaactctcattaaaaggaatccggataactttaagtactataaattgctagaggtatcgttgggaatccaaggtaacgatagagttaaaaaggctttgtacgctaaacttgaacagttttacccaagatgcgaaccacctaagtttattccattgactttcattcaagatgaagaagaactttccaaaaaactgagaggatatgttttgccccaattaaaacgcggtgttccagcaaccttctctaacgtgaaatctctctatcaaagaagaacttccaaggtctctccacttttggaaagcattgttcttgaatacttgtctggaattgatggtaaacaagacccaattccattcatctggaccaattattatctgtctcaacattatttgttcttgaatgattttcccaaagcccaagaatatatcgatgctgctttagaccatacccctactctagttgagttttacatccttaaggcgcgcatcttaaagcacttaggattaatggatacagctgtagatattttggaagaaggtagacaactagacttacaagataggtttatcaattgtaagaccgttaaatatttccttagggcaaacaacatcgataaggctgtcgaaattgcatctttgttcaccaagaatgacgattctattaatggtatcaaagacttacatctcgtagaagcttcttggtttatcatggagcaggctgaggcttattatagattatacctggaaagtaagaagacattagatgatttaacgtcatccaagaatgaggtagaaagcgatgaaagcgaagaaaccgcaaacgttattaaggataatcaatggcttgttcacaaatataaaggcttggcgctaaaaagattccaggctattcctaaattttataaacagtttgaagatgatcaattagatttccattcatattgtatgaggaaaggtacgccaagagcttatctagaaatgctagaatgggggaaggagctttatacgaagcccatgtatgttcgtgccatgaagggagcagcaaagctttacttccaaatgtatgatgatcatctgaaaagaaaagcagatgttattgacgacgattctgaaggtagtggaaataatggggccagtagtaacagtagtcaaaaaaagaaggctaaaaaagaggctgctgccatgaacaagcggaaagaagctgaagcgaagagcgttgcagcttacccaactgatcaagatgacgatgtgttcggggaaaaactgatagaaactgccaccccaatggaagacttcgcggacaccttttacgatgactactctaaacaagccagagacgatgaaagagatttcgttttggattttgagttcaactataaagttggaaagttggcgttatgtttcgcttctctgaacaaatttgctaaaagattcggctccacaaatggattgtttggtagtatggctattgttttgttacatgctacaaaggataacacccgttttgatgcgatcttgaaaaaagtagttacgaaaagttttgaaaaagactactctgaagtgttaccattgaacgagagctctaacgacagctttgattggttgaagttttaccaagaaacattcgatggaaatgatataagaggcctactattcctgtaccgttatcgtgaagaagtcgctttggaagaacctcgtttaaaagaagcgataattaataatctttctcttttggaacctcacgctcaaaacgaggttctacaataccaactataa

SEQ ID NO: 405 - DNA, 2280 bp, Saccharomyces pastorianus
atgtcaacaaattcatttcacgactatatggatccaaagtcgagaataaacgctcgacagttttcagatgatgaagaattcactacacctccaaagctaagtaatttcggatcagctttactctcccatactgaaaaaacctccgtatcacaggaactgtcaaataaagatgacaagataacgaaacctgtttttgaagaaatgaacagaagttcctcgaggagtcatcctccatcatcaatgggtaatttaacgtccggccacactagcacctcttcacattcaactctatttggacgatatttaaaaaacaaccatcaaacaagcatgacaacgatgaacactaatgatatagaaataaatgttgggaacagccttgacaagagctttgaaagaataagaagcttacgacaaaatatgaaagaagatattacttcaaaatatacagaaagaagaagcaaacgatttctaatatccaatagaacaacgaaactaggacctgcaaagagagcttccacactaacaagcatttttgatgatgtgcctaactcttctagccaactaattagcaatttaagagagacaacggaatcaccacttgacgacccttcggaaacgaagaagaattcggactacgaatcgataaattttggagacttaaatccgatacaatacattaaaaaacacaatctaccgactagtgaccttccaatgatatctcaaatttactttgacaaacaaagagaagagaacagacaagcggcgcttcgaaaacatagctcccgagaactgctctctaaaactagatcatcttccactcccctcgccagcagtaactcattggtcaataaggacaattctataacgtctaataataattctcaaccaagacgaaagatatctactggttcatcttcttcgaaatcatcaattgaaataagaaaagttctcaaagaaaatattgatgctgataattatagtaacctgaagagcccggttcacaaaatttacaaggaaacttcaggatacaaaggttcagattctgaaaagagagaagtactgcgcaatataagtataaatacgagtcatgccgatagcgcacttcaacaggataacaagagactaaaaagatcacttgacgatgccatcatacatgacaatgaaaacataaagaaccaggaagtattttatcacaggccagctccaaaaccacctgttactaaaaaagttgaaattgtggagcctattaaatcagcctccttatcaaatagtaggagtgtaattacagttaatgactctcaatatgaaaaaatagaattactcggtagaggtggatcttccagagtttataaggtgaaaggagcgggcaataaggtatacgcgctaaagagagtctctttcgatgcatttgatgattcaagtattgatggattcaaaggagaaatagaactattggaaaaattgaaagaccaaaaacgtgtgattcaactagttgattacgagatgggggatggcttattgtatttgataatggaatgcggtgatcacgacctatcgcagattcttaatcaaagaagtaatatgcccctggatttcaattttgttaggttttatgcaaaggaaatgttacaatgcatcaaagtagtccacgatgctggtattgttcattctgatttgaaacccgcaaattttgtcttagtaaagggcattttgaaaattattgattttggtatagctaatgcagttcctgaacatacagtaaacatataccgtgagactcagatcggtacaccaaattatatggcgccagaggcactggttgccatgaattacacacaaaacaatgaaaatcgccaggaaggaaataaatggaaagtcggaagaccttcggatatgtggtcatgtggttgcatcgtatatcaaatgatttacgggaaacccccgtatggtagctttcaaggccaaaacagattgttggctattatgaatcctgatgtaaaaattccatttcctgaccataccagtgacaatgagaggattccaaagtctgccattgagttaatgaaggcatgcttgtatagaaatccagataaaagatggactgtggataaagtgttgagttgtactttcctccaaccttttatgatatctggatcgatcatggaagacttgattaggaacgctgttagatacggttctgagaaacctcaaatatcgcacgatgatcttaatgatgtcgtagagactgttctaaggaagtttgcggattacaaaatctaa

SEQ ID NO: 406 - DNA, 1254 bp, Saccharomyces pastorianus
atgtttagactgccattgggattagtcatcagaggaaaaacggttgcgaacatccagacattcaatagcacaagactttttgatccatgtttgtttagacaattaagtgtatcttctaaaccgttaccgttgttacgtgtaccttctagtggcacgtgttctagaatggagagccacaagtcttataagctgtcttcgctctctcataattctggtttgtaccttcgccgtcctgtatccagtccggtaaactcggttttcaagttgacggataaaagagctttccattcgtcaccacatgcacgaatcaaatttatgttttcttcaagatcgccaaagaatggtggcaagccgtttgtgaaagtatacaaagtgtcaccacttctcatcgtattcgcagcagtgagtcttttcacttttatcctaacttcgacattgattgttattcccttcatcttccattttttcttgccttttcttattatgttcatcttctttaaacagttcaaaaggtggcagaaaaatgttttttacaaggacatcttaaattctttaccaaaaaccgaattgaaaataacagtacctaccatgaggtcattacagatgcaaccaatgattcaaagctggaaggatatttcatcgagaatgggcattcctaatgaatttgccaaaggtctaaatgtggatttagtgaagcaagatgaaaccaggaagcaatttttgagttttttggaaaaaagagtattagagtcctttactaagaatgaaatgggaataaggtcatactttttgggcgataacgttgagaagtggatcaaagaatcatatgacctggaactggatatcgagaactgtcgtagcgaattaaggaaatttcaagattccatattcgccagtgtccagtacaaattgtatctagattcaatgaaaaatttaccattgaacccatcgaaaaaacttgagggtaagaaacaccttgcgaatgtgtatgttctcattttagataagtctttccccgaagtaatgtttaatggtggaggttattcaaaggccgattttttcaagatattgcaggaaagtgaaactgccaatagcaagagaatgcacaatatgattatcgcagttaagagcgtcaatacactactatctcgtcactttgttatcacagccaagggtgattcgggcgatttcttttcaagatatcatgtttcaaaagtagatggcaaccacaccgaatatactttgagagaatag

SEQ ID NO: 407 - DNA, 1848 bp, Saccharomyces pastorianus
atggtcaaggataattccttacgctcatcttcatcggcttcgctatcgtcgctatttagaccgaccaaattgaagaacctatcagctaaattttttaacggtggtacccaatcacattcaaagccagatgatatttcaagatcttcctccagatcgtccaggaaactcgctgattctgactatgaagatcacaagaatcatagtaagcctaacgaccgaaggtcaactactgacaagaataccgtgggaaacagcccatcatcaaaggagtcacatgccgcagcaaatttttcactattagcctcttctcctacttcggttaagaaggcagctattgactcccctacatcaaggcctttacacaatactaatactcctgtgcgtaccgggcataatacaccacacttgccccatagtatccacaatccaataaattacattcatcaaggtgcaaaggatacttttcaccatcctcatcctgtccatccaacagcccataataacatctccaccgtctcctcagcaaaatctgaggcatcttcaaatttttcataccaaacgcatatgcatcccgtagaaatactccaaaagcaaatcgaagataaacatttaatggaatctcaatcctccacccctggatctttggatttgaaccatcattcttcaagcggtagtgatgacgtcttaactaaaaagaaaaaatccttaaaattgacgaggtttttcaaaaaaattcataatgattatcacgacaaccaccataaccacaaccatagatctactcctacaaaaccaaaggttagttcgcatactaacggaaatgtagtagaaagtaatgggaaatctttatacgaaacagataatccagtggaactgttggaaaagtatggtatacctggtagaaaattgggcgagggagcttctggttcagtatctgtagtggaaagaaccgatggtaaactatttgcctgcaaaatgttcagaaaaccctcactaaacaatgatggaaccaaccattcccaattggccaattactctaagaaagttaccacagaattttgtattggctccactttgcaccatgaaaatatcattgaaacatttgacatgttgaccgagggtgacacgtatctattagtgatggagtacgcaccatacgatttctttaatcttgtcatgagcaatttaatgacacaagacgaagtaaattgttatttcaaacaactttgtcatggtgtcaattatcttcattctatgggtttagctcatagagacttgaaactagacaactgcgtggttactaatgacggcattttaaaattgattgacttcggtagcgctgtcgtttttcaatacccctatgaagataccatcgttaaatctcatgggatcgtggggtccgatccataccttgctcctgagctactaaaacaaacatcttacgacccaagagtagcagacgtctggtcgatcgctattatattttactgtatggtattaaaaagatttccttggaaagctccaaaaaaaagcttcaattcctttcgactgtttaccgaggagcctgaagacgaagatgatattgctaggggcccaaataaaatactaaggctattaccaagagactcacgaaaaataataggtggaatgttaacattagacccaaaacaaagagtgttgatgaacgaagtggtaaagaatgattggctggtatccgtcccctcttgtgaaattgaccctatatcgggcgagttggttgaaagaacaaaaaaccacaaacatcatttggtcactgaagaagaactaaacgagttgagcaaagaacatggaaacaaggattcaaactaa

SEQ ID NO: 408 - DNA, 936 bp, Saccharomyces pastorianus
atgactgcaaatacaaaatcaaatgtcatgagattgttcttgttgaggcatgggcaaagcgaattaaatcatgagaatatcttttgcggttggattgatgctaaattgactgaaaaaggaaaagagcaagctcgtcattcagctgaattgattaaacagtattgcgagacaaatcaattggatttgccccagatcggttacacatcgcgcttgatcagaactcaacaaactatagaaacgatgtgcgaagagttcaggttggaaccgcaactgcaagttgtctatgactttaataaagtcgaacttgggagtaaattcggtggtgacaagaaaaatactacaaaaatccccattcttcaaacttggaggttaaacgagcgtcactatggctcttggcagggccaaaggaaaccaaatgtcttagaagaatatggtaagaaagaatacatgtttatcagaagagattacgaaggtaaacccccaccagtagacctaagccgtgagatgatccagcaagagaacgagaagggttcttccaccgggtacgaattcaaagagccaaatagacaggtcaaatatgaactggaatgtagcaatcatggcatcgtcttaccagactccgaatctcttcgtgaggttgtttatagattgaacccatttttacaaaacgtcatactgaaattagctacccaatacgatgaatcgtcctgcttaatcgtgggccatggaagttcagtaagatcgctcttgaaaattctggaaggcatatcggatgatgacattaaaaatgtcgatatcccaaacggaattccattggttgttgaattggataagaatgatggtcttaagttcatcaggaaattttatttggatcctgaatcggccaaaattaatgctgaaaaagttcgtaatgaaggtttcgaaaaaaacccttaa

SEQ ID NO: 409 - DNA, 1614 bp, Saccharomyces pastorianus
atggcatccacagaactgagcctgaaaagaactttaacagatattctggaagacgagttgtaccacaccaatccggcacataaccagttcgcaggtcactaccaaaactatcacccgaatgctagcatcaccccatacaaactggtgaacagcaacaaggaaaacaacaattttacgtggaacaccgcattccaacagcagaatgagtctaatacggcttctcagcctccacaacaaacttaccatttcccaatattcaacaaatatgctgaccccacactaactaccactacttcgcttacaaacggtgaagcaacagcgaatgacaaacaagttgttggtaataatgttcacctcatacccagtgatagtaaggtcgccaatgaaactccattgcaaaagactgttgatttgaagaatttaatgaaagtctcagatccttatgtgccgacgcgaaatacattcaattacgatgtcaaaatatccaacgatttttttgataacggtgacaatctgtatggtaatgacgaagaagtgctattttatgaagacaattataatccaaagatgcaatggtctcttcaggacaatagtgctgcaataaataatgaagacgcaagaactatcttcaataacgaatttgactctgatgatgacgatatcagtgacgatgaagaagacgaaattgaagacgaagatcgtttgcaacaacaagaggaaatccttttgccattagacgtcacctcagtatcgatatttgatgccgatcataaaataaatcatttaaagagtgctggtcatgtatttaatgaatacagttacgttgattctaatacagacgacacaaccaacatcacacccaaaaatacgttagaagaacaggaaaatgcaaacgctgaggaagggggtgaggaggaagataacgatcttctcgacgaagatgatttatatgatatttctcttttgaagaacaaaaggaagcaaagttttgtactcaataagaataccgttggttttgaaagactatcgtctccatcaactccggtaaaggtaccgtctaacactactactactactactaaaaggaaatctacaaagtcgttcaataatagtggtggcactaacagtaataacgaaaacaccccgatggaaagaataaagaaaccgacttcgtccgtgtcaaattctaatagtagtaggcggaaactaattaactataccaaaaaacatctatcatcacatcctacaccattcagttcgagcccaagtcctacaaccacatcatcttcggcacacgcgtcgtcttcggacggtagcaacgaaatatttgcgtgccaaatcatgaatcttactagtaatgaaccatgtggtgcacaattttcaagatcatacgacttgacaaggcaccaaaataccatacatgccaagagaaagattgtattccgttgctctgaatgtataaaaattctgggatcagaaggttatcagaagacattttcgagattagacgctttgacgaggcacataaaatcaaagcatgaagacttatcatcggaacaacgtcaagaggttacaaaatttgccaaagctaatattggttacgttatgggttaa

SEQ ID NO: 410 - DNA, 3879 bp, Saccharomyces pastorianus
atgtctagtgaagaacagtctattgtcgaaggttcaaaccaggtaagtaaaccattgcttagagtaaagctattggaagcattgggccaggggaactttaagctgttggagactcttgttgatagcgaatttcagcccagagatgacccatctgtgcaacaagttcttaatttgttgctacactacgctgtccaagtagctcctattctccttattaaggaaattgttgcccactgggtagaccaggctgatgaagacgaaagggcgggtaaaactagcggtaaaatttgcttagatttgaactatcaggatgaaaacggcaatacaccgttgcatctagctgctgctcaatcccgttctgatgtaattagcttccttcttagccagaaatctattaatgattgtatcaagaataacgctaacttgcaacctatatatatgtgcaaagatttgaatgtagcgcaaatgatgcagttgaaaagagacgaatattttgtggaaacggttaattctttaaaagctgccatagagagcagagactttacgaaactggatttgatttggaaaagtccaagaaatttgaatatgttagatattaatggaatagatcccgaaactggcaagacattattatatgaatactctgaaaaaaaggacattgacatgtgtcaatggttgctagaaaatggtgcagaagcaagaattaaggacgcaaaaggaagatcgcccttggatttagtgaaaaacataaaattacctgctaaatcctctaacaatgttaaggttactcctgaacttaaattgaagagtctgcttgaaaaaaatttgaaagaacgatctgttcacgaaaacgtttcattaatcaagcctccaacatataagggttttttaaaaaagtggacgaattttgcgcatggttacaaattgcgttggtttattttgactggcgacggaaatctgtcatattacaaagaccaatcgcatactgataaacctcgtggtaccttgaaagtttccgcttgtcgtttacatattgattcttcagagaaattgaacttcgagttgctgggtggtgttaatggtactaccagatggcgattaaagggcaatcatcctgtcgaaactactagatgggtcagtgaaattcaaagcgctgtcaggttcgccaaagacaaagagatgttaaagagaaaaaaagctgtgccaccatcgttagctataaaaaacaaatcaccggcccttatatcgcattccaaaacacaaagctctcctcctgaagtctcgcagggccatcaacacgctttgcgtaaggaatcgattcaaccttcctctaccagtctgtaccggagaccaagcaataacctatctgttgcatctaacgaaattcaattgaacgataatttaactgaatcaggtaagcgctttgtcagtaaaatgattgaaaatcgattggacggtagtaaaactcctgtggcagttcacacaggttctgcattgcaaaggatttacagtaataacacctcaaaaagtaatagaagtatccgaagtgcttcaggcgtaacaagccctgtggataaggctccaaatagcagtaataatacaaacaataatagcgttaatatgagccaagtcaatacagcagcaggatccaccacttctttaagtgacaataactttattgctaattttgaaggcgacgaagcaaattcagatgacgacgaggaagatcttggaataaactttgatcgtgatgaagaatacataaaagtacaatatgggccctacaaagagaaacttgacatgtatgaacaggcgatcagtattgagttgagttctttgattgaattagttgatcaagaggagccgagccccgaagtttggcttacagtaaaaagaagtcttatcaatacatcaactatctttgccgaattgagaaatttgatttctaaaagagacaaaagactggtaagcatggtttctaaacaaggcgatgtcaacaatgtttggatacagtctgtcaaggagctagagattgagctatctagcaaaaccgaacgtctggcttcgattgataaggaaagaagaagtttaaaaaagattctccataataaactgctggaatcacagacccccgttaataaaaaagaacacttgcaatttgacgaagaacgagaatcgaatacaactgcaagtacactaggtcaaattgcaaaattcattagtgctacaaaggaagaagatgaagcgaatgatgtcgatgaattttatgatgctgaagaattagctgatgaggtggcagaattaacagaggctcatccggaaacctcaatggtagcagctcccacgcatgctgctcctctcgttccaaatagagcggctaacgaaagccaacatctcgaggacgaagacgggaaaacagaaataaaggacgaaaaaacaagccaaaacttaggaaaacaagatattttagcggcggaagaggaaaaagaaactgaacaatcatcgaaggatgtcatagaaaaagacaaggaaagtcaaataatggagaaaaccaaagaggtagcatcctcatttaccgctgatagaaatattgttgcagtcaccacagtgcaaaagagaaaagaagaatatttactcagtgaggggtcctatcttggttatgaagatggtgtaagaaaaagactatccatggataaggatgaacgacccaaaattagtctttgggctgttttgaagtccatggtgggtaaagatatgacaagaatgacattacctgttactttcaatgaacctacatctcttctgcaaagagtcgcagaagatttggaatattctgaacttttggatcaagctgcaacgtttgaggactcgtctttgagaactctatatgtggccgcctttacagcatctttgtacgcctctaccaccaagagagttgcaaaaccctttaacccactcttgggcgaaacatttgaatatgctcgaccagacaaacaatacagatttttcactgagcaagtttctcatcatccacctatctctgcgacatggacagaatcgccaagatgggatttctggggtgagtcgttcgttgatacgaaattcaatggtagatctttcaatgttaagcatttgggtctatggaacattagcctgcgtcctgataataatgacaaagaagagttgtatacttggaagaagccaaacaatacagttataggtattcttgttggtaacccccaggttgataaccatggtgaggttaatgttgtcaatcatacaacgggtgatcactgcaagctgtatttcaaagcaagaggttggaggtcatcaggagcatatgaaatcacaggtgaagtctacaacaagaagaaacagaaaacatggatactgggaggtcattggaatgaggctatgtttgctaagaaggtagtgaaaaatagtgatctctcgctggagaagaccaaaaccgcggcatcggtagggaatgggccaacaaacgacgggacaaaattcttgatatggaaggcaaatgaccgtcccgaggagccattcaatttgaccccttttgcgataactttgaatgccccacaaccacatttgctgccatggttagccccaacagatacacgtttcagaccagatcagagagctatggaagatggacgttatgacgatgccggtgatgagaaatcgagggtagaggacaagcaaagagcagcacgcaaaaagagagatgaaaagaacattgaataccatccacagtggttcgttaaggaaactcatcctatcacaaaaaccaaatattggaaatatacaggaaaatactgggcaaggagaaaaaatcatgacttgaaagattgtggtgatatattttag

SEQ ID NO: 411 - DNA, 678 bp, Saccharomyces pastorianus
atgtctagtttgtgtgtgtttctgtttcacttgcttttcttgacgcagtttttcgctaaagcatcaccattgacattccagctgaagaagggtcaaaaagaatgtctatacacacttactccggatacagactgttcaatctcgtattattttgcagtgcaacagggagagagcaatgactttgatgtgaattacgaaatatatgccccagacgacaagaacaagccaataattgagaggtctggtgaacgtcaaggagaatggtcgtttgtgggccaacataagggagaatattccttctgcttctacggtggtaaggcacatgacaagattgtagatctagacattaagtacacatgcgagcgccaagatgatgttcgaaatgaaaggcgcaaggtaagaaaagcgcagaggaacctaagagactccaagatcgatcccttgcaagataccctggaaaattcaatagataccatagaaaggcagctccacgttctagaacgtaatgtacaacattacaagactagaaataccagaaaccatcacacagtttgttcaacggagcgcagaattgtgatgttttccatttatggtatcttattgattatcggaatgagttgtgcccaaattgctgcattggagttcatttttagagaatcaaggaaacacaacgtatga

SEQ ID NO: 412 - DNA, 1524 bp, Saccharomyces pastorianus
atggcaagtaaggttgaaaagatcgataatatacctgccgagatcagggaggagatgtcccagctgtacagcgatctaccaggaataggcagggaatataagcttatagataaaattggcgagggtacgttttcatcagtgtataaagcccaagatatcactgggaaaataacaaaaaaatttgcatcccatttttggaattatggttcgaattacgttgctttgaagaaaatatacgtgacttcgtcgccacagagaatttataatgaactcaatcttctatacataatgacaggctcttcgagagtggcccctctatgcgacgcgaagagggtacgagatcaagtcattgctgttttgccatactatcctcacgaggagttcagaactttttatagagatctaccaatcaaaggtataaagaagtacacttgggagttattaagagcactaaagtttgtccattcaaagggaatcattcatagagatatcaagcctacaaatttcttattcaatttagaattgggacgtggtgtgctggtcgattttggcctagctgaagtgcagatggattacaaaggcatgatctccagccagaacgattacgataattacgcaagcacgaatcatgacggtggatattcaatgagaaatcatgaacaattctgtccatgtataatgcgtaatcaatactcgtcaaactcgcataaccaaacaccccccatggtcactattcaaaacggaaaagtggttcatttgaataacgtgaacggagtggatctaactaagggttatcctaagaacgaaactcgtagaatcaaaagagccaatcgagcagggacccgtgggtttcgcgcaccggaagtattgatgaagtgcggtgctcaaacaacaaagattgacgtatggtccgttggtgttattcttttgagtcttttaggtagaagattcccgatgtttcaaagtttagacgacgcagactcgttacttgaactctgtacaatttttggttggaaagaactgagaaaatgcgcggctttgcatgggttgggctttgaagctagtgggctagtttgggataaacaaaatggatatccaaatggattgaaggaattcgtttatgaattgctcaataaagaatgcacagtaggtacttttcccgagtatagtgtcgcttttgaaacatttggatttctccaacaagaattgctcgataggatgtctattgaacctcaattacctgattctaaagcgagcatggatgccgttgatgcatatgagttaaaaaaatatcaagaagaaatttggtctgaccactattggtgttttcaagttctggaacaatgcttcgagatggatcctcaaaaacgtagctcagcggaagatttattaaagaatccattttttaatgagctaaatgaaaacgcatatttacaggatggcgatagtaccgacgaagatgacgtagtcagttctagtgagggagatttgctcgataaagatgtcctattaatttccgaatag

SEQ ID NO: 413 - DNA, 933 bp, Saccharomyces pastorianus
atgcccgctactattaagagtcgctccaaaggtttgaaggacactgaaatcgatctatcaggaaagcctaccctagatgatgttttaaagcgaatctctgcaaacaatagaaacatcagcaagtatagaataagattgacctataagaaggaatctaagcaggttcctgttatttcagatactttttttcaagaggaggctaataattcaatggaatttttcatcaaggatttgggtccccagatctcatggagattagttttcttctgtgaatacctgggcccagttttgattcactcacttttttactatctatctacaatccctaaggttgtagagagatggcatagtagtagttctgagtataatccctttttaaatagggtcgcttattctttgattgtagcacattatggtaagagactgtttgaaactttattcatacaccagttttctttagctactatgccaatctttaacttgtttaagaattgtttccattactgggttctaagtggtatcatttcattcggctactttggttacgggttcccatttggcaatgctaagttgttcaaatattattcatatctgaagttggacgatttgagtacattgattagtcttttcgtcgtttccgaattgtggaacttatactgtcatatcaaattgcgtttatggggtgattaccaaaagaagcatggtaatcctaaggttcgtgtcccattaaaccaaggtattttcaatcttttcgtcgctcctaactataccttcgaagtctggtcttggatttggttcactttcgtcttcaagttcaatctatttgctgtttttttcttgactgtttcaacagcccaaatgtacgcatgggctcaaaagaaaaacaaaaagtaccatacaagaagggccttcttaatcccatttgtcttctga

SEQ ID NO: 414 - DNA, 993 bp, Saccharomyces pastorianus
atgtcattcagaccaggtagtagaggtggttcccgcggtggttcccgtggtggtttcggtgatagaggtggcagaggtggctccagaggtggcttcggtggtagaggtggttcccgtggtggcttcggtggtgacagaggcggcagaggtggcttcggtggtagaggtggtagaggtggttctcgtggtggcttcggtggtgatagaggcggcagaggtggcgcccgtggtggtgctgccggtggtgcccgtggtggtgccaaggttgttatcgaacctcacagacatgctggtgtctacattgccagaggtaaagaagatttgttagttaccaagaacatggccccaggtgaatctgtttacggtgaaaagagagtttccgttgaagaaccatccaaggaagatggtgttccaccaaccaaggtcgaataccgtgtttggaatcctttcagatccaagttggctgccggtattatgggtggtttggacgaattattcattaccccaggtaagaaggttctatatctaggtgctgcttccggtacttctgtttctcacgtttcggatgttgttggcccagaaggtgttgtctatgctgtcgaattttctcacagaccaggtagagaattgatctctatggctaagaagagacctaacattattccaattattgaagatgctagacacccacaaaaatacagaatgttgattggtatggttgactgtgtcttcgcagatgttgcccaacctgatcaagctcgtattatcgcattgaactctcatatgttcttgaaggaccaaggtggtgttgttatttctattaaggctaactgtattgactctactgttgatgctgaaactgttttcgctagagaagtccaaaagttacgtgaagaacgtatcaagccattagaacaattgactttggaaccatacgaaagagaccattgtatcgtcgttggtagatatatgagaagtggtttgaagaaataa

SEQ ID NO: 415 - DNA, 1896 bp, Saccharomyces pastorianus
atgcacagtgctggtgatgatcgaacaaagagtgatcatactccgtcggtcagccatccagaccactcgattattttgatagatagtgacaaggaggaagacgcttctatccgcgaggcaaacttgccagtgaggttgtatccagacagaagagtagggagacgacgtgatgctctgaatagatttattagatcggatacagcggatgcgactcctcagaggattaatacaacagtacgttcagattgccccgacactcaaaatgatattgatgacgtaaccataatacgagaagttgggcggtttttcggggatgatgggcccattgatccctctgcgcactacgttgatcttgaccaagaaccaggctctgaaacagtagaaactccaagaataatacaagtaaataatacgaatgggtatttaaatgaaaattctaacgagaacaataacgataacgataatgataacgatgatggattgacaatagttgaagagaggacaacacgacctagaataacgctaaatctgccgggcggagaaaggcttgaggttaacgcaacgccaacagacataccgacacgcaggtcgtttgagtttcaagaagacttggctgcatcacgtaggcagctcttaagaagaagtgcagcacgagctcgtaatttgtttgtggaacggtctgacgaagatgatgaaaacgatgaagaatggacggaaaataccaatgacttgcctgaaactattcaaagggctcgtagagagagccatatgcgaatgagccgaagggttgcagaaagacagcatagaataagagcacaacaacagaggatggtgagtaacgacaatatgggtacaggtattaggctgcagtcaatcagagaacggattcaagcgtatgtcccagacattcgcagtgcttttcatcatgcagaatcactacatgagttcaggtccattctacaaaatgttgctccagttaccttgcgagaatgtgagggagagctaatggcattatttactgaatttagaaaccaacttttacaaaactgggctattgatagagttagaaacacacaggaagaggctttaaggcttcatcgggaagcattggaaggacaagaaagagtagccagaggagctttccatcatggggggccgtatcgtgaatcgatttcgagctatctaaacttcaatggtgaggatggcttcttaactcgtctgtggggtggtccggtactaaatgaagctgatgaagagcgccacactcaaaatattattgatatgattcaagagagagaagaacgagaacgagacgtggttatgaagaacttaatgaacaagaccaaagcccagcaggatgaatttgaagagagagcggcaaacttgcctgaaggatatagtgcttcatttgataccacaccaaagatgaaattagatatcatgaagaatgggaaggaagaaactatcactgttttagacgatgatctggccaaaaccctggaagatatttcagtatgctgtttatgtggcgtagaattgggtgtaggaataccggacgatttcactgggatgagccaaaaagatcgtggcatttcatttgaagggttagtatcgagatacaaatttcattgcccataccaaactttagcgagaccctcagtattggatagagatttatcaaagcgaacatttgttgcatcctgtggccatacatattgcggcaggtgttacgccagaattgacaatgcaaagaagaaatctaaatcccccaaaaagaaattggccgagctgaaaggttcagctcatcctgataactatgggcccaaattatgccccgcggaatcgtgcaagaagctgattcgctcaagaggaagattaaaggaggtttacttttaa

SEQ ID NO: 416 - DNA, 702 bp, Saccharomyces pastorianus
atgatactttccaataagagaaatgctagaattttaagcataacgatgctactattgttattagttttctttatagcacagaatgcgaactttctggcaatagagacaaaggaagaggagaagcccccacagttatttagtgttggtagggataatatagctggtagatcgtcaaggggaactgctgccgtgccaacatctaccacaaagaagggaaactctgaagtagatgaagagattaacgaaataaagcaaagagtgggactccagcagcccatagcttcggcggatgacagtttgtctgctatcaagagtgataaaggtacgggaacaggtaaaggattcaatgtgcaacaggaatactcgctcatgttagatttggcaccggtcataatattcagtaagagtgtctgttcatatagcaaaggcttaaaagaactgcttgaaagtgaatatcaattcgtaccgaactattacatcatagaacttgacaaacatgggcatggcgaggagctccgagaatacatcaagtccgtgaccggtaggggaacggttccgaaccttttgatcaatgggatatcaagaggaggtagtgaagagattaggagattgcactctgaaggtaaacttctagcttcactgcaagagtggagcggtggaaaattcactgtcgagcaacgtgaaaagccttcaaacaattga

SEQ ID NO: 417 - DNA, 1314 bp, Saccharomyces pastorianus
atgggtcaaggtgtatcatcaggacaagacaaaaagaaaaagaagggctctaatcaaaaacccaaatatgaaccgcctgttcaatcaaaatttggtcgtaaaaaaagaaaaggaggtccagctacagctgagaaattgcccaatatatatccaagtactcgttgtaaattaaagcttctaaggatggaacgaattaaggaccatttgttactagaagaagaattcgtctctaactctgaaattttgaaaccgtttgagaaaaagcaagaggaggaaaagaagcaattggaagaaatacgtggaaacccactgagcatcgggaccctagaagaaatcatagatgacgatcatgcgatagtaacaagtccaaccatgccagattattacgtatctatcttatcctttgtcgacaaagaattactagagcctggttgttcggtactgttgcatcataaaactatgtccattgtaggcgttttacaagacgatgctgatccaatggtttcggtgatgaaaatggataagtcaccaacagaatcatacagtgatatcggtggtttagaagctcaaattcaagaaataaaggaatccgtggaattaccattaactcacccagaattatacgaagagatgggtatcaaacctcctaagggtgtgattctttacggtgctccaggtacaggtaaaacactgcttgcaaaagctgttgcaaatcagacatctgcaacattcttaagaattgtcggctctgagttgatccaaaaatatttaggagatggacccaggttatgtaggcaaatttttaaagtagccggtgaaaatgctccaagtattgtcttcattgatgaaatcgatgctatcggtaccaagagatacgattccaacagcggtggtgaaaaagaaattcaaagaaccatgttggaattgttaaatcagctggatgggtttgacgatagaggtgatgtaaaggtcattatggctactaataagatcgagacactagatccagcattgattagacctggtagaatcgatcgtaagattctatttgaaaatccagatctaagtactaagaggaagattctaggaattcatacttcaaagatgaatctgagtgaggatgttaatcttgaaacattggtaacgacaaaggacgatttatcaggtgcagatatccaagctatgtgtacggaagcaggtttattagctcttagagaaagaagaatgcaagtcactgcagaggacttcaaacaagctaaggaaagagtcatgaagaataaggttgaagagaatctagaaggtttatacttgtga

SEQ ID NO: 418 - DNA, 846 bp, Saccharomyces pastorianus
atgagcaacgattctgaaactttagaaggagctgaaacaccctatgacataagttatagagttggtgtagcggaaaataaaaactctaagttccgtagaacgatggaagatgttcatacatacgttaaaaacttcgcatcaagattagattggggctattttgcggtattcgacgggcacgcaggtattcaagcctcgaaatggtgtggtaagcatcttcatacaattatagaacaaaacattttagccgatgaagcacgagatgttagggatgtattgaatgattcattccttaccattgataaagaaatcaatactaagctttttggaaatagtggctgtactgctgcagtttgtgtaatacgttgggagttgcccgatgcagcttccaaagattcaatggatttaactcagcatcaaagaaagttatatacggcaaatgttggcgactctcgaatagtactatttagaaatgggaacagcataagattgacgtatgatcacaaggcatctgactccttggaaatgcaaagagttgaacaggcaggcggactaataatgaaaagtcgtgtaaatggtatgctagcggtaacgagatcactaggcgataaatttttcgatactttggtagtaggaagcccatttacaaccagcgtggaaataacttctgaggataaatttttgattttagcatgcgatggattatgggatgttattgatgatcaagatgcatgtgaactaattaaggacattaatgagcctaacgaagctgcgaaagttttggttagatatgctttggagaatggcacaacagataatgtgacagtaatggttgtcttcctttaa

SEQ ID NO: 419 - DNA, 1191 bp, Saccharomyces pastorianus
atggtagtgcaaaatactccggttccatctgttcatacatctagttcactagaacaaggaaaaagtacaaagacaacgacatataagaacaagcttaccgtttgttttgatgatatcttgaaagttggagcagaaatgatgatgcaacagcaattgaaaaatgtacagttagattcttaccttgttaatggttttagtcaatctcaacaaaaattgttaaaagaaaaagtcaaattatttcacggaattctggatgatttagagacttctttgaaccagagctcttcatacgtaaagactctcacagcactaggaagagagaaggaaaaggaaagggaagaagctgaaatgagaaaggctgaggaggaaaatctgagaaaacttaaagagcaagaagaattgaagaaacgtcatgaactagaagaagcttcccaacaacaacaacaacaacaacaacagctgaagcagcagcaaaatccaaaagagagcgatggtctcggccttgattttcccgcagcagcaccttcaagcgcagtaggtaccaaccataggaggcaaaataaccaagaacatggatctctccaaccctctaaccaaatacaaagtgaaaacacaaataatgctcctactagtggcaccaatttctcccctgtagccgctactcagagtcagggtcagcaagggcagccttcggatgcaatgtttaatgatttgaattccatggacatttcgatgttttcaggactcgataatgcggctttcgactcaacagccttcaatgcaccagcgaatggtacgaagggtcttgaagatagtaatttatctaatactaacaatgatattaacataccctccgctaataataatatgagcacaaataccagtagcaatagcaacaagaataataacattaacattaacagcaacaatagcaacaacaacgataacgacaacaacaacaacgacaacaataacaacaacagcaatgacaacaataacaccagtgacaatggaaacaatataggcagtagtgacttacagacagcaaacgtccccaatactggagataacccccctccagctgacaacggtgatgaatatttgacattaaatgatttcaacgacttgaatatcgactggtcaacaacaggggataatggcgagttggaccttggtggcttcagtatatag

SEQ ID NO: 420 - DNA, 483 bp, Saccharomyces pastorianus
atgttgcgttcgactgttggcaaaagcaccctaagatcattgaatttcgttgctaagcgtgcatatgctgaagctgccgctgcaacaccaagtttgaaattgcaatttgcattaccacatgaaactttatatagtggctctgaagtgactcaagtaaatctgcctgctaaatcaggacgtattggtgttttggccaaccacgttcctactgttgaacagttgcaaccaggtgtcgttgaagttatggaaggatccaagtccaagaaattcttcatatctggtggctttgcgacagttcaaccagactcacaattgtgtgtgactgccattgaagctttcccattggaatccttttcacaagagaatataaaaaacttactaacagaggccaagaaaaatgcaagttcatcagacgctagagaagccgcagaagctgcaatccaaatagaagttttagaaggcctacaatctgtgttgaagtaa

SEQ ID NO: 421 - DNA, 1704 bp, Saccharomyces pastorianus
atggctacagaaaacccccaacgtctcactgttttgaaactggccaccaataaaggtccattagctcaaatatggctagcctcaaatatgtcaaatatatcgagaggttccgccattcaaactcatattgctgaatcagcaaaagaaattgcaaaggcctccggttatggtgatgaaacagaaaacgtagaacacatcactctacgaacctcaggtgaattattacaaggtatcgttcgcgtgtattctaagcaagccactttcttacttacagatattaaggatacattaacaaagatcagcaccttatttaaaacaaatcagggagtgcatgttacagtgagcaggctaaatactgtcacgagggttgaccaattgattttagaagatgcggtgacagaaagagaagttttagttactcctgggttggaattcttagatgacactacaatacctgtaggattaatggcgcaagaaaattcaatggaaagaaaagtacaaggtgctgccccttgggatacatcactggaggttgggagaagattcaacccagatgaagaccttgagcataatcacatgtctagtatggaccttgatttcgatatcgaagaaggcccaatgacttcaaaatcatgggaagaaggaacaagacagagttcacacaattttggtgcacatgaaaattttatacaagatgacgattttcctcttggtgatgctgcaaacgccgattgggatctggggattactgaaaacaatggtcaaagcgataatagtgacgatcattccgttgagcaaggtagaagggtcgatgggtcgatgatgtctgaagaacctacagactttaattttaacttagaaattgaaaaggatgcacccatggatgacatggatttatcgacaggttccctattagaaccacagcagtccaaacaaattagaagaagaagaaattcccagttattaaatacaaaaaatattcagctcgatgaagaaacagaaaattcggaaagtccgacttcttccaacaattacaaccaacaaggatcaagtaattcactcacagctcaacgtgtcaatataacaactaaaagactatggagtgaactcgccgaaaacatggcttacttaccggattcaatctttaagaactttttatcgtacaattctctaaagaaaagaaaagtacaaaatataatagaagggtcaattgaagaacctgagctaaacatgtcattggacctcaatgaagatgtaataagcaacgcggccgtaagcgatggtagtttcaatgatttggatgaggatgttgctggctttgagccgattgacgctgatttaagtgaagctcctttcctagaagaagatcttgccagtacaaatacgggaagcgtagaaaccactacacaaacggaaaaagtccgcctagtgtctggtgaagtggcttctaaagctaccgttcaaatggcggagattttaagaagagaaataaccgcagagaaagaagtgatgtttacaaatgttttgagacaccagctaaatacttcttcagaaaatattactagaagagaagctagtaaaggatttttcgatattttatcccttgctacagagggatgcgttgatttgaaacaaaaagaaacgtttggcaatatcgtgatagacgccaaaccagctctatttgaaagattcattactgcttaa

SEQ ID NO: 422 - DNA, 612 bp, Saccharomyces pastorianus
atgtcagctgacgaaaaaaagcacagacttgaagaattgaaagatcagaatgtggtgcttggacttgcaatccaaagatcacggctttcagttaaaagacttaaattggagtacggcgttttattggaaaggttggaatctaggatagagcttgatcccgagctaaattgcgaagatccattgccaactctggcctcattcaagcaggaactgttgacaaaacctttccgaaaatcgaaaaccaaaagacataaagtaaaggaaagggatccaaatatgcccaagagacctacaaatgcttatttgttatattgtgaaatgaacaaagagaggatcaggcagaatgggtctcctgacgtgacaagagatttggctgagggttggaaaaatctcaacgaacaggataggaaaccgtactataaactctatagcgaagatagagaaagataccagatggaaatggaagtatacaataagaaaatatctagtacagatgcagatgacgataaagaagaaagtgaacaaaagataaaaaacaacgaagaaaagtcacccacgaaagtagatgagattaaagagggtgaagaagaagcgctgattgcctctaactag

SEQ ID NO: 423 - DNA, 2259 bp, Saccharomyces pastorianus
atgagcaaagttaatacaagtcaagggcctgtggctcagggccgtcaaagaagactatcatcactgagtgagttcaacgaccccttttcaaatgctgaagtatactatggtcctccaacagacccaagaaagcaacagaaacaggcaaagcccgccaaaattaaccgtacaagaactatgagtgtttttgataatgtttccccgttcaagacaactggatttggtaagcttcagcaaactaggcgtggttctgaagatgatacttattcaagcagtcaaggtaaccgtcgtttctttattgaagatgtcgataagacactgaacgaactattggcggcagaggacactgataaaaattatcagatcactatcgaagacaccggtccaaaggtcttgaaagtcggtactgcaaattcttatggttataagcatatcaacattagaggtacatacatgttgtccaatcttttgcaagaattgaccattgccaaaagtttcggtaggcatcacgtctttctagatgaagctcgtataaatgaaaaccctgtaaacaggttgtcaagattgataaacacccaattctggaacactttaactagaagaattgatttgaacaatataggtgagatcgcaaaggataccaagattgatgctccaggggccaaaaatccaagaatttatgttcctattgattgtccagaacaatatgaattctatattcaagcttctcaaatgcatccatctttgaaattagaagttgaatatttaccaaaaaaaattactgcagaatacgtcaagtccgtcaatgatactcctggtttactagcattagccatggaagagcattttaacccttctactggtgagaaaaccctcattggttacccctatgctgttccgggtggtagattcaacgaactgtacggttgggactcctatatgatggcactaggtcttctagaagccaataagactgatgtcgcgagaggtatggtagagcattttatattcgaaattaatcactatgggaaaatattgaatgctaacagaagttattatttatgcagatcacaaccaccgttcttaaccgaaatggctttagtcgtcttcaaaaaactcggtggtaaaagtaatcctgatgcggtgaatttgttgaaaagagcctatcaagctgccataaaggagtacaaaaccgtttggactgcatccccaaggcttgacccagaaaccggcttatcaaggtaccaccctaatggtcttggtattcctccagaaactgaaagtgatcattttgataccgttctactaccatatgcatcgagacacaatgtctctttagatgatttcaagcaactttataatgatggtaaaataaaggagcctaaattggatgagttttttcttcatgaccgtggtgttagggaatctggacatgataccacgtatagatttgaaggtgtgtgtgcctacctggccaccattgacctaaatgctcttctttacaagtatgaagtcgatattgcaaatttcgtgaaggaattctgcgatgataaatatgaagatcctttggatcattctataactacttctgatacatggaaagaaatggccaaaacaaggcaacaaaagattacgaaatatatgtgggatgacgagtcaggctttttcttcgactacaatacaaagatcagacatagaacatcgtatgagtccgcaactacattttgggcattatgggctggccttgctactaaggaacaagcacagaaaatggtagaaaaagccttacctaaattggaaatgcttggtggtctagcagcgtgtacggaacgttccagaggcccaatttctatttcaagaccaattagacaatgggattatccatttggttgggctcctcatcagattctcgcttgggaaggtctccgctcttatgggtacgtaactgttgcaagtagactagcttatagatggctctttatgatgacgaaggcatttgttgactataatggtattgtggtcgaaaaatatgacgttacaagaggcacagacccacatcgtgttgaagcggaatacggtaatcaaggtgcagactttaaaggtgcggctactgaaggctttggctgggttaatgccagctatactctaggtttaaaatacatgaacagtcatgcaagaagagcacttggtgcttgtattcctccgatctcgttttttagcagtttgaggccccaagaaagaaacctctacggactttag

SEQ ID NO: 424 - DNA, 2718 bp, Saccharomyces pastorianus
atggaccagccaaggacccattcaggacccacaacggccagtaatcccgctcccagctccgccaactcatcatcttctcccgccacggccaaatccaaacaggaaagaccctccgcgtcaatgtccaaaccttcgtccgtggcaccttcccaagactcaccagatggcaacgctatcgccaagacccaagccgccgcttttaaaaacgacatgaaaaccggtgattccggtacgatagatgggtcatctcagaatatgattcccaacagggcttcaatgcaaaagtatacggaccaatcgtcggacctgctgtccaggagttccggtgttataaccccgtccatgtctttgaatacgggcactgctaccaatagtgatagcagtggcaacgcagctggtagtagtaatccagagattgccactgatagggacaacactctattcaaaacatttgacaaaaaaactggtcagtttttgaaaagcgatagtaacgacgaagaaatgagggcaaataagaaagttgtctccttaccacccaaggatactcatacgaatatgaacaattcatctccatcaccacctccctcttcgcaacagcctccttctgcgtcagctctacaactgccattggcttcgcagcaacagcagcaacagcagcaacaaacagcggggaatgcttctaattttttaaggattttttcaaataataaaatgagatcgcattctgtacccactattttgcattcttctttgagaaaattatcgtctcatacccaatactatcgtaatcaaaatattcttttaaatcaccaaactccttctggaatatcgaagaaaaaatttcccagaaatcatcaccaaccttatctgcattctaacaaccctcttagtacaaaccccctctcaataaaacgcgccatttttctaaatcaacagatatccaacagctctagtagaaataatgacaacatcaacgacaccacagccaattcgatagcaaattcaaatctcaatacaagatcagattttgaattgactttggaagacagaataaactacataaaggctaccccaacaccggtcccatttcctccgataaacttacagggcttaaaggagatagatttgcaagaaatcttgaaaaatcctcagcttagacacgatatcatattcgacccgcttttgcaattcagaccgaatcttgatggtgaaagaggtaataaaaaaagacaattagctgatatctactggaacgacgttcaaaatgaaatctacgtttattctaaaaaacctgaaatcttccagtacaacaggtcaagactggttccactttttgatactctaagggatgtgctactaaccatagtgccacaaaaagaatctccgatgataaataatgttttagacactgaattgaacattcaagaactactaaagggttcgctaataatgtcaaacctgtcaggttggttagccgatctatttaagcatcattgtgctcccatgagagatccgtgggtagacaaaatgagcaacaaattcaaagaagctgaaagagattcttctttaactagattaatagaaggtttaagattggtcttccaaattttggaaacaatgaaactagatatcgccaatcaccaaataagaatactaagaccagccttattgagtaatgctgtggaatttgaaaaacagtatttcaacactcttatagcctcaaaaagggtcaatttaaacacttcgttactttggtttgacaagaaattcaacgagaacgtttccatgggccttgtcaataatcctaacctcgtcactatcccagacgtctacaaaatttgcattagaagtataatcaacctactatcatgtagaaaaatggtcagagactacccgactccactttcgtttgatcatgcgaggttgatccttttgcgtgcggatattcgtcaaattgtttgcattttggtctgccgcttgctatttcaacaattagtagccaacgatacttcaatgaataaagccacaaaggaatacgtcattcatacatacacgacaaaaaggttgaaaaccgaaatcattagtatcataacagatgaacatggtaattgcagatggactaagaacacaatgtctatagctgttcatctttgtaaaatcatcgatgatcttcacagagagtacgacaacaacaacaacagcaacaacaacaacaacaacattggtgaccacgaaaagtctgcaagaactcaattaccttcattggacaacgccaaaatcacatttgctaaatcatggctatccaaacaaactcagccactcagtgaagtttatggtgtactagaaaatagagtattcaaatcgttagaggactctatttccagcaaatccgaatgtaccattgatggacgtgttaaacaagatttcgtctacctttacaacacaaataatggcaacgtgaatggcacaaaccatccgaccaccactacggatgccagcgtcaaaatcagcccctccttaatgtctccttctaaatcctctaccaccggccctagtagtaatacggctgcgtctaggggtttattcgcagcaacggagctggatgaattcgacaacgtctaccgccatttatatgcattaataaatcttcattggtccgtttttggtcctcattatattgaaatgttaggagacaaagttagcaaaaagggaatataa

SEQ ID NO: 425 - DNA, 4485 bp, Saccharomyces pastorianus
atgagcaatactaaaaatgcacatggcggcataagtgctagtcccttgactagtagctcgagcgcctcgtatgcagcttcagaagtgtccttttccggcagtactcacaacaataatgagcagaataaagactccaaaacgctttcacagcatgcaagggacagcatgagccagatcagcattgcggcgtctaatatgacaccagatgtcatttccaaagtggaatctatggctgatgcactatcccgtcatacaacaaggagcggcgcctttaatatggattcagacgatggattcgacgcgcacgccatctttgaaagtttcgttagacacgccgatgaacaaggtatccatatccgtaaagccggtgtcaccatagaggacgtgggtgctcaagggttcgatgaaagtgccctagagggcgctaccttcggtaacatattgtgcctacccttgaccatcgtcaaaggtatcaaggccaagagacataaaaaaatgagagacattataagaaacgttaatgcattagcagaggcaggtgaaatggtcttggtcctcgggagaccaggtgccggttgttcttcctttttgaaagttactgctggtgaaattgaccaatttgctggtggcgtcagcggcgaagtatcatatgatggcatcccacaaaaggagatgatgaagaaatataaggcagacgtgatatacaacggtgaattggacgttcatttcccctacttaacggttaaacaaaccttagactttgccattgcctgcaaaacacctgcagtaagagtcaataacatttccaaaaaagagtacattgaatccagaagagacttatatgccacgattttcggtctaagacatacttatggtactaaggtgggtaacgatttcgttagaggtgtatccggtggtgaacgtaagcgtgtttccattgcagaagcattagctgctaagggttctatttactgttgggataatgccacaagaggtctagacgcttctacagctttggaatacgcaaaagcgattcgtattatgaccaatttgttgaaatccacagcatttgtcacaatttatcaagcaagtgaaaatatatacgaaacttttgataaagtcactgtcctctattctggtagacaaatttattatggtccaattcatgaagcaaagccatatttcgcaaaaatgggttacatatgtcctccaaggcaagtaactgctgaatttttaactgcactaacagatccaaatgggttccataaaattaagccagggtacgaaaacaaagttccgagaaccgcaaaagaattcgaaacttattggacaaattctccggaatttcttcaattgaaaaacgatattgctgcttacaaagcaagagttaataccgaaaaaacaaaagaaatttatgacgcatcaatggcccaagagaaatctaaatacacaagaagcaaatcctactacaccatttcatattggcaacaaatcaggctttgtacgcaacgtggatttcaaagaatttatggtaacaagagttatacgatcatcaatgtttgttccgccattattcaatcttttattaccggttcattatattacaacaccccttcatctacttcgggtgcattctcaagaggtggtgttttgtatttcgctctattgtactactctttaatggggctggcaaatatctcttttgatcatagaccaatcttgcaaaaacacaagggctattcgttataccatccttcagccgaggcgatcggttccactttagcatctttccccttcagaatgattggtttaacatgtttcttcattattttattcttcttatctggattgcacagaacggcaggttctttcttcactatctatttgttcctagtcatgtgttcagaagcaattaatggtttatttgaaatgatttcctccatgtgtgacactctttctcaagcaaactctatctccggtattttgatgatgtccatctccatgtactctacatatatgattcaattgccttcgatgcacccatggttcaaatggatctcttacgttctgcccattagatatgctttcgaatctatgttgaatgcagaattccatggtagacatatggattgtgctgacactttagtacctagtggaggaaattacaatagtttatctgatgactacaaagtttgtgcattcgttggttcaaaacccggccaatcctacgtgcttggtgatgattacttgaaaaatcaatttcaatatgtttataaacatacttggagaaactttggtatcatgtgttgctttttaataggttacgttgttttaaaagccgtttttacagagtacaagagacctgtaaagggtggcggtgacgctcttattttcaagaagggatccagaaagtttactgcaccagctgacgaggaatccccagataatgtgaacgatatcgatgcaaaggagcaattttccagtgaaagtagtgccaacgatgatgtttttgaagaattggaagctaagggtgttttcatctggaaggacgtttgctttacgattccgtatgagggtagcacgagaatgcttttggacaatgtttcaggttactgtattccaggtacaatgaccgccttaatgggtgaatctggtgctggtaagacaaccttgttaaacacccttgctcaaagaaatgtgggtataatcaccggtgatatgcttgtcaatggtcgccccattgatgcaagtttcgaaagacgtacaggttatgtccaacaacaggatattcatatcgcagaattgactgttagagaatcgttacagttttctgctcgtatgcgtcgtccacaacatctacctgattctgaaaaaatggattacgtagaaaagatcatcagagttctaagcatggaggaatatgcggaagctcttgttggtgaagtgggttgtggtttgaatgttgaacagagaaagaagttgtctattggtgtcgagttagttgctaaacctgatttgttattattccttgatgaacctacatcaggtttggattcccaatcttcatgggctattatacaactattgagaaaattatcaaaagcaggtcaatccattctttgtaccatccatcagccttcggcaactttattcgaagagtttgacagattactacttctaaaaaaaggtggtcagactgtttatttcggagatattggtaaaaattcatctactcttctagaatattttgaacgcaatggagctagaaaatgtgattctagtgaaaatcccgccgagtatattttagaggcaattggtgcaggtgctactgcttccgttaaggaagattggcatgaaaaatggctaaactcctctgaatataatcaaacacaagacaaagtacaagaactaattgacgatttatcaaaacaagaaaacaaaccggaagtcggagacgagccttccaaatacgctacctcttattcttaccaattcagatatgttttaatcagaacgtctacctcattctggagaagtttgaactatattatgtcaaagttgatgttaatgctggtcggtggtttatatattggtttcactttttacaatgttggtaacagttatgtgggtttacaaaacgcaatgtttgcagcatttatttccattattttgtctgcgcctgcaatgaatcaaattcaaggtcgtgctattgcatccagagagctttttgaagtcagagaatcccaatctaatatgtttcactggtccctagtattgatcactcagtacttgagtgaacttccataccatttacttttctcgacaattttcttcgtctcttcttatttcccattacggatattctttgaagcttcaagatctgcggtatacttcttaaactattgtattatgttccagttgtattacgtcggccttggtttgctaatcctatacatgtctccaaatctgccatcagccaacgttattttaggtttatgtttgtcgtttatgctttcattttgtggtgttacacagcctgtttcattgatgcctggcttctggacttttatgtggaaggcttctccatacacctattttgttcagaaccttgtcggtataatgctgcacaaaaaaccagtcgtatgcaaaaagaaagaattaaactactttaacccaccagatggttcaacgtgtggggagtacatgaaaccattcttagaaaagtctactggctatatcaaaaatccggacgctacctcagattgtgcatactgtgtttatgaggtaggtgataactatttgacacacattagctctaaatatagctacttgtggagaaactttgggatattttggatttacattttcttcaatatcgtcggtatggtgtgcgtgtactacctcttccacgtgagacagagttctctcctaagccctaaatttatgttaaaaaaaataaaaaacataaggaaaagtaagcaatga

SEQ ID NO: 426 - DNA, 627 bp, Saccharomyces pastorianus
atgtatggagatctagccaataagctggttttagaagccaagaggacgaaacaattgtacacaagaagcaaccagaatgccaagctacctatgtatcacgaagatataatacgaaatatcttaaaggaaatttcgaatctacgcaaaaatacagagtacctaaaagaacaacaacaattgggtaagctcgacgacaaggtggccaagtgtcaatacttcgtcacgttattatgtatggaacgaaataagagatgcctcttggcatatcacaaattaaggactgatatgctggattctatggcttggaataataacggcctagacttgatgaatagcatagcttttagtcagcaggatacaaatgacctttctcatcaagagcaagagtatctaaaagaatactcggatttgatcactgagctgaaaagtggtgatctggctgatatcgatttctctggctctttggtacctccgagtgatgtttttatcgacgtcagagtcctcaaagacgctggcgaaatccaaaccgaatatggtgtgttcaacctaatcaaagattctcaatttttcgtaaggcaatctgatgtagaacgattaattcaacaaggttacctacaaaagatatga

SEQ ID NO: 427 - DNA, 3174 bp, Saccharomyces pastorianus
atgaatacttctgacaaaaatcatgataaaaaacctaatacgtcgagagaacaactgcaacccttgcaccaaaaagagtccgaagaatgcataaaaacgctaaaagatcttaatgtgccagagacgaagaaactttcttcggtcttgcatggtagaaaagcaagtacgtacttgagaattttcagagatgatgaatgtttagccgataacaacaacagtaccgataataataacaatgagaaatcttcgtcttacgcgggcaaaaagccaaggtcaaaatcgtcttccaaaccgatatcagaagcattacggccctcaaacaaaaaaacatactcagacgctttgtcttcatcattgtcattgtcatcttcaattctatcacaccacgagaaaccggcaatacagcacaacgagcacgtggcgcagggcgataatattaacacgatcaatgagggggttcaagtctctgatgaggatgttgggaaacaacaatcgcaccaacagcagatgatacatcaacaaacctttccaaaaacaagccaagatatagatgacggatccatctcacctaaatccacttaccagaatactctacacggactatcagaggatttaacactgaaacctgtctcttctgcaacgtactaccctcataaaagtaaagctgattctggttatgaagaaaggggtaaaatggaaaatgatatcgacaccattcaaccttccaccataggtttcgtgcctagcatagcaacactacccaggacatacaataggcacacctttagagtcaagactcattcggccttgtcacagtccttgaagcaagaaaacatcaacaatcgtggcattaatcaaaatgctcaacaatctgaatctgtgcagcaaggcgaaccaaacagaaaacaaatcaaacctcctgcacagaatagcaaagatgagcaggaggaagaagaggaggaagatgagcatagggaatacccattagcagtagagctaaagccatttacaaatagagttggaggccacactgccatatttagattttcgaagagagccgtttgtaaggcactagtgaatagagaaaatagatggtatgaaaatatagaattaagtcacaaagaactgttgcaatttatgccacgttatatcggtgtcctgaatgttagacaacattttcagtcaaaagatgattttttgaatgatttagatgagggagataacaataacaataacaatagcaataacaacataaaaagtaatatttatcgcaatggaaatgacgatgccccaattaacgcagaaccaacagggactcccttgaaccacatacattcttttcccttggaaaactcatcgagacaaatgcttgaaaacacgcttcctgagacggaatcggttcaaccacatgttcagagatctctttcgagttctaaccaaccttctctactgcctgaagttgttttgaatgataacagacatattatcccagaatccttgtggtacaaatattccaattctcccaattcagcgccaaacgattcttacttttcttcttcttcttcccataactcatgttccttagacgatcatggcaatatgaacaaattaaaaagacgcgactctggatctacaatgataaatacagaattgagaaatctagtaattagggaagtatttgcaccaaaatgcttcagaagaaaaagaaattctaacacaatttccacaggaaaacacaattcgcacacagattcaaacccaccttctcacctgcaaaaatcgcgagcttcatcgcatgatgcctcgaatacatccctaaagactctcgatgattcatcgtcattagcgaacttagatttacaaactggcaattctaattccggttcaagtccacatggcccactgctaaaaaagtcgcttcatgaaaaaatatccaatgcattagaaagctcgcattcagttatggatttgaagcaatttcataagaacgaacaaatgagacacaaggattcattttgcaacactttgtcgcccattttgactgcatctaattcgagagatgatagcgagttcagctcttctcctaatcatgccaacaacacacaagaaggtgtatttgatatggatgaagatacggggaatgacacgataaagatagatagccatgatcagtgtggcgcccctgatactaacatgattataaaatcattgggttataacgtttcaaacgactacagccatcatgacattgaatcagtcacattcgaggaaacatcccacaccattgtctctaaattcattttattagaagatttaacaagaaacatgaacaaaccgtgtgcattcgatctaaagatgggtacaaggcaatacggtgtagatgctaagaggaccaaacagctatcacagcgtgctaaatgtctaaagactacgtccagaagattaggcgttagagtctgtggcctaaaagtttggaataaagattattatatcaccagagacaagtatttcggtagaagagttaaggttggttggcagtttgcaagagttcttgcacgattcttatatgacggtgaggcaattgaaagtataattaggcaaattccaaggctaatcaaacaattagatactctgtattctgaaattctcaatttaaaaggttacagattatacggtgcatctttactactaatgtatgacggcgatgccaacaaggcaaactataagaagaagaacggcgctcgtgtgaaagttaacttaatcgactttgcacgttctgtaaccaaagaagatacaatggaatgcctggataaattccgcataccaccaaaatcaccgaatctagaagacaaaggattcttaagaggtataaagagcttgaagttttatctgttactaatatggaattatctgacagctgattcgccattaatttttgatgaaacagaaatgactgatatgattaatgatgagacagattcgaataatacttcttcctctgcgggtcccaaaaccaaatttagtgggaaatgggattggctggacgaatttgaccgagaagatgaggaaatgtataatgatccaaatagcaaactaagacaaaaatggaggaaatacgaattgatttttgatgctgaaccaagatataatgatgatggcgaagttagtgattaa

SEQ ID NO: 428 - DNA, 702 bp, Saccharomyces pastorianus
atgaataaacaagctgttgaagagagaagaattgtaatttcgattggcggggggcatgctaccggtgtgggagcaatcgcagtggagctacaaaacacttttaagaacctctttaattctattaatataagagtaataaacctggacaaaatgatagagggagatgtcaagagctacaataacggcgactatgattttgacaacattcttaacctagtatatgaaaagcatgctataacttcgcaaaatgacgtgatacagcatgactacgaggacccaatagatttaataatagtctgtggatgctatgctttatacgataaacgaatcaatgcaatctcccaattgaaggtattcttggatagtgatgcggataaaagattaatcagtttgatcaaaaaaaataaagtggataccaatgagcaactggctcaattgatcacggagtacatggaccacctgcgcccggagatgcagcaatacatagaaccaaccagagtctttgcagatctgatcattccttccacaaatgaaaacctgggccgcgctattcttgttgacggtatagtgaagacaatcgaggagacgagaagccaaatgggcgaagccaacaatgcaaacagcaaagtacgtccacgtttatgggattttgaagcagagacaatggacttagaaaaggatagatactacgatctgtcgtga

SEQ ID NO: 429 - DNA, 1200 bp, Saccharomyces pastorianus
atgtcgtttaacagagaagaagatcaaaagttgaaattcaaaacatccaagaaattaaaggtgacttcgacttttgaaagcatggatttaaaggaagatttacttcgaggtatatattcatacgggtttgaagcaccatcctctatccaatcgagagccatcacacagattatctctggtaaagatgttattgcacaagcacaatcaggtacaggtaagacagcaaccttcactattggccttttacaagctattgatttaagaaaaaaggatttgcaagcactgatactgtctcctacacgcgaattagcaaaccaaattggacaagtagtgacaaatttaggcgattatatgaatgtcaacgcatttgcaatgacaggtggtaagaccttgaaagatgacttgaagaaactccaaaaaaatggctgccaagttgtcagcggtacaccaggaagagtattagacatgataaaaaggcaaatgttgcaaacaagaaatgtccaggtattaatcttggacgaagctgatgaattgctgagcgaaactttgggtttcaaacagcagatatatgatatttttgctaaattgcctaagaattgccaagttgttgttgtaagtgcgacaatgaataaagacattttagaagtgaccagaaaattcatgaatgatcctgttaaaatcttagtgaagagagatgaaatatctcttgaaggtatcaaacaatatgtcgttaatgttgataaagaagactggaaattcgataccttgtgtgatatatacgactctttgaccatcacacagtgtgtaatattctgtaatacgaagaaaaaggttgattggttatcgcagcgtctaactcaatctaactttgctgtggtttcaatgcacggggatatgaaacaagaagagagagataaagttatgaacgattttagaactggtcattctcgtgtgttgatatccactgatgtttgggcacgtggtattgatgttcagcaagtttctttggtcatcaactatgatttgcctgaaataatagaaaattacattcaccgtattggtagaagtggtagatttggcagaaaaggtgtggctataaacttcatcaccaaagctgattcagcaaagctaagggaaattgaacagttttacgttatcaaaataaaaccaatgccagcaaactttgcggaattatcatga

SEQ ID NO: 430 - DNA, 594 bp, Saccharomyces pastorianus
atgaatatcactgtaactgtttatgataaaaacgtcaagcacaaattagaagaaaataaagccaatgacaagagaacaagcaacaatgatctgccaacatacaataatgaatctaagggcgctgacggaagtgattgtgccatgtttccgactaccataaagtgcttatttgaagatagtgaaggggaccctgcagacctaagcggtactgctttaacagcagggatagataaggaggaggatgaaccagagaatgtcattattgttcagttaaacgaatcaggatctctggaagatgtcacgctggtcagtgatcaatacgaacttctatctcacagagtaagcagccctggattggaggagaatcagttaagaacgcttgtatcgcataatagtgacgataaactaaatgatgatggggaaggagttagtattgacagcgataaactaggaatggacttggatttagaacttgacgtaatttcacagttctgtgacctatctccttctgttcgagagttaagcttaaatgacttgattaaactctacgtcacacaaaatgaacaattacaaatggtttccaactctatatga

SEQ ID NO: 431 - DNA, 1707 bp, Saccharomyces pastorianus
atggatagtgcgtcaagctcagtcgtaaaaaaattccagaatgataaagatcccaaggaatcagtagaagaggcggtactgaagtatgtcggtgttgacataaaggatcatggcaaaaagagtaagaagaggtcgaagaaacatgataagaagaaaaagcacggttcgaagaagtctcatagcgataaggatattgaaatggattggtttttgaagacgtctgaggcaaataattcacgcaaattggatgacattgaaccggattctgttgctatggctgccattgctgctgcatacaacagtacagtcaaagagaagcacaagaaaaatcgccacaaagacggttctggtagcaaatcagagaagaagaagcaccacaaatcaaaaaaattcaaagagagaacagcaaagataaaaatggttctcgatccagagttaagaacactagatgatgctctgacaacacctgcattttcacccgatgatctcattgctgaaacagctttcgataagtatgtagatgcggagaaggcatactcggtaagaaattcgagtaaaccaacacacgttgacgagaattcacaagaaaacaatgctaataatgctcttgtcaagaactacgccgaattagagagaatttcaagtaatggcagctacatcaagcgaacagcaaaaataccggagaaagatgttaaattagaagagccgcaaccaacatcagatgaggataaagagggtactgtgttactacgatctgacgttgttaaagcgtctgatatggatggtgctattacaaaatccataggcaggaaatttagtcctagcgaggaagatgctttggaccaatttattgaaaaatacatgcaaataagaaacctagatagacagcaaatgtgtgagagaatttggtctactgatggagttattagagatggattttgggcgaatatcagcaaagttctgtcttataggactagatcttcgatttataaacatataagaagaaaatatcacattttcgaacagcgtgggaaatggacaccagaggaagatcaagaactggcgagattatgtttagaaaaagaaggccactggactgaggtaggaaatcttttaggtagaatgcctgaagattgtagagaccgttggagaaactacatgaaatgtggctccaaaagaggatctaaaagatggtcaaaggaagaagaagagttactgacgacagtagtaaacgaaatgatcgaagaagcacacaattatcaaaggatgaaagaaactgaggcagctaacaacgaagatggatacaaccaaatgtataccagaggtccaaaggggaagaaggtcagtgataatcctactttcaaagatatgattaactggactgtggttagtgaacgtatgagtggaacaagatcccgtatacaatgtcgctacaaatggaacaaactagtgactgatgaagcctataagagcatgttgagcattccctcttccgaaaggaaatggttgttagaacaactgaagcagttcgccgaaacatcatactcaaatataaattgggacagtttagccgcttctaaacctgattccttaaggactggtcttgaacttagattatgttacgagcagatgagagaaaggattgaagggtacaaagaaagacccatggccgatataattaatatactactagaacagatgaattaa

SEQ ID NO: 432 - DNA, 2682 bp, Saccharomyces pastorianus
atgtccgtcaatgaagcacctcagaataaaggccagggacttcgaaaggcaagcactcgtcccaaaattgttatacccgagggatcaccttccaagaatagtgacgctgcttcctttaatatagaaggcgatacatccctcaacgatgatcttttaagtatatccggcagtgtcacaccaaaggcgagaagatcttcgagaatgagtctggattcattaacgccacgaagaagctttgattccagaactatatccgtcgccaatagtagatcttttggatttgagaacgaaacgcatagtggatccatggatttctcaccattagggaacaactctatttatgaaatcgttatgaatacaagaaggaaaaactggctgaattatccaactgtcgcagatataccaccggtgagcctaagcaaaacagaactagatgaccactggaaaagacacgtgaaagattatgtcgagaacatcaagaatgaatatcaaatatttcaaagtacaaataatataagaaacatgaaccaaatggagcaattaaaagagcttcgagaggaagacaacagaaacggagagtcatttgaagaaaaccttagacaaaatgattctgaactaataagcaatgtacccggcttctacttttccgacaagtttcaattagataaccctcggacgttccacaaggttttggacggaatcgatttgtttttaacgaagttagatatgaaagaacaagcccagagggaaggcgccttttttgagttgagggataaattaaatgattacttggatatcgtagaaacgttgctggttacggaaatatccaagtcgtcacataaattcttccacgcgctaagtgaggttgacaatattcagcaaagagcttatgatacgataagtgaactaaaggaattatctaaaaatatcaaaaccatcgatgatgagaatatcaaaaaaaaaatatcgcatctggagatgattttcaaaagaaagaatgtagagaagctggaacaggggctattgcaagcaaaactagtattaagcaagacggacgaatgcaaaacgctgtataacgaggagaaatttgatacctgtttagaactaataaaatcaatcgaccatttgatcaagggtaacgattcgaatgatggagatgttcaaaactggacccggccatggccatataagctgagtgatttgaaaaccatacctgccctatcggcaacaagagagtttttaacgaatatgaagatcgagataggagggaagtttagtctacaattatcaaaccttcttatagatgatttgaagtctttctgccaatcaatcgagaccaaagagacgttatgtagactaaaaagcggatctaatgataaaaaacagaccatattcaccgatactttttcctcagagatagaaggattgatagtcaagttaaatagatgtgaagagttaaccagtgccttcgacctctacagagaaaagtctattgctgagcttaaatctgttatcaagatttatctcccaactgaaaatgcatgcttagttgacaaagatggcaatactctcgacgaaaagcaatgtaacaacggctctacgagcggatccaaactttcacggctaataaaagagcaaacacccgctgaatttcagtctatgcttgtaaatatattcacacatgccttagaggctcttcgaagactttacgggcatcaaaaattactattagacatatctctcaatgaattagcatcagtgaagaacccaaacgaaaaccaacacaacatgattacgcagttggatattcgtaccggtattaacgaaatcattagaattattcaattacgtacaggtaaaattattgctgtaagaagagagttgaacatatcattgcggtacgactatttcctaaaattttatgccatatgtgttatttttattcaagagtgtgaaatattaagcggggaatttttaacaaaatatttgagtgacgttttagcgtcccagattaaacattatgcaaacgcacaaagctcaagaaactaccgcaatataaagaaaaagatcgacaccgaaaaatgggtaccgtacatcgtcgatccgtccatccaaagcgatgttaatgatattatatccagtatagacatagacccactaagatggacggctattttagacatgacacgtagtttctatgcttccgaaaacaacggaagtgaagacaaacgcaaagaggaaggggatgaagcgtcccaaggtcatagaaaatcggttgtcgttggcgataaaacatttgtggcgagtcagtctttactcactgccattgaaactataaaggaattgatggtgctttcaataaaccttccttctatgtatttgccgaattttgagaagttgtgttacgatgtactacaatattataatagtagcgccatggcttctgtcacacaacctggaaattcgcttttaaaaacgggtagaaacttatctattatgggagaatcattagattgccttgccgaatttgtggcaattgttcaaagcttttaccgaaggctttccaactccagcaaggattttgaaccgtttgatccgagccattatacgagcttactgggacaataccaaacttcatcgaacaaaatatacatggcgaatgcccctccaccacctgtatga

SEQ ID NO: 433 - DNA, 1524 bp, Saccharomyces pastorianus
atggatctatttttgcaatacagactgggcgacatttcatttgatgaatttcacagaagaacaattcaaaacgagtttgaaagaattctcgaagagccctcgttaaacttaaaaaactactgtttcagtagacggtccattcatgatacaggcaagagcactcacttaaatataggcgttagctgtcttgatattgataacaccggtcaagtgttattaggaggtggtgatgacggatcactttcagtatggggtttagatgaatcatctcatcaaaacgatgaaggtcaacaagaactaatcaacaaaagactaaatttcatcaaacgacagcctcaccaaaatgatagtgaacacactcaaacaccgtatcatgaggataaaaaacaacgattacatgattctaatgctacaagattagttcacagtttccaaacacaaagaaacaaataccgaatgtatagacaaagtactgcaacagattcgggttcaaggtcacatatgacaagtgcaaataacggctgcacaggcgttagaaacacttcactatcagaaactgatgcagaagatgtaatatcgcatcataggtatggaattactactttgaaatggtacagaacggacaatggcatgtttttcacaggatctaatgataagactgtcaaactatgggacacaaataggtttgaggcagttcaaaatataaatttagggtacaaaataaaccaaattgacaataacattgctgatagtagttctttgcttgtcgtagcaagtgaagactattacccaagactgatcgatttaagaaccatgaattcaggtatcaccacactcggaatgggaaacaagacacgaatgcagtccgaaatcttatgctgtaagtttaacccagtgagagaacagatcattgcatgtggcgacatgcagggcggaataaaattatgggatttaaggatgaggaataagttatatttgcaactgaaaagaaataaaaaaggactagacattataggaaacaataatgacagtggagatgatgtgtattttagttccaacgaatcgaacgctcatttgaaatgctgttgtgacattgtatggaataacgaaggctcggaattatgttctactggtgcggatggaaaattgattatttggagaccgtttactgagatactacgaaaagacgatattacgagttataagcagttaggaccgcaggatctgaaccgcatcaaatacaagaagagactttcacaaagattgctctggtttgacaagttcttactgtgcatcactgataatggggaaatacaaatatacaacacagaggaaggaaaactatggaacaaacttgaatacccaatggggcataatcaagtaaagagaagtttggcctcgcattgccaatttagttccatggccttacagacaaatatgatgaactctgttggtctcagactgttcttgggaactaacagcaacactgtcagtgatggagggtccatttttgagtgttcctga

SEQ ID NO: 434 - DNA, 597 bp, Saccharomyces pastorianus
atgccaagagtcgctattatcatctacacgctatatggccacgtcgctgccactgccgaagctgaaaagaagggtatcgaagctgctggtgggtctgcagacatctaccaagtcgaagaaactttgtcgccagaagttgtcaaggccctcggcggagccccaaagccagactacccaattgccacccaggacactttgaccgaatacgatgccttcctgtttggtatcccaaccagatttggtaacttccccgctcaatggaaggcattctgggaccgtaccggtgggttatgggctaaaggggctctacacggtaaagtcgctggctgtttcgtctccaccgggaccggtggtggtaatgaagccactattatgaactctctatccactttggctcatcacggtatcatctttgtcccattgggttacaagaatgttttcgccgaattaaccaacatggacgaagtccatgggggttctccctggggtgctggtaccatcgctggcagtgacggttcaagatctccttccgctttggaattacaggtacacgaaacccaaggtaagactttttacgaaactattgctaaattctaa

SEQ ID NO: 435 - DNA, 975 bp, Saccharomyces pastorianus
atgtctacctttgaaactttaattaaaagaggtggtaacgaagccatcaaacttaaccctccaaccggtgctgatttccacatcaccagtcgtggttccgattggttttggacatgtttctgttgttacttattgttcggcctaattttaaccgccttaatgttcagaaaacccgttaacgacagattcttctactacaccggtattgctccaaatattttcatgtgtgtagcttacttcaccatggcctctaacttgggttggattgcggttaaggctaaatacaatcatgttcaaacttctacccaaaaggaacatccaggttacagacaaattttctacgctagatatgtcggttggtttttagctatgccatggcctattattcaagtctgtttgctaggtcatactccagtatggcaaattgctttcaatgtttgtatcactgaattcttcactgtttgttggttaattgccggttgtgttcactccacttacaaatggggttactacaccatcggtcttggagctgccattgtcgtatgtatcagtgttatgactactacttacaacttggtgaaacaaaagggggataacaatattagaatcgtcttcctcactatcttcagcatcattatgttcatgtggatcatcgcttacccaacctgtttcggtattactgacggtggtaacgttttgcaacctgattctgccggtatctttttcggtatcatcgatctaattgttatgtgtttcatcccaaccttatttgttccaattgcttctaactttggtgctgaaagattgggctaccacttcggtgatgacgcttctgaatcacacgtggggtctttcactcctagaccagttgctagtccaaaaccagctgccactccaaagttaggtgaaaagaaggacaaaaagaagtccaagaagagcaagaaatctaagaagtctaagaagtctgaggaatag

SEQ ID NO: 436 - DNA, 2352 bp, Saccharomyces pastorianus
atgtttgaacctgtcaatatggatgaaagttccccacaagataaggagctggctaaatttctctccccaccgggtagttatctctctccagcttcactagacagcagttcatcattcacgaacggtggtgagcgatacaacacttcggctagctgttttgaaccaaaaagtaatttaccctctttgtcgtttttaaatgctagagcaggatctttaggtaccgtatttaatcatagacagatgacttcgcctctgaactctaatactagaagtgaaacttttgattcaagcgcgaacagtaataacagcagcgatagtaatgaaaatacaggatatcccgctagctcacaacaaagtgatgatgggcgttcttctttgactccaaatgccgctgtaacttcaactgtcagagataagaagggaaatacagttaagcgaaagtattccaggaatgggtgttctgaatgtaaaagaagaagaatgaaatgcgacgaaaccaaaccgacttgttggcagtgtgcaaggctaaaccgtgaatgcgtttacgttttaaatcccaaaaataagaaaagaagaacttccaatacgaacaggataaaagaatccagaaagcataacagtattcatgatgacgatcatcctcatggccctcacaagcgtcagcaccagtctagtaaacctgagaaaaaatcacttcgaccaaacttagatgatgactccacagacacaaagcaaattatagacagctctaagactgtgccgttgaatgagatagaatccttagagatcccaaaccttgaccccacgactactatgaacggttacgatgttaacttactaatgcaaaatttaaatgatatggttaatatgaagctgcatgattctttcttgttaaatgaagaactaaaagaattcgatttgcccgatctggacattcctgaactcttacctgcgccgaactcaaatagcactgtacctatatcttttttggtgaataatgtaataaccttcaatacaaagttaaattccttcaaactgggtggtatccacgataaatatctaaagatattttattacgactgtttggattctatcgccccattttttcaaaaccaaggaaatcctctaagagacattttactttcattcgctaaaaatgaggcttatcttttatcttctattttagctacaggcgcatccatagcatacagaaaatccaataacctagaggatgaacgaaactattgcgcgtatttatcacattgtctgagcctcttgggtgaacaattcaaaaatgaatcgaacgttttgaataggatagaacctattattctaacagttatcatgcttgcctgggattgtatttactcgatgaattcccaatggagatctcatttaaaaggtgtcacagatcttttcaaaaaaatcaattccgggaattcatcaaaagtactgaacgttgccaaaagctggtttaaggttatggagacatttgcaagtataagtacggtattagggggatctttaattgataataatgatctagacgccattttcgatccatatgattatcagtatgttgattcattaaaatttctgaatatcatgactccattaaatgagtttaatctattaagaggtcataaagaagatttcgaccttgttattaaggaagtctttaaatcactcaatacaattaggtcatctgaaaaaagttatttttcaaaagatgaaggtttgttcaccaagaaattagattattactttggtcgtctcacttcggccgaaaaatttaaagatcatttatcatacttcaatacacagaaaattttagtggagattgacaagcaactagattacgaatttatcaacaagacgggaattataccgtcagacaaccaatcacacccgaaaactagcaacattcacgacaatgccatcgatatggtgacattgaagaacggcgaagaaattgccattagttggtatgacatttcgcatcagacacaagttttatctttcttgttgattgtcctattaaaacttttgggtataccgaaagaatcaatcactattcaacaagtggtgaaaaggataatgtcattttttaaatttttaaacagtgattctccacctcacaattcaagaacttgctattgcaattttgccgtattgattgcgggtttaaacgcaatggacgaggagacaagggcgattgttaaaagatactataagatcaatggtggtaaattccaaagacttacagagcataaccttaatagactagaaaaggtttggtatggtaaagatcaaagttataggctagaagaacaagatgttttaacatggtag

SEQ ID NO: 437 - DNA, 159 bp, Saccharomyces pastorianus
atgagacatcaacaaccgcatatgaactacccccctcaacaacaaccaatttatattcaacaggctcctcctaaggaaaaatcaggcggctgctgcaaaacttgttgccattttctctgctgcctctgcttgatcaacctatgttgtgacgttttctga

SEQ ID NO: 438 - DNA, 1113 bp, Saccharomyces pastorianus
atgttcattaaaaacgaccacgctggtgacagaaaacgtttagaagactggagaatcaaaggttacgatccattaaccccaccagatcttcttcaacatgaatacccaatttcctctaaaggtgaagaaaacattgttaaggcaagagactccgtctgtgatattttgaatggtaaagatgaccgtcttgtcatcgtcatcggtccatgttccctacatgatcctaaagctgcttacgactatgccgacagattgtctaagatttccgaaaagttgtcaaaggacctattgattattatgagagcttacctagaaaagccaagaactactgttggctggaaaggtttaattaatgatcctgatatggacaactctttccaaatcaataaaggtctacggatctccagagagatgttcataaaactggttgaaaagttgccgattgccggtgaaatgttggataccatctctccacagttcttaagtgattgtttctccttgggtgccatcggtgccagaaccactgaatcccaactgcacagagagttggcatctggtctatctttccctattgggttcaaaaacggtaccgacggtggtttacaagtcgccatcgatgctatgagagccgctgctcacgaacattatttcctttctgttacaaagcctggtgtcactgccatcgtaggtaccggaggtaataaggatactttcttgattttgagaggtggtaagaacggtactaactttgacaaagaaagtgttcaagacaccaaacaacaattggaaaaagccggtttaaccgatgactcccaaagaagaattatgattgattgttctcacggtaacagtaataaagatttcaagaatcaaccaaaggttgcccaatgtatctatgaccaactgaccgaaggcgaaagcaatttgtgcggtgttatgatcgaatcaaacataaatgaaggtagacaagatattcctaaagaaggtggaagagaaggcttgaaatacggttgctctgttactgatgcttgtattggttgggatagtaccgaggaagttttggagttattggcagaaggtgtcagaaacagaagaaacgtccaaaagaaataa

SEQ ID NO: 439 - DNA, 1503 bp, Saccharomyces pastorianus
atgctcagaaacgcattaaggtgtgcccagtcatcgtctaaatacggatctaagactgcaatacgtacatttatgaatactcaagtacagttgaatagcgctgccgccccccctgtattatttacagtgcaggatactgctagggttataacgctgaataggcccaagaagctcaatgccctgaacacagaaatggctgaatctgtgttcaaaactctgaatgagtatgccaagagtggtgctaccaatttagttattttgaagtcctccaatcatcctcggtcgttctgtgctggtggagacgtggccgctgtggcagcatataatttgaataaggaattctcgaaatctatcgaactattcgcccatgagtattctttggacttccaattagccacttactcgaaaccaattgtcgctttcatggatggtatcacgatgggtggtggtgttggtctgtctattcatacgcctttcaggatcgctactgagcataccaaatgggccatgccggagatggatattggctttttcccggacgtaggttcaacctttgctctccccagagtcatcacattggctaactcaaactcacaaatggctttgtatctatgtctcacaggggaagttatcactggtgtagatgcctatatgcttggtttagcatctcattacgtttgtagtgaaaatttagaagctttacaaagaagattgggtgaactcagtcctacactgaataacagttcacaatctgcagcattttttggaatggttaacgagtctattaatgaatttcaatctccactgccaaaagattatgccttcagatactctaaagaagaattgaacgttatcgagactactttcaacgtgcccaaaaatggtaccattgaagacatcatgaaaaaactgagccaatacgaaggttcgacagagggcaggcttttcgcacaagaaatcaaaacaaaattatcaaccaaatcgccatcttctttacaaattgctctaaggctgatccaagagaattctaaagatcacattgaatcagcaatcaaaagagatctgtatacggctgctaacatgtgcatgaatcaagattctttagtggaattttcagaagccacaaagcataaattgatcgataaacagaaagggccatatccatgggccaagaaagagcaattattcacatctcagttgacatctatcacgtctcctaagccatcattgccaatatcattaagaagaaatacctcgaatgtcacttggactcagtacccctatcatctgaagtatcaattaccaaccgaaaaagaaattgaagcgtttattgaaaagaaaacaggtgatgatacgggctctaaagttaccgaaaaagacgtactaaatcattttgctaatgtggattcctttagaagagggaaacagggcattcaattattatgcaaagctgtctgtgaaagaaagtgtgaagaggttaatgacggtctaagatggaaataa

SEQ ID NO: 440 - DNA, 609 bp, Saccharomyces pastorianus
atgcttagaaacacctccacatcgaaagcgtttatcagaacacagtccacgcgtccgtatccagttaatttgcaggctgtctactatgcacctttaaagctgcctatcaaatatggtgatctggtagcggacattcaattaagatcgtacgataacgaaaacatggatttttactcagattttatattgaggacgggctactatttgggtatcccgttaactggacccaaacccttgcccactagaagagagcgctggacggtaataaaatcgcccttcgttcatgctaaatccaaagagaattttgaaagacatactcacaagagactcatcagggcctgggacacgaacccagaggtgttacagttgttgatatcttacattacaaaacattctattgcaggcgttgggatgaaatgcaatttcttcgaaagatcagagatatcgcagagttttgattccgacaccaatgaaactcaatcactaagcaatgtcaataaattatattccctaggtaaagatgataaaactcaggatagcgctattggtgaaaaagtgcttgaactgttaaatagtcctgattttcagaaacatttggaaaagaagtga

SEQ ID NO: 441 - DNA, 699 bp, Saccharomyces pastorianus
atgttttatccatataattacagtaacgtgaacgtttctgcgatacccgtactaccaggaatttcggcgtttgatagaagttcagatcaagaagaaatcgttgagttgaatccggaaagaaaataccagacactgctgccagttttaactaattcgcatgtggtggagaatgagcttaaacataaactaaataagactgcctttgattttcgatatcacaatagatcagaagatagttctgaaaatgtggaacccaaatacttgacaacacccaatttgcagatgagaagcgtttctttcgatagttcatcactacaatacaattcagattcttcggaaaaaagcccgctatcccaactgaatgccaattcgtcaataatacggcaaaccgatagtgggacggtttctaatgacgattatgataacatgggaaacatacggtattctctaaaaacgcggaagcagagaaccgatcccaaaaacacattatccgatgaagaggaccttgagcaacggcgcaagtatatttgcaaaatttgtgcaagagggtttactacgtcaggccaccttgcaaggcataacagaatccatacaggtgaaaaaaatcattgttgtccgtataagggctgtactcaacgatttagtagacatgataattgcttacagcattatagaacgcatttgaaaaagggagaataa

SEQ ID NO: 442 - DNA, 987 bp, Saccharomyces pastorianus
atgcccgctcctcaagatccaaataatctcccaattagacaacaaatggaagctcttatccgtcgtaaacaagcggaaatcacacagggtttagaatccatcgacacagttaagttccatgctgatacatggactcgtggtaatgatggtggtggtggtacttccatggttattcaaaacggtactaccttcgaaaagggtggtgtcaatgtctccgtcgtttacggtcaattgtctccagctgctgtctctgccatgaaggcggatcacaagaacttgagcctgccagaagatccaaagaccggtttgccagttactgacggtgtcaagttctttgcttgtggtttgagtatggttattcaccctgttaacccacacgctccaaccactcatttgaactaccgttactttgaaacctggaaccaagacggaaccccacaaacttggtggttcggtggtggtgccgatttgacaccttcttacttatacgaggaagacggtgaactattccaccaattgcacaaagatgccttggataagcatgacactgctctataccctcgtttcaagaaatggtgtgacgaatacttctacatcacacatcgtaaggaaactcgtggtattggtgggatcttctttgacgattatgatgaacgtgatccacaagaaattttgaagatggttgaagactgtttcgatgctttcctaccatcttacttgacaattgtcaagagaagaaaggacatgccttatacaaaggaagaacagcaatggcaagccattagacgtggtagatacgtcgaattcaacttgatctacgatagaggtactcaattcggtttgagaaccccaggttctagagtcgaatccattttgatgagtttaccagagcatgcctcctggttatacgacaaccacccagcccctggttccagagaagctaaattattagaagtcactactacaccaagagaatgggttaaataa

SEQ ID NO: 443 - DNA, 333 bp, Saccharomyces pastorianus
atgctttcgttttgtccttcatgcaataatttgctgctaattacgagtggcgatagcggtgtatatacgttagcgtgccgttcgtgtccctatgagttccctatagagggtatagagatatatgatagaaagaagctaccaagaaaggaagttgacgatgtccttggcggtggttgggacaatgttgatcaaactaaaacccaatgtcccaattatgatacgtgtggtggtgagagtgcttatttcttccagctacaaattaggtctgctgatgaaccgatgactaccttttacaagtgcgtgaactgtggcaatagatggaaagaaaattaa

SEQ ID NO: 444 - DNA, 1815 bp, Saccharomyces pastorianus
atgtcagatccaatcgtaacgtcttccaagatggagaagactgccgagttcgaagtaacggattcggccttacgtgataactttaatgcatcaacaacagcatcattttccccagaggtaaaagagcattccgaggaatctagaagtgggttagtccataggtttgtcgattcattcagaagggctgagagccaacgcctagaagatgataatgatttggaggatggtaccaggtctatgaaatccaataaccatctgaaaaaatcgatgaaatctagacatgtcgtcatgatgtctctaggaacaggtataggcacaggtctgctggtcgccaacgccaaaggtctgaaacttgccggcccgggatctttagtcattggttatgtcttggtctccttcgtcacatatttcatggtccaggcagctggtgaaatgggtgttacctatcccacgcttccgggcaatttcaatgcgtataactcaatcttcgtttctaaatcgtttgggttcgctaccacctggttattttgcatccagtggctgaccgtgctgccgttggagttgattacttcttcgatgaccatcaagtattggaacgacaccattaatgctgatgtgtttatcgtcatcttttatgtgtttttattgttcatccatttctttggtgttaaggcttacggtgaaactgaattcatctttaattcttgcaaaattttaatgattgccgggtttatcatcctatcagtcgttatcaattgtgggggtgctggtgtggacggctacattggtggaaagtattggcgtgatcctggttcatttgcggatggtagcagtgctactcgcttcaaagggatttgctttattcttgtgactgcgtatttctcctttggtggtattgaattgtttgttctttccatcaacgaacaggccaatccaagaaaatccacgcccgtggctgccaagagaagtatttaccgtattctgatcatttatttattgacaatgattttgattggcttcaatgttcctcacgataatgaccaattgatgggttccggtagttctgctacccacgcatctccttatgtgttagcagcctcgatccatggtgtcaaagtggttccacatattatcaatgctgttattttgatatctgttctctccgttgcgaactctgctctctacgctgcaccaaggttgatgtgttctttggctcaacagggctatgcaccaaaatttttaaactatatcgatagagaaggcagacctttacgtgccctaatagcgtgctcttttgtaggtctaattggtttcgttgcttgctctccacaagaagaacaagcttttacatggttggcggccatcgcagggttgagtgaaatttttacatggtcgggcattatgctttcccatattcgtttcagactagccatgaaagcgcagggaagatcacttgatgaaattggctataggtccaatactggcatatggggttctatttatggggttcttttcaacatccttgtcttcatggcacagttctgggtagcactgtcgccaccaggttctggcgggaagtgcgatgttgaatctttcttccaaagttatcttgctgcccctctatggatctttttgtatttgggttacatggtctacacaagagatttcacctttttgaatccgttggataaaattgatttagactttcacagaagagtttacgatcctgaaataatgagacaagaggatgaagaaaacaaagaaaggctgagaaattcttcactatttttcagaatgtacaatatgtggtgttaa

SEQ ID NO: 445 - DNA, 1092 bp, Saccharomyces pastorianus
atgagccactttcccgccccaaagaacgatttgatattaagggctgccaagggtgaaaaagtcgaaagaccaccatgctggatcatgcgccaagctggtcgttatttgccagaatatcatgaagtgaaagacaaccgtgatttcttccagacttgcagggatgcggaaatcgcttccgagattactatccagccggtgagacgctacaggggccttattgatgcagccattattttcagtgatatcttggttattcctcaagctatgggcatgaaggttgaaatgctcgaaggtaaaggtccacattttccagaacctttgaggactccagaagacctccaaaccgttttagattataaggtcgatgttttgaaagagctagattgggctttcaaggcaatcactatgacaagaatgaagctggacggtgaggttccgttatttggtttttgtggagggccgtggactttattggtctacatgactgaaggtggcgggtctcgtcttttcagatttgccaaacaatggattaacatgtatccagagctttctcataaactattacaaaagattactgatgtagctgttgagtttttgagtcaacaagtggtggcaggcgcccagatattgcaagtatttgagagttggggtggcgaactatcatctttggattttgatgagttttccctacaatacttgagacaaattgccgaaaaggttccaaaaagactacaagaattgggcatcaagaaaaaaatccctatgatagtctttgccaaaagttcctggtacgccctagacaagctgtgcggttctggatacgatgttgtttcattggactggacctgggacccaagggaagctgtcaagattaacaaggaccacggtgttaccttgcaaggcaatttggatcctggtgttatgtatggctctaaagaaacaataacaagaaaagttgagcaaatgattgagggtttcggcggtggaaaatcgcactacatcgttaatttcggtcatgggacccatccttttatggatccagacgtcattaagtttttcttggaagaatgccacagagttggttctcagtag

SEQ ID NO: 446 - DNA, 1005 bp, Saccharomyces pastorianus
atgtgtgacaaagatgttcatgtcagtgaagatgttgctggcgacgaaggtccttttagaaatgctagacctagattaattgtgcttgtaaggcacggcgaaagtgagtcaaataaaaacaaagaggtaaacggttacatccctaatcacttgatccctttaactaaaacaggccaaattcaagctaggcaagccggtattgacttactccgtgttttaaacgtagatgaccataatttagtggaaaatctggctgaaaaatacattggggatgaaagtagcaggagaactttacctttaaaggactataccagaataagcaaagaaaaggacgtgaacgtgcttttctacacatcaccttacagaaggggcaaggaaactttgaaaggtattttggacgtcattgatgaatattatgaattgaatagtggtgtgcatatctgtgaagatttgaggtatgacccctgcggtaaacagaagcatgccttttggcccagaggaatcaataacagtggaggggtttacgaaaataatgaagacattatctgtaaaggaaagcccggtaaatgttacctgcaatatcgggttaaagatgaaccaagaataagggaacaagattttggtaacttccaaaaaatcaatagcatgcaagatgtcatgaaaaagagatccacgtatggacatttctttttcaggttcccccatggagaaagcgcagcagacgtatatgacagagtagccagttttcaagagactttattcagacacttccacgaccgacaagagagaagacccagggatgtcgttgttcttgttacacatggcatctactccagagtttttctcatgaaatggttcagatggacgtatgaggaatttgaatcattcactaatgttcctaatgggagcgtaatggtaatggagttggacgaatcaataaacagatacgtcttgaggaccgtattacctaaatggacagattgtgagggagacctcataacatga

SEQ ID NO: 447 - DNA, 894 bp, Saccharomyces pastorianus
atgagcagtcgcaaaagcaccgcttccagcttgttgttacgacaatacagagaactgacagaccccaaaaaggccattccttcttttcatatagagctggaagacgattctaacatctttatttggaacataggtgtcatggtactaaatgaggactctatttatcatggcgggtttttcaaggcccaaatgaggtttccagaagattttcccttctctccaccgcagtttcgtttcaccccagccatctaccatccaaacgtctacagggatggtaggctttgtatttctattctccaccaaagcggggatcctatgactgaagagccagatgctgaaacgtggtcccccgtgcagaccgtggaaagtgtcttgatctctatagtgtctttattagaagaccctaacatcaactcgcctgccaacgtggacgctgctgttgactataggaagaaccccgaacagtacaaacaaagagtgaaaatggaggtggagagatcgaaacaagatatccctaagggtttcgtaatgcccacttccgaatcagcttacatatcccaaagtaaactagatgagccagaatcaaataaggatatggcagataatttctggtacgacagcgatttggatgacgacgaaaacgggtctgccattctacaagatgacgattatggtggtgatgacggaaatagtcatgtcccgttcgatgatgacgacgtttataattacaatgacgacgatgatgacgatgaaagaatcgagttcgaagacgatgacgacgatgatgatgacagtatagataacgacagcgtcatggataggaaacagcctcacaaggccgaggatgaaagcgaagacgtagaagatgtagaaagagtttcaaagaaaatataa

SEQ ID NO: 448 - DNA, 1317 bp, Saccharomyces pastorianus
atgaaactacagtcgttgatcgcttcgtccgccctcttaataacgtccgccctcgctgcttcggcatcctcctcttcttcccaaccaccctcttcctgttctataagctcgcatgctacagctacagcgcagagcgatttggacaagtatagcggttgcgaaacactggtgggaaacctcacaattggcggtggcttgaagacaggtgctttggccaacgtcaagaaaataaagggttcgctcactatattcaacgctacaaaactaacttcattcgctgcggattctttacagtccatcacggattctttgaacctgcaaagtctgaccattttgacttctgcttccttcgggtctctggaaagcgtcgacagtataagtctgattactctccccgcaatttctagtttcacctccaacatcaaatctgctaacaatatttacatttctgacacgtcgctgcaatctgtcgatgggttttctgttttgaaaaaagtcaacgtcttcaacgtaaataacaataagctgctgacctcgatcaagtctcctgtcgaagctgtgacggacgctctgcaattctcgttcaacggtaaccaaacaaagatcatcttcgatgacctggtttgggcaaacaatatcagtttgaccgacgtgcactctgcttcttttgctagtttgaaaaagattaactcttcattgggtttcatcaataattccatctctagtttaaatttcactaaactaaacacagtgggccagaccttcagcatcgtctccaatagtgagttgaaaaacttatccttctctaacttgacaactatcggtggtgctcttgtcattgccaataacacacacttacaaaaaattgatggtttcaacaatctaaccaccattggtggtactctggaagtcattggcaatttcacagttttggatttgaactctttgaaatctgtcaagggtggtgccgatgttgaatccaaatcaagcaacttctcctgtaacgctttgaaagccttgcagaagaagggcgaaatcaaaggtgactcgtttgtttgcaagaacggtgccacttctacctctgtcaaactatcatccacctccaaacagcaatcgagccaaacaacttccaagacctcttccaaatctgaggaaagaaagttcacctctggcgatgtcaaggctgctgtttctgcatccagcgctgccagttcaagctcaaagagctctaagggcaacgctgccattgtggccccaatctcccaagttactacattgattgggcttttgaccgctaccatcatgtccctgatataa

SEQ ID NO: 449 - DNA, 1704 bp, Saccharomyces pastorianus
atgcagactaaaaccatacattccttgagcataattccggctctgatacaactggtgtcatcattgctagcacccatcgcggatccaatagtatcgaacaaatacctcatatcgtatgtcaatgagaaccagtggaacgatagaatattacagaatcagtctgccatggactcggggtctattgtaaatatggggggtaattttgagtgttttatacaggatgcgagttcccagttcaaggatgtattggaaaaatcaagtgaatatggaaatgcagaaaagaaagcgttgttaaccgacactttaaatcaaggcgtgaagaccatttttgacaaattaaatggacaatgcattttctaccaagccggtttttggatttatgagtattgtccaggcaaagagtttgttcagtttcatgcccaaataaatacgcaaactggcgaattcgtgaatcgagacgagtccttagtgttcggattgggcaaatcgaaggaaagtttagacgagagagaattcgagttactttatgacgatgtaggatattacattagtgagatcataggctcgggtgatagatgcgataagaccggagctgaaagaatggttgaaatccaatacgtctgtggtggttcaaactctggaccagcaaccatccaatgggtaagagaaacaaaaatctgtgtttatgaagctcaagtcgccattcctgaattgtgcaatttggaattactggctaaaaatgaagatcaaaaaaacgcttctccaatactttgcaaaacgtctcgcactaatggtggtaactctgttgatcttattactcaaaatgaaccgattttcctgggaaatggaatatattttttaaggccttataatactcatgaaagagtcaagttaatggtcactgacaaagtgatgtcaaactgggatatgattacagacatatattaccaaaaattcgggaatgctatcaacaaaatgcttggtttggaattggtgtcgttgcctaacggacatattctccagcctggtgattcatgtatttggttggcagaaatagttgacattgaaggccagtttcaaaccattttatcgttgagcatatttaattcacagagagcagagatgtccttcaacaagacccttacatttgatggggttaatggaaactttatatcttacaaaatcagggacccagatgagccagttgagtccggccaattagacaattcggatgaagagaatagagtcatagaaaacacccagctagaggaacgattaattggctccagtaatgagctattcacaaaactttctaaagaaataactgaagtgaaagagttactgaaccaaattgtcggaccacaagaaatggaattaatactcgaaaatatgaggaatattcaaccgaatagtgatttcgaactcgcgttaatgaacgggttgaaatcgtcgctagttatcggcaacgacattgatgaagcaaaacaggtcaaaattggcgaagatggaagcataaagggcaccaaggataatacagaatcatctacccaaatggaagaacttaacgacgtcggtcaaaagaaagaaagcatggcgaatggtaaaacttcaattgaccgtgaggtatcggaagaaattgatttaccaggaaaagatgtgagaaatgaagcagctgatatccttgttgagcatgatgagctttag

SEQ ID NO: 450 - DNA, 981 bp, Saccharomyces pastorianus
atgttggataacgataaagcccaagatgtaacaatagattctctaatactttctgattcatatacacccccaaaaaatccgattgtattctgccatggcttatcaggatttgatagattaattctgattccttcagtgtttcaattgacaactctaatctccaattcaatagcgcacaatatgacagaaaatttcatgaaagatggggaagatgaaagcgatacgaaatatccaaatttagtagagattgaatactggattggtgtgaaaaaatttcttcaatccaaagggtgcactgtgatcaccacgaaagtgccagggtttggtagtattgaagaaagagcaacggccttggacgctcagttacgaaaagaagtacagaagatcgattcgaaggataagcgacattcgttgaatttaatcgcacattcaatggggggattggattgccgatatttaatatccaatatcaaaaacagaggttacgatattctgagtttgaccactatttccactcctcacagggggtcggagatggcggattacgtggtcgaccttttcgaaaacttaaactccttacgtgtgcctcagaagatactgcccataagtttctaccagctgaccacaacctatatgaaatattttaatttggttacaccgaatagtccaaaagtctcttatttttcgtatggttgctcttttgtacctaaatggtacaatgttttttgcacaccctggaaaattgtttatcagaggtcgaaaggacgacccaatgatggtttggtaactatagatagtagtagatggggagagtatagaggaaccttaaaaggtatggatcatttggacgtgattaactggaaaaataaattgcaagatgattggagtaaatatttccatactaatactattgaggaaaaaatcgatatcttgaacttttatttaaagatcactgacgatctggcaaagaaaggcttttga

SEQ ID NO: 451 - DNA, 1686 bp, Saccharomyces pastorianus
atgagcacccctgcaaactatacacgtgttcctttgtgtgagccagagaacctgccagcagatatacaaagagaaaacgaatatggtacactagactctacggaccatttatatcaggtcatacaacgtgatggtaaaccattaacagaaccgattattgacactccaccctattatgcttctctgctgacgtatctaaattatttgcttttgatcatactgggccacattcatgatttcttaggtatgactttccaaaagagcagacatttagatcttttagaacgtgacgggcttgctccttggtattcaaacttcgagagtttttacgtcagaagaattaaaatgagaatcgacgattgtttctctagaccaactactggtgttccagggagattcattcgttgtattgatagaatctctcatgatataaacgagtattttacatactcaggcgcagtataccaatgtatgaacttatcttcctataattatttaggttttgcccagagcaagggtcaatgtactgatgctgctttggaatgcgtcgataaatactccattcaatctggtggtccaaggactcaagttggtactacagacttgcacattaaggctgaaaagttagtcgcaaaatttgttggtaaagaagatgctatgatattttcgatgggttatggtacaaacgcaaatttgtttaatgcatttctagataaaaagtgtttagtcatctccgatgagctaaaccacacatctattagaactggtgttagattatcgggtagtgctgtgagaactttcaagcatggtgatatggtgggattagagaaacttatcagagaacaaatagtacttggtcaaccaaagaccaatcgtccatggaagaaaatcttaatttgtgtcgaagggttgttctctatggaaggtacgttatgtaatctgcccaagttagtagaactgaaaaagaaatacaaatgttacctatttgtcgatgaagcgcattcaataggtgccatgggtccaacaggtcgtggtgtctgtgagattttcggtattgaccccaaggatgttgatattttaatgggtactttcaccaaatcatttggtgctgctggtggttatattgctgctgataagtttatcatcaatagattaagactggatttatctactacaagttatagtgaatcgatgccagctcctgttctagctcaaactatttcttcattgcaaaccattagtggtgaactgtgtccaggccaaggcgcagagagattgcagcgtattgccttcaactcccgttacctgcgtttagctttgcaaagattaggattcattgtgtatggtgtggccgactcaccagtcattccacttttgttatattgtccctcaaaaatgcctgcattttcgagaatgatgttacagagaaggattgctgttgtcgttgttgcataccctgctactccgttaattgaatcaagagttagattctgtatgtcagcgtctttgactaaagaagatatcgactatttattgcgtcatgttgatgaggtcggtgaaaaattgaatctgaagtcaaattcaggtaaatcaagttatgacggcaagcgtcaaagatgggacattgaagaagtcataagaagaacacctcacgactgtaaggacgataaatactttgttaattaa

SEQ ID NO: 452 - DNA, 450 bp, Saccharomyces pastorianus
atgtcaaatctttataatattggatccgaaaccaaaaataagatcaaaaagtttcgcataactacagcaagagccgattctattaaggccctgtcaatcaaaattgagccaaagccctcctatgagataattattgatgaagatgaacaagaggaactggaagaattagaagatcttagcgaattagcagaaatcctgcccgacaactcacctaggtttcttcttaccgcatacccgatcacaacgaaagacgggattaaacaaacccctttaattttgatctattggaagccaatgacggtcgtttcacaagaatggaagatgctttacgcgggtgcattagaaatggtcagaaacgagtgtggtactttcaaattagttgaagtttcttctggcctagaagacgattcggacttggatgaattgagagagcagttagagagttgttga

SEQ ID NO: 453 - DNA, 1104 bp, Saccharomyces pastorianus
atggctcataattttgggagaataccttcacaccaatgttatgtgctgaatctctatcgcactattctcagaaacattccaaagaattgtcactcttatgcatttcaaaaagaaatcaagagtaacctttcgaggcaactaaccaaacataagcatgacaaatctagttggagtgtgtatattctcctcaataaattcaaccaattgaacaactaccttttggaaggcaaattgcaggaaatcaaacacttgattcaaccactgaaaaaggtatcgaaacaactgaagacgacaaggattcttaaaactttgaatgatctaggtaatggaaattcactacaaagtccagaggagataagagaacttcatgtgttaagcacttatatcaagcaaaagcaaaacctaggccttttacccaactgcattcctaaagaatataagcttaagcttctattaccgttagcattaaacgagagtgcttgtgtgaagttgtacaacattcaccaaaaattagaaaaaggttctccctctgctaggctatcatataccaaagaaggaagaaatcaaatatggtttgttcgatcaccaattaataagggcaagagacaatcaaaaatgctgggaatcttgatacggcaagaaagaaaagattctcaaaagaatattgacgatctcaacttttgtgaatcaaatgcttcttgggcactccatgaggctatttgggaagagtatttagagtctaagaggataattgaaataaacttggcaaaatatttagagtacaatatagataacccaaagaaacccgctaggtacaacccagccagtcaaaataaaaaaattaacgaatgggtggaccctgtgagagaggtgatctttaacttgcaggccaaaagcattcaaaaggttgagtactataacgattataaggaaaaactgttgagtaaagatggtcaattagcatattttgataagttatcgaaagctatgtacgctaaaaggttagaatcttttgaaaagatggcagaggaagccttaccatatgtcacaccattcataccaaagaaggatttattaaatgccctgacaaaatacggtttctaa

SEQ ID NO: 454 - DNA, 675 bp, Saccharomyces pastorianus
atgtcgttggtaaccccgttacaattttctacagttcagccaaacttgtatagaggatcatatccacgagaaatcaatttctcattcttaagaacccttcgattaaaatacgtgctgtcattgacaccggaacctctggataatgatccccaaatgcttaagttttgtgaagagaacaacattaagacaattcatattgaatgtcaaagcgaaaggaagacagacaagactaaacccaaaatcaaaaggaaaaagaaaactgtccccattgaatatgacgtggtggtacgatgtgttaagtttttaattgacaaaagacattatccctgttatatgcactgtacaaacggtgaactaataatatcccttgttgttgcctgtatgaggaagttttcatattggagtacggtatccatattaaatgaatttttggtatacaattccagtattaatattcatgaaaggaatttcgttgaaaatttcaagtctgaaattgaagttgataatttggatataaaggataaagttccctggatcacagtgcgatatattgcacgagcacccgtagaatcaaaagatgatgcacaaaccgaagacgccaacacatctgaaaaggttgcgagagtgagcagtgtgcccaatatgctgccaaaattgaaatttcatagtatgtag

SEQ ID NO: 455 - DNA, 930 bp, Saccharomyces pastorianus
atggactttttttatgaagagcaagtagctaacattgagggtggtaggctgagtaatcaaaaggaatcttccaccgaggaatctgttgatgcaacagaacgtaattcgaatagtggggttcagggccgagatgtaaaaacaaatgaagcgttccaaaagctagaagaggaagtcaacaagcaatatgaaaagaccacaagtgcatttaagaagttggtcgttgaaaaggatgacggtattgaaattaacataccaattagcgatgaaactacagaggctgcacagaaatacttaaaaaagctagatgataacatacacaacgtggagaatctcgctcagtcatattggagcaaaatgaagactaccagtttttggtccggttttggtagcatcaacgatacaacagatgacgcttccgctgacaattttgagggtctggaagagaaaggaattgctgttggcggaaatagaacagaagctgaactaaggacattatcaaaagacaggtcggtttatttaaataacaaaatggatttagagaaggaaccgtttgacgtagatgaaaaaactgatgaaatatgtttgattttacagggtgataaggatattgctagattaatgaatgacatcgtaccccacaaaatcagctataagaatttctggaacatatacttctcagaaaaaaatagaattttagacaaggaaagcaaaaggaaagaaatattacttaagaaggaaaaggaggccgaggtagcctgggatgatgaagatgaagaaatagaagcgggggccagtttaaaaaacgaagatgaggcaaaagtcgaagaaccaaagaaggaagtagaagaggagaagaaagatggcggcaacggcgaggatgatgatggtgatgatgatgacgatgaagacgacgacgatgactgggaatga

SEQ ID NO: 456 - DNA, 2784 bp, Saccharomyces pastorianus
atggaacagaatatcattagtactataaatgatgaaaacattcaaaaccggtcaaagtacctcacgatagcacaactaaccgctatcgcagaaactaaaataaatgaattcatcataaatggcaaaacaaaagatcgagatttaagcagcctcttagataaatgcatcgatattctatctatctacaagaagaactccaaagatatcaaagttattatatcttgtcgaaataagggtgcaatgactaattcgaactatgatatcaaaatacagctaaattatatctactacaagatcattcatatcatagtgactgccaagattcctcatctaaatgaatttgcgaaaatcaaatcacataaaagttcgaagaatgacggcgatagcaatagtagcaataatgaatttcaattaatgaacatatacaacactttactggagactttactaaaggatgaaaatatcacaaagattaaaaattttatcaagtcatctatacaacaaatgaaattgcaccacgaacaagaggaatgtcacctgatgcaaactggttctcacatcacacccgatcagctaaattcactaatagttttatcaactagctcctcctcatctcaaatggaaacgctgttaatagatatacgatcaagattagagttcaaaaaatcccacatcgatttcaaaaatatcatttgcctggagcccgtttcatttaaaatgtcgtactcagatcgcgatttggaaaagaaatcattgattacatctcccaacgatgaaattaaactctttcaaagcagaaaccttttcaaatttatcattctttatacagactcgaacgactataacgtcaggcaacaagccgtattattagatattttattgaatcgttcttttgagaaaccaatatctaatgactttaccaaaatttttattttacaatctgggttcccaggttggctaagctcaaatcatgtaaatcaaacatcttcgtcttgtccacagagtaacaacataaaggatgatagtgtgtatgtgaacggtaatacttctggtctgagtttacagcatctgcccaagatgtctccaagtataagtcattcaatggacgattctatgaaagaaatgctgatttcaccgattccaattaaccacctacaacaacagcaacaacaacaatccgacaatagttataaattacaaagatcttcaagttttaaaaaactgttttcaaactatacgtctactagccccaagaacatgaattcaaatttatattctatatcctcattatccatctccaactcgccatctcctttacctctgtcttcgcctaattcgatgaaaaacgattcattaccatttaattatccagagactccacatctctggaaaaacaatgaagcagattccatgacaaatcaaagggaacagttgaatcacaattccttcactcatattacacctattaatacaagagcaatcactactccatcaagaaccaccacaccaaagttgcagcggttcccgcaagcaattagcatgaacttgaatttgaattccaatagcaacaactcttccacgtctactatacaaccagcatgtctcactttatccaacagtagctctttagaccatattgatgtatcccaaacttcgccctctcataactatgacctcgatttcgctgtcggattagaaaatctaggaaattcatgttacatgaactgtatcattcagtgtatattaggtactcacgaactaacgcaaatatttttggatgattcatatgccaagcacattaatattaatagtaaattgggttcaaagggtatattagcgaaatatttcgcaaggttggtgcatttgatgtataagaaacaggttgatagctcaaagaaggactctatatcaccaatcaaattcaaattggcgtgtggatcggttaattcattattcaaaactgcatctcagcaagattgtcaagaattctgccaatttcttctagatgggttacatgaagatttaaatcaatgtggctcgaatccacctttgaaagaactttctcaagaagctgagacaagaagagaaagattatctttgaggattgcctcctcgatagaatgggaaaggtttctgactactgatttcagtgttattgtcgacttatttcaggggcaatacgcatcacggctaaaatgcaagacatgtaatcatacttcgacaacgtatcaacctttcacagtattatcgattcctatcccaagaaagaactctcagaataaaatcaccattgaagattgttttaaagagtttaccaaatgcgaaaacttggaaatagacgagcaatggttgtgtcctcattgtaagagcagacagccatccacaaaacagttaacgataacgaggttaccacgaaacttgataattcatttgaagaggtttgataacttcttgaacaaaaataacgattttgtcaaatatccgttcttgttggacttaactccattttgggctaacgattttgatggcgtctttccaccaggtgtaaatgatgatgaattacccataagggggcaaataccgccttttaagtatgaattgtatggcgtagcgtgtcatttcggtactttatatgggggtcattatacctcctatgtgaaaaagggattgagcagaggatggctatattttgacgataccaagtacagacccgctaaaaataaaacagacgctattaattctaacgcatacgtcttattttatcatcgtgtatacggtgtttga

SEQ ID NO: 457 - DNA, 282 bp, Saccharomyces pastorianus
atgttaagagcaactatttcacgcactccaagacaatggatctgtaagtcaccaaaggcggccctttccaccaccgctaagggtttctacccgcacttgaagcacgatcaagacgcggcggaacagaaggaacaaaatttgtttaacgataacaagaagaaactggataacttggaacatgggaagaatcctgatttcaaacagcctggaatggaagatttgaagaagaaaggtgatgatgccagaattgaacaaaacagaccggatgatggcgtttattga

SEQ ID NO: 458 - DNA, 576 bp, Saccharomyces pastorianus
atggcctcctcaactagcactctaccgcttcatatgtacattagacctttaattatcgaagatttggaacagatcttaaatctagaaggtcaaggtttcccgccaaacgaaagagcttcggaggaaatcatcagcttccgtctgatcaattgtccagaattatgttccggtttgttcatcagagacatcgagggcaaagaagtcaaaaaggagaccttaattggacatattatgagtaccaagatacccgatgagtacatcaccattgaaagcatgggcaaactacaagtggaatccagcaacaatatcggtatccactccgtggttatcaaaccagaattccaaaagaaaaacctagctactttactattaaccgactacattcagaaattgagtaaccaagaaatcggtaataaaatcgttttgatcgctcacgagccattggtaccattttacgagagagttggtttcaaaatcattgctgagaacaccaacgttagtaaggataaaagtttcggcgagcacaaatggatcgacatggaaagagaactaatcaaagaagaatacgacaattaa

SEQ ID NO: 459 - DNA, 462 bp, Saccharomyces pastorianus
atgaacagcgaaattgcaagcccaaacctaaataccaccaccgccactaccactgtaaacgggaaccctcatgccggcatcggcgtggatgcggatttgaatgcagatttaaacctccctacggtggacgaacaaagacaatacaaagtacaactgctactgcacatcaatagcatactgcttgccagagttatccagatgaacaacagcttgcaaaacagtctacggaacaatataaataacagtaacaacgaaaacatcattagaatacagcaacttatatcccagttcctcaaaagggtccatgccaatctacaatgcatatcccagataaatcaaggcatcccttcggctaaaccgttgattctctctccccctcaactggccaggcagcaacagcctccgcaggacatcctcgccaaactctatcttctattgactagagtgttcgaaatatggtaa

SEQ ID NO: 460 - DNA, 2691 bp, Saccharomyces pastorianus
atgactaccaccgcccaagacaattcccctaaaaggaaacagcgtatcattaactgtgtgacccaactgccctacaagatccagcttggcgaaagcaacgatgattggaaaatatcagccaccacaggcaacagcgcgctatactcctctttggaatacctgcagtttgactctaccgagtacgaacagcatgtcgttggttggactggtgaaatcacaagaactgaacgcagcctgtttaccaaggaggctaaggagaagcctcacgacctggacgatgaccccttgtacctgacaaaggagcagatcaatgggctaaccaccactctccaggatcatatgaagtccgaaaaagaggcaaagaccgacaatactcctaccacctccgctattaacaacgtccatcctgtttggctgcttagaaaaaaccaaagcaggtggagaaactacgccgagaaagtcatctggcccactttccactacatcctgaacccctccaatgaaggggaacaggaaaaaaactggtggtacgattacgtcaagttcaacgaagcttacgcccaaaaaatcggcgaagtttaccagaagggcgacatcatctggattcatgactactacctactactactgccccaactactgaggatgaagttcaatgacgagtccatcatcattggctatttccatcacgctccatggcctagtaacgagtacttccgctgtctgccccgtagaaagcaaatcttggacggtcttgtcggggcaaatagaatttgcttccaaaacgaatcgttttcccgtcatttcgtatcgagttgtaaaagattactagacgccactgccaagaaatccaagaactcctccgataacgaccagtaccaagtctctgtttacggaggtgacgtgttggtagactctttacccatcggtgtcaacaccactcaaatcctaaaggatgccttcactaaagatattgactctaaagttctttccatcaagcaggcctaccagaacaaaaaaattatcattggtagagaccgtttggactccgttcgtggtgtcgtgcagaaattgagggcttttgaaactttcttggctatgtaccctgaatggagagaccaagtcgtgctgatccaggtcagcagccccaccgctaccaggacttctccacaaaccatcaaactggaacagcaggtcaacgaactggttaactccatcaattctgaatacggtagtctgaacttctcccccgttcaacactattacatgagaatccccaaggatgtttacctgtctctactaagagttgccgatttatgcttaatcacaagtgttagagacggtatgaacaccactgctttggagtacgtcaccgttaaatcccacatgtctaatttcttatgctatggtaatcctctaattttaagtgaattttctggttcaagtaacgtgttgaaggacgcaatcgtggtcaacccatgggactcagtcgccgtggccaaatccatcaacatggccttcaagctagacaaagaggagaaaaccactttggaatcaaagttgtggaatgaagtccccactatccaggactggaccaataagtttttgacctcaataaaggaattggcttcctctgatgatgatgtcgaaaggaaaatgacacccgctctcaatagacctgttcttttggaaaactataaacaatccaaacgcagattgttccttttcgactatgacggtacgttaaccccaattgtcaaggatcccgctgcggccatcccctcagcaagactttatacaattttacaaaaattgtctgctgatcctcataaccaaatctggattatttcaggtcgtgaccaaaaattcttaaacaaatggctaggtggtaaattacctcaattaggtttaagtgccgaacatggttgcttcatgaaagatgtctcttgtgaagactgggtcaatttgaccgaaaaagtcgatatgtcctggcaagtgcgtgtcaatgaagtgatggaagaattcaccacaagaaccccaggttcattcatcgaaagaaagaaagttgctttgacttggcattataggcgtacagtcccagagttgggtgaattccacgccaaagaattgaaagagaaactgctaacatttactgatgatttcgatttggaagttatggatggtaaggctaatatcgaagttcgtccaaggttcgtcaacaagggtgaaatcgtcaagagattggtttggcaccaacatggccaaccacaagacatgctgaaggggattagtgaaaaattacctaaagacgaaatgcctgactttgtattatgtctaggtgatgactttaccgacgaagatatgttcaggcagttgaataccatcgaaacctgttggaaaggaaaatacccagatgagaaaaatcaatggggcaactatgggttttatccagtcactgttgggtccgcatccaagaaaactgtggctaaggctcatttaaccgatcctcaacaagttttggaaaccctaggtttacttgtcggcgatgtttcacttttccaaagcgcaggtactgtcgacttggattcaagaggtcatgtaaagaacagtgaaagtagtttgaagtctaaactcgcatccaaagcttacgtcatgaaaaggtctgcttcttacacaggtgcgaaggtttaa

SEQ ID NO: 461 - DNA, 1224 bp, Saccharomyces pastorianus
atgtcgtttggtataccactttcccagttaataatagaaagcccaaagccattaagtagtggtattacaggattggatgaaatactgagccttggattccaagcaagatcgatatatgaaatatttgggcctccaggaataggcaagactaatttcggaattcagttggttagcaggtcgctagaaaacatgaagccgttggaaaagaatgacgataagattctatggatagaggcctttcaagatatgcctatcaacatcttaagggagcgcttcccgaaattcgatattgtagaggagaatgttaaacgtgttcggataatgaagtttgggcaactgttatatttttttcaaaacttgtttaagctgtcacaaagcatgaagtacaaactaattataatcgacggtttttctcaattactatgcgaccatttgtgtacgctgagtaaaagaagtgggggggtgatagataaaactatacatgatttaaaatgccggcacttgatattaatttttacagcgatgaccaaatatactcattctactggctcaactataatactgctaaacgattgcatgaacacagcattccaatccaacgaattcggatccttggaagaagattacgaggtcctagaggacggttccaatttctatgtcaattcgaacagtgatagacgtaaaagtaacgtacacattctgaaaagtgctctagtggccaatattgctatgggaggcaaagattccacctgggaagtgtttttgagggacaggattggtttattcagagactggaatgagcaagcggacgaaacaatatttgtaaagagcaagagagtgaagacgccgtcttcccaagataacgaggcatgcaccatcaaagaaatgagaataaacaaacgaaacttcgaaaactttagaatagctattgttttcaatctgcatggggacgacagggagagagacagagacgggggaagaccaaaacggacgagaaatagcgaagatcgcaaccgtattgttaaattcgactttgatagagcaacaggcctattccgcgatataatcgaccaagaagtaaacactgccaatattggctcaatcccgacattatcagcaagcagcagcagctgttcccaactgtttgtcaacatggagtctgatgataaccaaatgccatatgtagaaggaaaggaggaagtaatttatgatagcgaaggctaa

SEQ ID NO: 462 - DNA, 672 bp, Saccharomyces pastorianus
atgtccaaggatgtaatagagtactcgaaactgtttgctaaactagttaacccgaatgacgatacgaaattagatgatacgatagcatccttcttatactatatgtttccaagggagcttttcattcgagcaatctcattgttggagtcttcagacatgtttatatatgtactagatagggaccgtacgggggaaaccggtaaatgtaaattgttgattgatttgttgatcgatgagttttatagggactcgtcggatgtgccgttagagtaccgcttaatcgtcaaggataatagcgatacagggccgccgatactagtagacatatcgcactggttttgctcatgtgaagagtactgtgagaatttccatgaagcacttgaagaaagtgacggaaatgaagaattatctgaagtgctgataaatgaaattgacgaccacttgcaattttcaaacgataaattcgctcagttggatccgcatagtttgtccaaacaatggtatttcaaatttggtaaggtttgctgttctcatctattggcgttttccataatacttaaatcttcgattaatgtgctgaaattttttactgttaattcaaacaaggttttcatgatatcgatagataatatagatgaatggttgaacttgcatatcaatatagttgaataa

SEQ ID NO: 463 - DNA, 333 bp, Saccharomyces pastorianus
atgggtctatttaatttcaagtttaaatatacaagggcgcaactggaaatattcagattttctttttgtctgctagcacccgttgctgtaatgtactatattggtacagatactgataaaaaattaaatgttccagggttctggccagatcctgctactctgaaccagataccaaaggaaccgtatgagatcaaagctgaactggcaagaatgaagaaagaacgtttggaaaaaagaatcagactggagaaaaaactgcaagaggaatttggtttggaccttgaacaggaaaaggaaaaaatcagacaagaattagcgctcaaaaaaggttga

SEQ ID NO: 464 - DNA, 219 bp, Saccharomyces pastorianus
atggctagagcaaggaagggcgcgctgatccagtgtgatccatctattaaggcacttatactacaaatcgacgcaaagatgagcgatatagtattggaggagttagatgacacccacctcctggtagatccaacgaaagtggaatttgttaagcatgagttaaacagacttttatctaagaatatatacaatcccatggatgaagaagaaaatcaatga

SEQ ID NO: 465 - DNA, 2757 bp, Saccharomyces pastorianus
atgctttccatacagcagagatacaatatctgtctaatggcagagagacacccaaaatggactcagctcgaattggcaaaatgggcttatgagacatttcaactaccaaaaattccatcccagggtactatatcgcggttgttagctagaaagtcaacgtacatgaattgcaaggaacacgaaaaggatgctaatagattaagaaaaccaaacaatcttttggttcgaaagattttacaagagtggatttctcaaagtctgtggaatgggattcctattacctccccaatcattcaagacactgctcaagcagtttggcacagaattcctgcggaacatcgagagggaaatggttcattcagttataagtggatttcgaattttctatcaaaaatggatgtcaatatatctgtcttggatgaggaattacccaagactcctaaagtatggacatttgaagaaagagagatattgaaagcctacttcgccaaaattccgccaaaagatttatttactttggatgaagcgttcctttcttacaatttaccattagattacgcgcaatacgaagcaagtagcattcaaagacgtatagaggttgcaaccgtaatgctgtgttctaatttagatggctctgagaaattaaaacctgtcgttgttggaaaatatgatagttataagtcattccgaaattattttcctaacgaaccgaaagagcctgtttcgcaatcaatgttaggtactaagatggccaaaaaatttgatatctcttatcacagtaacagaaaagcgtggctaaccagcaatctctttcataattggttagtcagatgggacaagagattggtggctgtgaatagaaagatttggattgtcttggatgattcatgctgtcataggataattaacttgcgtttgcaaaacataaaactggtatacacttcgtccaattcaaagttcttgccattcaactggggtgtttgggacgaattcaaaacgaggtatagaatccaacagtaccaggcgcttattgacctgcagaatagaatttccaaaaatactcaaaataaaaataaatctggacaaaacgaatgtttgccgaatggtaaaaaaagtctcataagctttgagcagagtcagttgacaatgtcgaatgcttttaagtttatcaagaaagcctgggacgatataccagtcgatgctattaaggccaactggaaaagctctgggctgttgcctcctcagatgattcatctaaatgaaaatgtcagtatggcatttaagaaaaacgaagtattagagagcgtgttgaatagcctctgtgatgaatattattgcgttaagaaatgggaatatgaaatgttattggatttgaacattgaaaacaaaaatacaaatttcctaagcactgaagaattagtggagagtgctattgtcgatctttgtgaacctgattttgattctgcatctaaagtaactgaagttcatgatgataattttgatttatccgtttttgccaatgaagacgataacaaccacagccagctaagtatgtctaatgccaaccacagcgacgagaaccatagcaacaacaatcataataataatagtaacaaccataataataacagtgacaattccaataataacaataacaatagcgcgaaatatttgcaacaaagtaccattgacaatactaataaaaatgaggatactggacagccgaatggttctaacatggattcacaaagaaatccttcaaccacagacttggtggttgacggcagctatgacgtcaatttcaatggtcttttaaacgatccttataatgctatgaggcaaccaggcccactagattacaatgttagtacactgattgataagccgaacttgtttttaagtcccgacttggatttatctacggtcggcgtggatatgcaactaccatcatcagagtactttagtgaagttttttcttcaaccattcgaaataacgacaaaaacatcacacaccagagtaaatcagtcaatgaagctgcttcaagcacagcaatgccgccttcaaactcaatagcaacggcgcttttggaatcaagaaaccatgcgcagccctttgatgttccacatatgactgagttgctgagcgatacatcgaagggtggacctcctgtggcctccccaaacgttgtgtctcaaaattcattaaacagctttcaacgtcatccatcatccgttgcagacgtttcctctccttcgattacaccttcccctgtgactataaactccacaggagcaccaacaagatctatgacgacagtaccgataggatcagcagcatcctctgcttcatcgccatctggcttaggtcatcttgaaagtgccatttctggcatgtcaccctcttcaaccaccatattaagtaacttacagacaaacataaacattgccaaatcactgagtaccattatgaaacacgcagaatcaaacgaaatatcattaacgaaagcgacaataaatgaactgaatttcaattatatgacgcttttaaaacgaattaaaaaaacaaagaaacaattaaatactaagaacattaaaataaacagtaacaaaaatgcgcaagaccatttagagacccttttatcaggggcagctgcagcagctgcaacatcagctaataatttggaacttccgtcaggcggttcaacccttccagactctagtaacttacatttacctgacgatacaggtttcttttag

SEQ ID NO: 466 - DNA, 600 bp, Saccharomyces pastorianus
atggaccaagcaaagaacttctataacacgattttaaagtcgtcgcacccgttgctactatcattccacttggcaggtaaggccgtacctatagtcttttatatcataggttcaatgtttctgaattttacacctcaattcatcaccgtcgtgcttttactttcgtttgatttttacttgaccaaaaacattaccggcaggaaactggttcaactacgttggtggtatgattctacagacgtaaacaaaaattctagcttcacttttgaatcatataagcagtatgcgcctggcccaccgataaatgccatcgattctaaattattctggtggtcaatgtatttgacacctataatttggggtatctttgccattttgtgtcttctaagattaaggattttttacttagttttagtcatcgtggcagtgtgtttgaccgcttggaacacatatgggttccgttgttgcgataaatgggaacctgctaatggacagtccggcgatgaggacgcaaattcctggttccctatgccttctcttccaggattcgaaaatctttcaaggctggccaatatccagtcatttttccaaagacaataa

SEQ ID NO: 467 - DNA, 243 bp, Saccharomyces pastorianus
atggctagagtcagcgaaaagggtgaagaaaagaaatcaagcaacaaccaagttgaaaaattggtcgaggcaccagtggagtttgtcagagaaggaactcaattcctagctaagtgtaagaagcctgatttgagggaatactccaagatcgtcaaagccgtcggtatcggttttgttgccgtcggtatcattggctatgctatcaagttgattcatattcctattagatacgttattgtttaa

SEQ ID NO: 468 - DNA, 1143 bp, Saccharomyces pastorianus
atgaataataataataggaataataaaaacagaaacaataatatccgaaacagaaggcaacaacagcaagcgaataacaaaaatgaaaatatacatataccaaggtatattagaaaccaaccatggtattacaaggataatccaaaagagcaggaggaggaagatgctactaaggatagtatagaccctccagaaaaaggaaaaaaaggcgattacttattgcatcatagacaaagagcaaaggggggagctttagacatagataacaattcagaaccgaaaattggtttgggtataaatgatgaatttgaggtgataaaattgcggaaaacacacattagggatacaaacttgtcaaagtactgtaaaaactgcggcgaaacaggacatacggggaaggattgcatggaaaagcccagaaaggcgcagaagacaactccagattctcgttcaaacattagcaaggatactgttctaatacgaggcaccaatgatgactgggactccaggaaggataggtggtacggttactcaggtaaagaatacaatgagctgatccgtaagtgggagcaagacaaacgtaataaggataagggccaatctcaagctgatgatgcactttgggatacagacgaagagatagaacttataaagttagagctttacaaggacgctgtaggttcattgaaaaaagacgactctgaaaactcccaattatatagggcatcaacgaggttaagagaagataaagctgcatacttgaatgacataaattcaacggagagtaattatgaccctaaatcaagactatacaagagtgagacactgggatccgttgacgaaaaatcgaagatgttccgcaggcatttgacaggcgagggtttgaaattgagcgaattgaaccaatttgccagatcccatgctaaggagatgggcgtacgtgacgaagttgaggataaagaaaaaatacagcatgtattagtggccaatcctacaaaatacgaatatttgatgaaaaagcaagagcaagaagacgccaatgagcccaaaacagtcagtgtaagtgaactggaagccaagaaagtggatggtacaaagcaatcagaagaacaacgcaaacgcttaagagatctctatggctag

SEQ ID NO: 469 - DNA, 2610 bp, Saccharomyces pastorianus
atgaaatttgaagatcgcatattgaataaatcagttcctgaatggaagttttataatatcaactatgaagagctaaaactagtgattaaaaaagtgactacctatgatcgtcacaatttgaaggatacaaatattgagaagctgttatgtcaatgtactgtggcttttaattgtgaattccaaaatgtcaatttgtttgtatctctaaaaattaaagaaatatcaacacgtattctttctattgaatcttccataattgatttttctaagagtttgaataaaaatttcaggagccgcttcaatttgcgtaaactgaaaattattaatgctcatgtagacgattgtaactttgaattacagttattatcaagattcttgatagtacagaggatcgccttgagaaagctgttcaagaaattgctaaatgagtttcctcaaaagaaggaaaatccttcattggcaactgagtatattgcctcgataagaaactcagaaaatttaagaaaagggcacgaaggcgtatcgttcatgaacctcgatttagatccatatcttttggaagtgtcgctgatcgtcgatgttttacacgatttagagaataaactcgaaggtgtaaatgactcagtggaagggctaagtcccatcaaccgcccaggcgaatccattcatactaattcaagtccagaagcaagcaattccatttcgtcgacttctccgaggtcaatcccgttactatcaaaaaacaaaagctccaaaatggtcgattcctcggtagagtttgatactgcacttatagacaaatctgaaactctaggaaggtttttgatatcgtctgaagatgtagaggggctaaagttcatgttgttgaatttaggattcagaataatagacgacagtattatttccacctcgagagagatcttggatactactgacaacatccgttcgatggacaacaaatccgtaagatcagcgaaatcatttaacgatctgcagcattctatgtcccggcatagacaaaaaggcatactgccttctgcggtgcagcctaatgagacacatatctccctcagtatactagagactaaaggcaacaaacgtaatcctgtattattaactgacgaaaatattaaccagcacccaaatataataatcagctccactgccgaagataactgtattctaatgtgtcacgttggcggcttaagaaatcacgttgtctcgaacaatttgcttttaaaggatgtggaacatatattctcagccttgaaagacactaacaacaaagagaacatcagtgaatttataaactctctgaacccgtcctcaatcaataaactgtctttggagtggattcaatctcatcggctagggactattgaacccaaaattgattttaaaagaacaagattcaaatcaatagagaacggaagtatatatttgatagcactagacgaatgtattacaataggtaacgtatccacattaccttttccaattttagaggtgaaaaagttgggtcagtctaacaatttttcacaggagtcaaacaacgaggacaatagctttaaacagttgataaaatcctttgttacaaatgagtttcaatgcagtttaattccacctgatttaaccacatggaaattgtgtctggaattagtagattcaaacgatttacagaatgatttgtttcaactattactaagagaccaatataaattaagtcctgatgattctttatcaccagatgaatttttccagctagggaaagatcaccttgaggaagaatttgacttgaacatctccacaagcgtttctcggagaagtgatggcagtgataaaaaagttaaaaccactgacaagccaaaggaaccccttaaagaaattaaaaaaaaaccaatcaagtattggaatgaatttgacgaacaagaggaagataatttagataacacgttttatatcaatactaacggaggcaatggtacatcggatgatgaagagtctttgcttttaagaagctcgccaaccgactatggatttattttgtttagtaggagtttcataaaccatatttacgagttttgtgaaaagctgagaaatttaattcgtcatgacaagagggcaccgttgccagttccgtttgatagttccaaaaggcctcagcaccccactcactatggttcgatggcatcattgagttcacagtcaacaataacatcatatgatgatgttcaaagatatttgcaataccaacaacaagatatagaagactctcaatctgtctatgaatatcggcatgatgaggtgattacattcctatacttgtccgcactacttacttcttgcattatggcaagtgtatgcctaggtattgttttgtctttgtttcgtggacaaaataacaatgaaatagatttagaagttcaaaatatcctcatagccattatcattatatcattattggtttcccttcttttgatctgcgcttgtctgctattgttattcagtaggttcactttggcacctatctggcattatattagctgtttcataatgtttttcacggtaactgggactgtatgctatggcatggttgaaatattcttttaa

SEQ ID NO: 470 - DNA, 933 bp, Saccharomyces pastorianus
atgatctcagaaaaggctgctactgccttggccactgtagccacagtttgctggtgtattcaactaattccacaaatcatttacaattggaagaaaaaagactgtactggactaccacccttaatgatgtttttgtgggttgtttccgggattccgtttgctatatacttctgtgttagcaacggtaatgtcatcttacaagttcaaccccatctttttatgttcttttgtgctataagttttgtccaatcgtgctattatccaccagttagcatggcaaaatcgaaaattgtgtttattatagctactattattgcagcagatgttggtatggaagttggcttcatattgtggttgagacctctttacgagaaaggtactacatggcctgatttaatttttggtattcttgcatccgttttgttagccgttggattacttccaccctattatgaattggctaagaggaaaggccgtgttgtcggcattaactttgctttcttatttattgattcgttaggagcctggttatctattatcagtgttattctaggtaacatggacaccatgggtattatactatactctattattgcgggaatggaactagggatttttatctctcattttatatggtggtgtaggttcaagtggctcgctaaagacaagtttgttgacgaagaaaccgaccagaatgaaaaggaagaaatctacgggaaaactgaacacgtattaaacaaggatgaacaacaagtaactagttataacttggacgataattcaatttgtgacgatgtctcaagcctcgcagacaatttaaatttgagtcacacttctgatggcgatgcattgtcaaggactcaaactcttcatgccgttcatggagttgtggttagaacggaatccgatcattattccaggctaagtgtataa

SEQ ID NO: 471 - DNA, 1827 bp, Saccharomyces pastorianus
atgagtgatagaaacagtcgtatcgctattgttagcactgataaatgtaaaccaaagaagtgtcgtcaagagtgtaaacgttcatgtcctgttgtaaaaactggtaaactatgtatcgaagtcactccgacttctaagattgccttcatttccgaaatcttgtgtattggttgtggtatctgtgttaagaaatgtccatttgatgctattcaaattatcaatttgccaaccaatttggaagctcatgttactcatcgttactctgccaatagtttcaagttgcatagattgccaactccaagacccggtcaggtccttgggttagttggtaccaacggtatcggtaaatctactgctttaaagattttagccggtaagcaaaaaccaaatttaggacgttttgatgatcctcctgaatggcaagaaattattaaatacttccgtggttctgaattacaaaactatttcaccaagatgctagaagatgatattaaggctatcatcaagcctcaatatgtcgataacatccctcgtgctattaaaggtcccattcaacaagttggtgagcttttgaaattaagaatggaaaaaactccagaagatgtgaatcgctacattaaaattttacaattggaacacgttttaaagagagatattcaaaagttgtctggtggtgaactacaaagatttgccattggtatgtcatgtgtccaagaggctgatgtttatatgttcgacgaaccttcctcttatttggatgttaaacagcgtttgaacgccgctcaaattattagatctttgttgggtccaaccaaatacgttatttgtgtcgagcacgatttgtctgtgttggattatctttctgattttgtctgtatcatatacggtgtaccatctgtttacggtgttgttaccttaccatcatccgttagagaaggtatcaacattttcctggatggtcacattccctctgagaatttgagattcagaactgaagctttacaatttagaatagctgatgctactgaagatttacaaaatgatgctgtcaaccgcgccttcacttacccaggtttgagaaaaacgcaaggtgacttcgtactgaatgtagaagagggtgaattctctgattctgaaatccttgttatgatgggtgaaaacggtactggtaagaccactttgattaaacttttagctggtgcgctgaaaccagatcaaggtcaacacattccaagattgaatgtttctatgaaaccacaaaagattgcaccaaaattcccaggtaccgttagacaactatttttcaagaagattagaggccagtttctaaatccacaatttcaaacagatgtcgttaaacctttaagaattgacgacattatcgatcaagaagttcaacatctgtctggtggtgaattgcaaagagtcgccattgtcttagctttgggtattccagctgacatttacttgattgatgaaccatccgcttacttagattctgaacaacgtattatttgttctaaagttattagaagattcatcttgcataataagaaaaccgcgtttgtcgtcgagcacgatttcatcatggctacctatctggctgataaggttattgtctttgaaggtgttccttctaaaaacgctcatgcaagagctccagaatctttgttgactggttgtaacagattcttgaaaaatttgaatgtcactttcagaagagatccaaactctttcaggccaagaattaacaagttagattcccaaatggataaagaacaaaaatcatcagggaactacttcttcttggataataccggtatttaa

SEQ ID NO: 472 - DNA, 2676 bp, Saccharomyces pastorianus
atggaaattaagccggtcgaggttattgacggcgtccccgtctttaggccctccatgatggaatttgcaaattttcagtatttcattgacgaaatcaccaaattcgggttggagaacggcattgtcaaggtcatccctcccaaggaatggctagatcttttggaagattctccctctgtggagtctttgaagactgttcgaatcaactccccaattcatcaaaatgtcaagcagtgggagggacaacaagaaaacggcctcttcactgtcgaaaacgactacgatgataaatcgtatgatttaacgcagtggaagaatatggcctccagttctgatggtcgaataaagcaaagccaggatgatgaagtcttgaaacaaaactatgacttaagcaatcaagatgatttttatgacttgacaaaactacagtttttggaaagcgatttttggaaaactgtttttctgtccaaaccgctctatggtgtggacgaagcctcttcacttttcccctacgatctgactttatggaatttaaataatttatcggattccataaattcaagcaatagacatatactctcaggtctacctaaatcgatgtttccatggcatttggatgaacagaacaaatgttcaataaactacttgcacttcggtgcccccaaacaatggtattccgtaccctgtttgaatacagaccgatttttgaatcttttatcaaaggagttactatttgataagaaaaattgtcctgcatttatgagacatcaaaatgttctaacatctccagatttcttgaaaaagaataaggtgaaattcaatagagtcgtacaatttgaacatgaattcatcatcacttttccttatagcatgaattcaggatttaactatggctataatctttgtgaatccattgaattcaccttagaccagcaaactattgttagaaagcaaccgtttaaatgtgtttgtgcatcgaagaaggaagaagagaagactagtgccttttccaacctatcctacgattctaatgaatctgagcaaagagaatccaacaacgataacgataacgataatgacttattccaaaaagttcgcagtttcgatgagctactaaaccattcctctcaggaattacaaaaccttgaagacaacaaaaaccccttattctccaacatcaatatgaacaggccacaaagtagttctcttcgatctaccacgcccaatggtgtcaaccagttcttgaacatgaatcaaaccacaataagcaggatttcttctccactactatcaagaatgatggatttatcaaatattgtagaacctaccttagatgaccccacttcaaaattcaaaagaaagattctaactccgcaattgcctcaaatgaatattccatccaatttaagcaattttggtactccatctttgacaaatacaaattctttactatctaatatgacaaatgcgtcgactaatccatccactatcacaaatggcaatccaaaccacaacaacgttaacagtggtgctgtgcccgcagctgcaatctctggtgccaatgccactagcagcaccaataacagtaccaataacagtagtaataacaacgtttcaacggtcccttcctcgatgatgcactcgtccactttaaatggatcctcgggtttaggtggtgataacgatgacaacatgttggctttaagtttggccactttggccaacagtgccactgcatctccgagactaacgctaccgccgttgtcttcaccaatgaatccaaacggccatacttcatataacggtagcataatcaacaataacagcagcaatggtaacaacacatactccaacggtactgccacggctaatgccacggctacatcagcaccccacaatttatcgattgtgtctcctaatcccacttacagtcccaatccgttgtctctgtatttaaccaactccaagaacccgttaaattcaggtctcgccccattatctccttctacatccaatattccatttcttaagagaaataatgtggttactttaaatatttcaagagaagcttcaaagagccccatatcttcgtttgtcaacgattataggtctcctttgggcgtaagcaacccactaatgtactcttccacaattaacgactattcgaacggtactggaattcgtcaaaatagtaataatattaatcccttagatgcaggtccatctttttctccacttcacaaaaaacccaaaatactcaatggtaacgataacagcaataacaatagcaacaactttgaatacaatttcgccagcaataaacaagaacctaattcagcaattttgaacaacgatgccaataataatgaaacgtacaatacttcttcgatgaatagtaacggtaataattatcaaccgcattcttctaaattcggtgaaaacgaagtcattatgtcagaccatggcaagatctacatttgtcgagaatgtaacaggcaattttcttctggtcatcatctaacaaggcataagaaatctgttcattctggtgaaaagccccattcttgcccaagatgcggtaaaagattcaaaagaagagatcatgttttacaacatctaaataagaaaattccatgtactcaagaaatggaaaatgctaaattaactgaatcataa

SEQ ID NO: 473 - DNA, 3738 bp, Saccharomyces pastorianus
atggccccagctacccctaaagcttctaagactgcccagtttaagaatggctccacgtcgtcccaaaaaaaaatgaaacagtcaagtttactgtcatttttctccaaacaagcatcttctgcgacgcccaccaaaggagcacctcaagctattccatcgagttcacaaaacccagctactagtaagacaacggagaagtcagaagataaaaagtccaaacagctttttgtagatatagatgacaacaatgatatgacaatggctgaagaaacgccgtcaagtaccagtcattctcaagagttccagtcagataccttactaaacactaatacaactgaagttaagaacgccattgcagatgatgattcgtcatcctcttcacaaactcgaagaaaccataaaagaacgatcaattatgctgaaagtgatgaagaagactctagcactttgtctaccaacaaacgaaagaggagtaaagtgattgacagcgaaagtgatgaagacgaatatgtacccgataaaaatgatgcggaagctgaagatgatgaagataacgatattatagaagccaaagaagacatcaaagacgaattggcagataatgatggtggagatgatgacgatgatgatctgttgtccttagtggagtcgtcttcaaagagaaagtcatcaaatacttctcattcttcatcaccttttgcaagaaacacatcacatagcatttcaaagaatgcgagtagaccaaatcaaggccaaagaaaatcttacactcctcctcacacccaaaaatcaatggtttctaaatccagcaaattcaataaacaaaatgaagagagatatcaatggctagttgatgaacgtgacgcccagcgccgttccaaaagtgatccggagtatgatccaagaacactgtatatcccatcctctgcatggaacaaatttacaccgttcgaaaaacaatactgggaaattaaatccaaaatgtgggattgcattgttttctttaaaaagggtaagttctttgaactttatgagaaagatgccttattggctaatgccttatttgatttgaagattgcaggtggcggacgtgctaatatgcaattggccgggatcccagaaatgtcgttcgaatactgggcagctcagttcattcagatggggtataaagttgccaaggtggaccaaagagaatcaatgcttgctaaagaaatgagagaaggttcgaagggtatcgttaaaagagaactacaatgtatactaacctcaggtactttaactgatggcgatatgttacattcggacttagcaacctattgtctcgctataagagaagagtccggtaattactataacccaaccgaattagatacgtcgaccacggctaaaaagttgaacacgaaaatattcggtgtggcctttattgatactgccactggtgaacttcaaatgttggagtttgaagatgatagtgagtgcacgaaactagacacgttgatgtctcaagtgagacctatggaagttgttatggagaggaataatttgagcacattggctaacaaaatcgtcaagtttaattctgcccccaatgcaattttcaatgacgtaaaagccggtgaagaattctatgactttgataaaacttattctgaaataatatcatctggatacttttctacagaagaagattggccagaaattttaaagacgtaccatgatatggggaagaaagttggttttagtgcatttggtggattgttgtactatttgaaatggctaaagttagatgaaaatctaatttcgatgaaaaatatcaaagagtacaattttgttaaatcgcaaaactccatggttttggatggtatcactttacaaaacctagagattttttccaattcgtttgatggttccgataagggaacactgttcaaactatttaacagggccattactccaatgggtaagagaatgatgaaaaaatggttaatgcatccactattgcataagaacgatattgaaaagagactcgacagcgttgactctttattacaagatatcactctaagagaagaacttgaaatgacgttttctaagctgcctgatctagagagaatgctggcccgtatccacagccgaacaattaaagtgaaagatttcgaaaaagtcattacagcatttgaaacgattgttcaattgcaaaactctctacaaaataataatttaaagggagatgtttcggattacatatcatctttccccaaggggcttgtggaaggtgttgaaaactggacaaacgcgtttgaaagacaaagagcaatcaacgaaaatattattgtcccacagaggggatttgatgtggaattcgataaatcactggataaaatacaggagttgaaagacgaattgatggaaatattaatgaggttcagaaagcagttcaaatgttcgaacatacaatataaagattctggtaaggaaatttacactgtcgaaattccagtttctgcaaccaaaagcgtcccatcaaattgggttcaaatggcagcaaacaaaacctataaaagatattactctgatgaagtaagaactttagcgagatcgatggcagaggccaaggaattacacaagactctagaagaagatataaagaataggttatgtcaaaaattcgacgtacactataattcgatttggatgcccactatacaagctatctctaatatagactgtctgttgtctataacaagaacatccgaatctttaggcactccctcttgtaggccgattattgtggatgaattcgatccaaaaacaaatgccaaaatgaacggttacttgaatttcaagtcattgaggcatccatgttttaatctcggtgctaccaccgcaagagactttatccctaatgacgttgagttaggtaaggatcaacctcaattgggattgttgacaggtgccaatgcggcaggtaaatcaacagtattaagaatgacatgtatcgccgtaattatggcacaaatgggctgctacgtaccctgtgaatctgctgttttgacgccaatggatagaatcatgacgcgtttaggggccaatgataatataatgcaaggtaaatccacatttttcgtggagttggctgaaacgaaaaaaatactagatatggcaacaaacagatcgttgttggttgttgacgagctggggagaggcggttcatcaagcgatgggtttgccattgcagaaagtgtgctacaccacgtggcgacacatattcaaagtttaggatttttcgccacacattacggtacactggcactaagttttaaacaccatcctcaagtaaggccattgaaaatgagcattctggtggatgaaggaaccaggaacgtgacttttctgtacaagatggtcgaaggccaaagtgaaggttcattcggtatgcatgtggcgtcaatgtgtgggatttcaaagagtattatcgacaatgcgcagattgcagcagacaatttggagcatacatctagattagtcaaagaacgtgatttggcagtcaacaatttaaaaggagaagttctctctttatctggtggcttacagagcgatttcgttcggattgtgtacggagatgggttgaaaaattcaaaattgggttccggagaaggcgttttgaattatgattggaacattaaaaaaaatgtcttgaaaaatctcttcagtatgatcgatgatttggattcttag

SEQ ID NO: 474 - DNA, 798 bp, Saccharomyces pastorianus
atgtctcaaactcgtgaagattccgtctacttggccaaattggcagaacaagccgaacgttacgaagaaatggtcgaaaacatgaaggccgttgcttcttcaggtcaagaattatccgtcgaagagcgtaacttattgtcagttgcttataagaacgtaattggtgctcgtcgtgcttcttggaggatagtttcttcaattgaacaaaaagaagagtcaaaagaaaaatccgaacatcaagttgaattgattcgttcttaccgttcaaaaattgaaaccgaattgactaaaatctccgatgatattttgtccgtattagattctcatttgatcccttctgccactactggtgaatctaaagtgttttattataaaatgaagggtgattaccaccgttatttggctgaattctccagcggtgacgctagagaagaggcaacgaatgcctctttagaggcttacaaaactgcctctgaaattgccaccaccgaattacctccaactcatccaattcgtttaggtttagctttgaacttctccgttttctactacgaaattcaaaactccccagacaaagcctgtcatttggccaaacaagcttttgatgatgctattgctgaattagatactttatccgaagaatcttacaaagatagtactttgatcatgcaattattaagagataacttgacattatggacctcagacatttctgaatcaggtcaagaagatcaacaacaacagcagcaacaacaacaaactcctgctgaacaaactgaaggtgaaccagccaaataa

SEQ ID NO: 475 - DNA, 432 bp, Saccharomyces pastorianus
atgtcaaccattcccccaaagttttttaaaattgcaaacatttcaattggctgtttagataccatcgccgcactttcgcaattgaagtaccttttcaccaatttaagcatttttctcctagccgtgtatggactagcacttacaattccaatcatttatttagagtttaaagtgccaccaaacctttacagatacgcgtctttttattttagtttccttggaagggggctttcttatatcttactaggtttaataatcagcttcggcggtattttcaacaagttagcaggaatgtttacctttattttgggggtttccttcatagtcttccatttctcacaatttgtggaagaacctgctaatttcagagcacctggttcatctttatcaattggcgatgatgacattgatgacgatgatgacatgatttaa

SEQ ID NO: 476 - DNA, 2745 bp, Saccharomyces pastorianus
atgatgcaaactccgacagacaatataatctctccatttaacaattatggcagctcagcccaatacaatacgtcgttaaaaactcctaggcaagttacagatattgaaaggccaaatacactatcgccgttgtcgagagggaagaaatggacagaaaaactggccagattccagaggagcagtggcaagaaaaaacgattttcgccttctcctgcttcgtcttccaccttttccttttctcctaactcgagaatcagttcctcgaaatcttctggtaaagaagagggcgatttactaagcacgccctcatccgttctcactgaacatttaccacaacatccccacagaacatcttctttaccaagacctaattctaaactattttatacaagtcatactgacttgtctcgagccagtgagcctccggccgaggaaagcgttaatttttatacgtcacataatataccacccaaggttgctccttttggttatccaattccaagaacttcgagcaaaaaatcctttctgaatgaagcctgtacgctttgtgatgaacccatttctagcagaagaaagggagaaaaggttatagagcttatatgcggacatttaagccatcaggaatgtcttatcatatcatttggcaatacttcaaaggcagatgtaggggaactctttcccccatgtacgaaatgtaaagaggatgctaacaaggctgttcagtgcataccgaagaacgaagaattaaaagatatgcttatttcagatttcttaattaacaaagtcccagattcagagctaccatctacaccgcagtctcaactcccccttccttcaccgttactccctccttttgggttatcatatacaccagttgaaagacaagccatatattggcagactccaaatttaggcccaaatcttatattagccgctcctccaaaggacaggaatcaaattccacaaatgtattcaaaaaaaccatttttacactcttccccgagtcatagaagaacaacatcgagagggagttctgtatttgctacaacatctgtaatatcatctgctaatgacactatttccattacttcggattctgtattatcaagggatgacgaaaccaaaattccactgccacttttaaggtcatattttattcaagtacttctaaacaactttcatgaagaactaaaagattggataatagatgcgaactacggcttactacggctggtagacaaattgatggtttcaaaagatggccaaacataccttcaatgttggtgtttcttatttgaaaatgcacttataacagcaagattgaacggcgaagaagaagatgttctggaaattaaactaaatgaattagaaatatatacaccaataagtgatttgagaatgacgacgctggaggcttcagttcttaaatgtaccttaagtaaagaaaattgtcccaatccggtagacctttacatcatcgaaaagataaattcaaacgaaagcacaacagtacaaaaatggatatcggccttattggaccatgattttgtatttgatgagaaaaacatcacgtcgacattacctactcttccaatcctaaagaatttttcagatgttgcagatggcgacaggtgcgagacaagcaccttcctaggcttaatcaagcctaacaaagttgtcgaggttagcaatatggatcaccataatgatacggtaatcataaggagaggattcactttagatcccaccgaatcgtctagacagagtacagtcaataccatacaatcggttttaactacaattagctcaattctttcattgaaacgtgaaagacccgataatttggtaataattttacagattgatttcaataaattaaaagaaaaagaaagctcaactattatttacaacagtctgaaagcgttaatgctcaaattttctcgtctgcaattttgtttcgttgatcggagcaatcatgtattagactatggatttgtgtcacacaaagtagcttcatcggatgccatttcaaaattggagtcagagcactcttcaacacagttctcttctctttggttaaaggatgttttatatcccaagactattcatgagcatctaggtattatagccgtatcaaataatagcatggaagcagagaagtctgtattatttcaagattacaaatgcttcacaagtattggaagaagacggcctaatgaattaaaagtgaaagtaggttatttgaatgtagattacagcgacaagattaacgaacttgttgaggttggttcttggaattttgttctagaaactctttgttatagtttcagtctaagctttgacgaagacgacgacgacgacgataattcgactgaagacgaatttgatagaagctcattatcggatgttgagtctacgactactattcatatcgactctccatttggtgacgaaaaccttacaggaaatctatcaggtgacagaaattccaatgatgacagtgagtaccacaattggacaaagccagaggttattggtcctgcagcacaatcaccattagtctccaatattagactttcactttattctaacggagaagacattagtgaaagcgagactgacgcatctcacttgttgcttaatgatatagatagaaggatcggcgagatgagaaggcgcggttcgttttcgagtctaatggaaaatggaaacgatacccatccactccatatagattatatttaa

SEQ ID NO: 477 - DNA, 1425 bp, Saccharomyces pastorianus
atgggtgctgtaatttctctgcctgtgagtatggctggatcattcgtggcgtcctgttttggaggctgctgctctaatttagtctcaaaaactgcgtcgtcattaggatcttcctccctggggacaagacttttatatgccgtttggcttctagtgaactcattgatatcgtggatatcgtactctgcgaacaaatctatactctggccgggcaagacatgtactggtactggagaatgtgggtttttcactgtccataggttaaattttgcgttaggatgcttacatttgatactagcgtctgctttaacgggtgtgaagtcaactaacgatgtgagggcagcattccaaaattcatggtggagcttaaagtttatattgtatttatgcctcattgttctatcgtttgttatcccaaatgatttttatatttttttttccaaatgggtatcggttcctagtggggcaattttcatcctagttgggcttatattattagtagactttgctcatgaatgggccgaaacgtgtattagtcacgtcgaatcagaagacgaagattcttcattttggcaacgatttttggttctgggaacaacttctatgtacactgcatcgattataatgactgtggtcatgtacatcatgttctgccaccaacagtgcaatatgaatcaaacagcggtaactgtaaacttaattttaactgttttaacgcttgtcctatctgtgaatcctaagattcaagaagctaaccctaaaagtgggttggctcaaagcagtatggtgtctgtttactgtacctacttgacaatgagtgccatgtcttctgaaccagatgacaagatgtgtaacccgttagttagatccagcggaacccgtaagtttagtattattctgggctcgttatttacttttgttgcgatcgcctatacaacaacaagagctgctgctaatagtgctttccaaggtaccaataccaatggcgcaatatatctcggggatgatatcgaatacgaagggctaggcggacagacaagaaaccaattgagatatgaggctatcaagcaagccgtagaggaaggatctttaccagagagtgccctatatgacacaacttggttgggaacaccttctttgactgatggtgctacagagaaccaaaatgatgatgaaagaaccgggaccaagtacaactacactttgttccatattatattctttttggccacgcagtggattgcaattttgttaacaatcaatgtgactcaggatgatgtaggagattttataccggtcggaagaacatacttttattcttgggtcaaaatcgttagtgcatggatatgttatgcgctttacggctggacagtagtagcgccagcgattatgcccgacaggtttgattatgagaactattactaa

SEQ ID NO: 478 - DNA, 2019 bp, Saccharomyces pastorianus
atgtggaagggtatttggttggctcttcttttatacatagctttagctaaggcgttctctttacctggtgtatcccctaccacatatcatgctaacgatgaaatcccacttctggttaatcgtttgaccccatcaatttactttcagcataaagatgagaatggtaaggatgtttcaagtgataaagagcattttctttattcctatgattactataatgaaaaatttcatttttgtaaaccagagcatgttgagaaacagcctgagtcgctaggatcagtcatatttggtgatagaatttacaattctccgttccaattgaagatgctagaggataaagaatgtgtcgctctttgtaaaaatacaattccaggggaagatgccaagttcattaatacgttgattaaaaatgggtttttccaaaactggctcgttgatggattgccagcagcaaggaacgtttacgatagcagaacaaagacaaattattacggtacgggattcaatttgggctttacagatgtcaaacaaactgtcggcggtaaaacaatccctagtacaatggaagaattggattcagaggactccgaaacaggcgctacattagatgccagagagcctaaaaacataaagcctcatctggttcaaactatagaattaccatatttcgtcaatcattttgacattcaagtggagtatcatgatcgtagcaacggcaattaccgtgttgtcggcgttactgtgaaccctgtatccattgaaagatcctcacccggtgcctgttctacaacagttgagtctttaaccctagtcgaagataaagataatgacgtgtattttacctactccgtcaaattcattgcttctgatacagtttgggctacaagatgggacaagtatctacatatttatgatccgcaaattcaatggttttctttaattaatttctccatcatcatcattttactatcatctgtggttattcattctatacttcgggctgtgaagagtgattttgcccgttataacgaacttcacctagataatgaatttcatgaggatactggttggaaattaggtcatggtgatgtatttagaacatcatctaaatcaatggtgttatctgtgctcgtgggttcaggtattcaattatttctgatgatcatatgtagcattttctttgctgcattaggcctcgtatcaccagcttcaagaggctctttgccaaccgtgatgtttgttctttacgcattattcggctttgtaggttcttatacttccatgggtgtctataagtttttccatggaccttattggaaggctaatttgataattacaccaatcctgcttcctggcgcaatttttctattaatagtagcaatgaacttcttcttattatctgcgcagtcctcgggtgtgatcccagcaagaacgctgtttttcataatcttcctatggttttcggtgtctattccattgtcgtttgctggttcatatattgcctacaaaaagtgtaactgggatgaacatccaacaaaaacaaaccagattgctcgacaaagtccatttcagccttggtacttaaggacaacacaggcaacccttattgcaggcattttctcttttggttcaatagccgttgaattatatttcatttactccagtttatggttcaacaagattttttgtatgtttggttttctactcttttcatttttgttgctgactttaacaacctcattggtaactattttcattacgtatcattcattatgtttggaaaattggttgtggcagtggaggagttttattattggtggtttgggatgttcagtttatatgttcatccatgcaatattatttacaaaattcaaactcggtggattcgtcacaatcatactgtatgttggatattcatttatgatatctgtgctatgttgcgttgtcacaggggcgatcggctttttcagtagcatgatattcattagaaagatttattctagagttaaagtcgagtga

SEQ ID NO: 479 - DNA, 1524 bp, Saccharomyces pastorianus
atgacgatgacacaccaaaaggatttgaaaagtgtctttactacaaaggatttggatttcaagcctgctgcaaagctcactaagaaggacttgaatgcaagcgtcaccaaagcagagtatgctgtaagaggcgctatccccacaagggccgacgaactaaaggaggaactaaaaagaagctcaaattcgttaccgttcaataacatcataaacgcaaacattggtaatccacaacagctagaccaaaagcctttgactttcaccagacaggttttgtccatcctggaatatccagtgattttaaaagtggaccatgaaaagttagcttctttgaatttgttcgccaaagatgctctgaaaagagctcagcgcctactagacgacattggtggttccgtcggagcttactcgcattctcaaggtgtgccagggataaggcaaacggttgccgatttcatcactgagagggatggcggtgagcctgctttcccagaggacatttatctgaccacaggtgcctctgctgctgcaacctctctgttgtctttattgtgtaaggactctcaaacggggttacttcttccaattcctcaatatccattatacactgcatccgcatctctttacaatgcgcaagtattaccatactatttggacgaagaagccgattggtccactgagagtgacgaaattgaaagagtggtgttagacgctttgaaaaagggcattaaaccatcggtgttgattgttatcaaccctggtaaccccactggcgctgttctttctgaaagcaccattgccaagatctgcttgattgctgcgaagtacggcattacagtcatttcggatgaggtctatcaagaaaatgtttttggcgatgtcaaattccattcaatgaagaagatcttaaggaagttacaaaacttatatccagggaaattcgataacgttcaactggcttctttacattccatttccaaaggattcatgggtgaatgcggtcaaaggggtggttacatagaaattgtgggattttctcaagatataagagatgctcttttcaagctcatgtctatatccatttgttctgtagttactgggcaagctgtagttgatctaatggtcaagcctcctcaacctggtgacgagtcatatgaccaagaccgtcaagaaaggctgaaaatttataacgaaatgcttacgagagctaacttattgtatgagacattcaatgaattagaaggtattaaatgccaaaagccccaaggtgcaatgtaccttttcccaaagcttgttttgcctgaaaaggcacttcgtgaaagtaaacgtctcaacatcgagccagatgtgctttattgcacagcactattggaatctacaggtatttgtaccgtccctggttctgggtttgggcaaaaatccggtacttaccacgtgcggacaacctttttgccaccaggaacccaatggattcaagactggagaggatttcatcaagagtttttcgacaaatatcgtgattaa

SEQ ID NO: 480 - DNA, 318 bp, Saccharomyces pastorianus
atgtcactatttgggaggctgtaccagtttcagtcaaggagaatgttttcctccatatcgctcatctctgctctgtctgtattacgtccgcaaaccaacgtgcttttaaacagctcaccattgaaaaccatgtcctctacaccgtttgggtttggtttcattgggcaaagacggtggaagtcaagaggtaacacgtatcagcccagtacgttgaagaggaagagaactttcggattcttggccagggcaaagagcaaacagggctctaaaatattgaaaaggagaaaactcaagggaagatggtttttgtctcactga

SEQ ID NO: 481 - DNA, 858 bp, Saccharomyces pastorianus
atgctacctacaacaacgattccgaagatatgcatcgcaagtcctatgagaaggtatctttcccatacagcgaggtatctatatgccgaggaatataagacaacatctatgtcctccaatgcaccttcgctgacaaaggaccaagccaaaaagagagagttgaaaagactagcacaacgaagagccgaagcaaagagacccgctacgacaagcccactgtatatgccggttgctatggcgctaagatacttgcgtgcagcagaagtaggcagacctcaatctcaacaaacaattaatttaactacattggtggttggcgaaagaggtacggcgcccatatctgggaatgtcacatttcccaagccattgagatatgtgaaagttgccgtctttactaatgacgaaatcaaactgaaagaacttcgtgaaaaatatccaaatcatttaatcggtggagcggatcttgttgcgaagattaaaaataatgaaattcccgttgattttgacaaggcatttgccacaccagatatcgtggctactttacaatcacaagtggctaggatactgggtcctcgcggggttttaccttccgttaagaagggcacagtgaacgatgatataacttctttacttcaagagagcttgggctctatgcccttcagacaaaggggaaatgcgatcagcgttggcatcggaaaatgttactttacagatcgagagctcttgcagaacattatatctacgagagcagcatttaaagccgcggttgagaaccagaaagccaagaaaccaagtatattaagtaagaccacgctatcgagcacacacggccctggtatcgtgatcgactttgcctag

SEQ ID NO: 482 - DNA, 1698 bp, Saccharomyces pastorianus
atgtttaagaaggaacctcacatcaaagctttgagtaatttaaaaaactctgaaagaaagaagttactccaaacttgtaaaaaacagacgaataatgaggagtacacatttccaacctcgactataaagcaaacgaactttagtggtcaaaagaattttgggacagtgtatacagacgaaaataatattccgatattattcaaagaaaagcataatgaacaactttttcccaccgtatactcctgttgggagaaccatacactattacctattgtcttaactcacggatttgttatagaagagcatttgtttaatggtgctaacttgatgatttccggctcaattccgccttttaatcctcattgcaaaataggcactctctgtggtgtggctagtagacaagctcctaagcttgttttagccataggtattgttgaaatggatcttccttcctacaatagagtaatcggtgaaacgggtattgccgtgaaaatcattcatcattttaatgacggtctttcgaaagccttcaaagtaaagttagaaccgccaagtgctttccatgttgcgtcagaagatgaggatatcaacaacacacagatcgaattccaagaagaaactaaaattgttgaaaagacacgtgaaaacgtacaagagataaacacaaatactgaagaaattgctgaagttttggagcacttatccgtctcggacgtggactatttcattacaagggcattatattatacgttaacacaagataaaagtttggcgttacctatttctgcctcaaattttatttcaaaccacattatgcggaatttgccttcgattgatcacaacgaagtcaacgttaagaagacttcgtggaagaagagtgcaaaatttttgaaacatttcgaaaaagaaggcttcttaaaattgaaaggaaagggagacgatttaaccattattggtaaaaacactggtaaggatgaactaaaaaatttcgtgccgtataagcttggagctaacaattccgtcaaggaaaaaggtgagaacactaactccaaagaaaaggcatctggaatgatgtattcgttgacactatataaaccgtttaatcttgcgaaggactttgtgaaggaggccaatttatcctttcagacatactacacctctcaagatattagaaacgctattactcaatacatttctatcaaaaacttggtagatgcaaaggacaaaggaaaggtagttatggatgacttattatacaacatggttaataaaaaaaagagtactcccgatgtagcacgtatcatacctagagcccaaatctcggatcctttactggccaataattttactgagttttaccaaatatataaaagcgatgatacgcttttgtctagaacaccaatgaagggttctctgccacgcatcaagattgtcacagaaatgaaaattggcagaaaagttatcactaaagttagcaattttgaaacgcttcaaatcgacccagaattgcttgctgctgacttaagaaagatctgtagtgggtccaccactattggtgaatcgcaaacattcaaaagtgctgaagtgcaagttcaaggcccacatggccagttaattattgatcatcttaacaaattgggtgttccgaacaaatgggtagattttgaaaataaattgaaaaagaaaaaaaaaaagtag

SEQ ID NO: 483 - DNA, 1008 bp, Saccharomyces pastorianus
atgtcatggaatgcgttatttgtgccactagtggtgattgtgcttttggtagtgctctctccggttttcaagtcaacatggccattttcgactttctaccatagagtgtttcagccctttgtagccgatgaccataaatatcgctggaagtttcatttggttcctcttttctatacttcaatatacctgtacctagtgttcacataccataccagggtagagcccctaatcaagactgaattgttccttctggaacggatactaatcgtgccgatcattatattaccacctgtagtattaggtattttggtgatggtaactaaagccgaggattcaaacaatcataaacaaggctccacagaaaagtacccgtacgactacttactgtattatcctggcgtaaagtgttccacgtgccgtactatcaaggtggctaggtccaaacattgcagtatttgtaatcggtgcgttctgggagctgaccatcattgtatttgggtaaataactgcattgggaaggggaactatttccaattctacttcttcctattttccaacattttttcaatgagctatgctttcctgaggctatactttatatctctcagcagcactgctgtgcttcctagagcagttctgactctaaccatattatgtggatgctttacgattatttgcgctattttcacataccttcaattagccattgtcaaggaaggaatgactacaaatgagcaagacaaatggtatactattcaagagtacatgagagaaggtaaactagtaagatcgttagatgatgaatcccaatcctggtttctcaaatttacagaaaaaagcgacactggcgaacctctccaagaccaacaggtcacattttatagcacaaacgcgtacgaccatcaacgttatagcctaaagcattacataacgatcaaagacgcatccgaaattaccaacttatatgacaaaggtaccttcttggctaacttaatagacttaatgtaa

SEQ ID NO: 484 - DNA, 4551 bp, Saccharomyces pastorianus
atgggcggtactcttgcctcatgggcctgcaagctctgtagatctcctgaagggtttggacctatatctttctatggtgacttcactcaatgctttattgatggtgtaattctgaacctgtcagcgcttttcatgctaacctttggtacaagagatctggttcatctttgtaagaagaagcatcctgggtcaaaatatagacgaaattggataattgtctctagaatggcccttgtcctgttggaaataatctttgtttcacttgcatctttgaattcatctaaggatgagaatggaggttttacagttgtgagtcaatatgcttttactatgttgtccttatttgtcgccttggctttacattggattgaataccatagatcagtggtagcaaatacgatacttttattctattggttttttgaaacatttggaaattctgctaagctattaaatatcctcatcagacacaaatatgagggcggatggtaccctggacaggcaggtttcatattgacatcatttcaagtaattacatgcgctagtatcttactgctagaagctcttccaaagaagcctctgatgccccaccaacatatacatcagaagttgatgagaaggaaaccgaacccgtacgatagtgctaatatattctccagaattacattttcttggatgtcaggtttaatgaaaactggatatgaaaaatacctagtagaagctgatttgtataaattaccaaaaaactttagtagcacagaactctctcagaaattagagaaaaattggcaaaatgaacttaagcataaatcaaagccttcgttatcttgggctatatgcaaaacttttggatataaaatggttttagccgcgttcttcaaagccattcatgatattctggcattcgtgcaaccacaattactaagaattttaatcaagtttgttaccgactacaataaagaaagacaagatgatgacgatcctttaactctcggatatggtgataagcctgatcaaaaattgcccattataagaggttttatgattgcgttttccatgttcttggttgggtttactcaaacatctgtgctgcatcaatattttttgaatgtctttaacactggtatgtatgtcaaaagtgccttgactgccttgatataccaaaaggctttagttttatctaatgaagcatctggactttcatctactggtgacatcgttaatttaatgagcgtggatgtccaaaaattacaagatctgactcaatggttaaatttgatttggtcagggccctttcagattattatctgtctctactctttgtataagctattgggtaattcgatgtgggttggtgtaatcatactagttgttatgatgccattaaattcatttttaatgagaatacaaaagaaattacaaaaatctcaaatgaaatacaaagacgaaagaactcgtgttattagtgaaattctaaacaacatcaaatctctgaaattatatgcgtgggaaaagccttacagggagaagttggaagacgttagaaataacaaagaactaaataatttaactaaattgggttgctatatggctgtaacaagtttccaatttaacatagttcctttcctagtttcatgctgtacgtttgctgtctttgtgtacaccgaagatagggccttgactaccgatctagttttccctgctttaactcttttcaatctactttcatttccattgatgattattcccatggttttgaattcatttatcgaagcttctgtttctattggtaggctattttccttttttaccaatgaggagctacagccagattctgttcagcgcttaccaaaagtagaaaatgttggtgatatagccatcaatattggcgacgacgctacctttttatggcaacgtaaaccagaatataaagtagcgttgaaaaatatcaatttccaagctaagaaaggagaattaacctgtattgttggtaaggttggtagtgggaagaccgctctattatcaagcacattgggtgacttatttagagtcaaagggtttgcctcagtgcacggtagtgttgcatacgtctcacaagttccatggattatgaatgggacggtcaaggaaaacattttgtttgggcataagtacgatgctgacttttatgaaaaaactatcaaggcctgtgcgttaaccattgacttggcaattttgatggatggtgataagacgctagttggtgaaaagggtatttccttgtcgggcggccaaaaggcacgtctatccttagcaagagcagtttattcaagggcagatacttatctactggacgatcccttggcggctgttgacgaacacgtggctaggcatttggtcaaacatgtattgggttcaaatggtttactacattccaaaaccaagttattggcaacgaacaaagtaagcgccttatctgttgcagattcaattgcattattagataatggtgaaattattcaacaagggacatatgatgatattaccaaggacgcggactctcccttgtggaaattaatcaacgattatggtaaaaaacacaataatacacacagcgaaaccagtgaatcttcaactaactcaattcgcgaaaacagtataccgattgaaggcgagctggaacaattacaaaaactaaatgatctggatttcggcaacgctgacactcaaagcttaagaagagctagtgatgcaactttacgcagtattgattttggcgatgatgaaaacgttgctaaaagagaacatcgtgaacaggggaaggtgaagtggaacatttacctagagtacgctaaagcttgtaacccaaaaagtgtttgtgtgttcatattgtttatcgttatatcaatgttcctatccgtcatgggtaacgtttggttgaaacactggtccgaagttaatagccgctatggggctaatccgaatgctgctcgttacttgggtatctatttcgcccttggtattggttcagcgttggcaactttaattcagactattgttctttgggtctactgcactattcatgcctccaaatatttgcacaacttgatgacaaactctgtgctaagagctccaatgacctttttcgaaaccacaccgattggtagaattttaaaccgtttttcgaatgatatatataaagttgatgctttgttgggaagaaccttttctcagttttttgtgaatgcggtaaaagttacgtttactattactgttatttgtgcgacaacgtggcaattcatttttataatcgttccattgggtgtgttttacatttactatcaacagtactatttaaggacatcaagggagttgcgtcgtttagattctatcacaaggtctccaatttattctcattttcaagaaactttgggcggtcttgctacagttagaggttattcacagcaaaagagattttcacacattaatcaatgtcgtattgataataacatgagtgcgttttatccttctgtcaatgctaatcgttggttggcatacagattggaacttattggttctgttattattttgggcgctgctactttatcggttttcaggctaaagcaaggtaccttgactgcgggtatggttggtttgtcgctaagttatgcattacaaatcacccaaacattgaattggattgttagaatgaccgttgaagtggaaaccaatattgtttcggtggagagaattaaagaatacgctgacttaaagagtgaggcgcccttagttatcgaaggtcacaggccacccaaggaatggccaggccaaggtgacatcaagttcaatcaatattccactcgttatagaccagagcttgatcttgttctgaaacagattgatattcacatcaaaccgaaggaaaaaattggtattgttggtagaacaggtgcaggtaaatcgtcgttaacattagcgctattcagaatcattgaagctagtgcgggaaatattgttattgatgacattcccattaatgaaattgggttatatgacttaagacataaactgtccattatacctcaagattcccaagtgtttgaaggtactgttcgtgagaatatcgatccaatcaaccaatacaccgatgaggctatgtggagagcattggaactttctcatttgaaagaacatgtgttatcaatgagtaacgatgggttagactctcaattaacagaaggtggtagtaacctaagtgtgggacaaagacaattactgtgtcttgcgagagcaatgctggttccatccaaaattttggtgctagatgaagccaccgctgcagtggatgtcgaaacagatagagtcattcaagagacaattcgcacggcctttagagatagaactatattgactatcgcacacaggttgaacaccatcatggatagcgatagaatcattgtgttggataacggtaaagtggctgagtttgattccccatcccagctattaaccaataccaaatcattattctattcgttgtgcacggaagccggtttggtcaatgagaattag

SEQ ID NO: 485 - DNA, 1986 bp, Saccharomyces pastorianus
atgcgtgcacacagagttgacacatttctcataagagaaaacgtcagattagagatcattcatgaatcgaactcatattttggtggggagcatatatcaattgcctttcgcttcaaacacctaggctcacaacatgattttttcaaccttaaagaacaactctgcactcttgataaaacggttgaagagaaactacagcaacaagcgagcttgcaagaaaacgaagaaagcaatgcagagaacaaaacctggtccatgaaatcactactaggtgctttcaggaaaactagcaatacggatgatgccacggatgttcaaaacatggaaatgctcaataagaatagggttttaagagaaaaaattcagaagcaattacatttccatcaacctttgtcattaatttcaggctatgttcaaatttcaggcgtttttcaatacgattcagaagtcattacccagtcaaaatttaaacaaaatgaaataaaaatggttgggctagatattctctctggtcatggtaccaaatatgttgctgcatccgaagatggagaccgacttaaaagcagtagaaatttaacaaagtatttcaactcagatttttcgaatgtaactaatggtcttctttccccagaaataacttctacgggggcaatttccagttatagtgaaccagttttagtgaattcaaatgatactagcataagagttctaccgcttttgttgataccacaaacacttcttttttcagagatttctttagagccaggcgaagttagaactttctatttcaaatctacaaaattaccaaaggatatttgtccaagttattcctcctcaaaaatcgtgtcaataaattacacccttgaggttggtgtagacgtgctatctgacgacaacatcaaaccattttctaataaagttccgatagtaatcgcgccatatatcagtcctaatgctgagcagtacacatcacattttgataaacccccaatcatattaaaggccggtaacatcaaagagttaaagccgcgtccgtttactcgaaaagtttctacagcttctgccatatcatttggtagaagaaaatcttccatcattgttcctccattagaggataataaatccgttgaccgcatcaaaaaaagctttattgaactagtggaatcgaaccagagtgggtcaagagatatagatgaattggttgacctccaaatggaagtacagtttgggaaggatgaagattcttcagatcctgaacctaatgactcacgtttttccaatgaaatggcgatatcggcagattctagtacagcaagtaactctataaccaaaaggagaaaaagtgaatccgtgcgtaataacatctccaaccttggacaacaggcatggaatgatgtttctctcgtaaagacagataacaactctaacattttgcctcagttagtgaatttacaaaatgcgtaccaaattaacagaaataatgagtctatggcaaaagtatccttgtcagcacccttcttcaaaaccacagatgatatagatatggtcattgaattagattcaataactacacctttactaaaagtaacttcgctgactatatccttggaatcatttgaaatcgtgaatccaaaatacaagactgaaggaaaacgaatggggagtaaaccaaaggggaatgccgtctacgaaaagcattttatttgttttgatgaatgtaagtctgtatcggtaaaattacttcctccaagatcgcccacaagtcagattactgggcagttcaaaacagatgtctttcaacataaatggatgataggcctaaaatttgcaacagttgcaaagacgaataatatcactctaaatcaattttacgaagataaaaagggcgttctgtttcattcaaaagagacgttagaaggggaagaattttcttgctacgtccctgttcctatactggcttcatctgaagatttcatgggatggtaa

SEQ ID NO: 486 - DNA, 1128 bp, Saccharomyces pastorianus
atgcttaggtatcacatgcagggcttcagtggatatggtgtccaatactcacctttcttcgataacaaacttgcggttgctgctggttcaaactttggcctggtcggaaatgggaaactgtacatactagaaattaaccgtgatggtaaaattgaagaaaggaactcatttttaacacaagattgtttattcgatattgcgtggaacgaaagtcacgaaaaccaagtactggtagcacaaggagatggcacattgcgtctatttgatacatctttgaaagagtaccccattgctatatttaaagagcatgaaagggaagtgtttagttgcgattggaacttggtcaacagacaaacttttttgagcagctcgtgggatggatctataaaaatatggtcccctctaaggaatcaaagtttgatgagccttaccccacggcctttagaaattacgaaaatggtagacccattgaatgcaattttgtcaaataagaaaaattttactggcatatctaagaataagaattgtgtataccaggcacagttttcccctcatgatcaaaatttggttatatcctgttcgggaaattcatacgcaagcttattcgacatcagactaccgcctagcaaaagccagaccaactttttagtacattcagggctagaagcactgacgtgcgatttcaataaatacagaccttatgtaattgccacgggcggtgtagacaacgctgttagaatatgggatattagaatgttaaaaacaagtggatccgccaccaccagcagacctacgcatactccgtctcacaatgcagcatgcattaacgaaattcccaacgcacatgggctagcaattagaaaagttacttggtcaccccaccattccaatattttaatgtccgcttcttatgatatgacctgtcgagtatggaaagacctaagtaacaatggcataaaagaaacttacaagactaactctacagataccggaaaaggctgcctctttaatttcacgcagcattctgaatttgtttttgggattgattggagcttatggggcaagccaggatatgtagcttcaactgcgtgggatggcaatttgtttgtgtggaacggtttgggctaa

SEQ ID NO: 487 - DNA, 1806 bp, Saccharomyces pastorianus
atgaaattctctgctgttacattcgccaccaacgcgtttcttttctatagctcaatggtaagtgccgactctctagcttcctcatccctaacagctggtgataattacgttaaaatcagttttcaaaagaagtatggtgattcttttgaagacgcttccaataataaaaaaaccgaagcgcatttgatgaagagaggagacgattacgaggtggtaggattgaacaacaaggaaaacttttattcggtggacttgcatatcggtactccctcgcaaaagatcactgtacttgtggacactggttcttctgatttatgggttacaggctcgaataacccatactgttccaccgagagcggggacacatccgattattcggtggaacaaaaagatagcttagaaagtgtaattcaaagcatggttcaaagcgtggtccaaagcgtggtcacggaaattagctatgacaccaccgtacctgacacggatgctactgccactcaagacagtacatcttctgctttacagacgattgattgcaccgagtacggtacatttgatagctccaactcttctacttttcaatccaataagaccgatttttcgatcacctatggtgatttgacctttgcctctggcacgtggggccgtgatcaattgaacttgaacaatttgaacgtcactggtttatcgtttgctgtggcaaatgaaacaaattccaccgtcggtgtcttgggtattggtttaccaggattagaatcgacttattctggtgctactctcagctctgcacaagaaagctacacgtacaataacttcccaatggttttaaagaattcaggcgccattaagtcaacagcttattctttatttttgaacgaaaccaatgccaagcatggtagcattttgttcggtgctgtggatcatgggaagtattcaggcgatctatacacaattccgattatcaatacattgcaacatcaaggttacaaggatccaattcaattccaggtcactttgcaaggtatcgggctagcaaaagaagatacaaatgctgaatcaacgactttaacaactacaaaggtgccggctctactagattcgggcaccacaatctcttatatgccagttgagctcgtcgaaatgtttgctgacaaagtcggtgcttcttattcctccgaaactggttactacttgatggattgtatcaccgacactgataatgacattaacgtcgtgtttgattttggcggattctacattagtggtaatttgagtagttatcaactaagcgctgacagtagttcggatatttgcattttgggctttgctcctcagtccgattctaccgttattctcggtgacaactttttgagtcatgcttatgtagtatatgatctggataatatggaaatttccatggcccaagttgacttgagtggtagagatgagaatatcgatatcatagaagactctgttccaagtgccgtcaaagcacccagttactcaaatacctggtccatggacgaaagtatcgtttcaggtgggaatatctttacaataacatctggctcgagtatccatagctctggttcaggcacctattctacagcaagtacttccagctccaaaggtcaaaaagaccagacaagtaccacttattcaaagtctggagtcggttcggctgcctcctcaacagtggcctcgtcatccacttcaaactcttctacaaaaaaagagaactttggatacagcctaaatactcccttctttgccaagttcattacagctgttctttcttacatttga

SEQ ID NO: 488 - DNA, 1647 bp, Saccharomyces pastorianus
atgtcttctaatccagaaaatactggtaataatgctaataataatgcgaatgctagtaacactggtgtagccgcagcacctcagcagaatatgatgctgcaacagaaacagttgctggaaatgacggtgaaattcaaggcgttggtcagtgaagcaagaaatgtaggtgagactactcctaggggcaaagagttgatgtttcaagccgcaaagatcaaatccgtgtacgatgctttcaacagaagaagacagcaggcggcacaagcttacaagaatgcttctgtggggaatgcaaaccccaatgcaggtaattcggcttctatgcctactgaaaaacctccgaatttatcccagcaacagcagcaacagcaagcaaggagtaacagtaataaattcagtaatatgataaaacaggtgcttacctcagaagaaaaccaacagtatgaaaagctatggcagaatttccaggctcgtgcaacgagtatgaaggagaaagatacgtttttgaaacagaatatcgacagattagtacaagaagtaaataaacagacagatgaagcaacaaagaaacagctagaagacaagaaaaatgaacagcttaataacaggaaagtacttggaattgaatataataatttacttaagggatttcaaaatagcaaaaagacattctatgtagaatgtgcaagacataatccagccttacagaaattcttacaggaaagtactcagcaacaaagagtacaacaacagcatcttcagggtcaaaaccaagtgaagagcactgttgtccattcttctgatatgccctctgcagctacacccgacgcatcgaaaccgcagcaacagcagccgcaactacaacaacaaaagcagcagcagcaacatcaacagcagcaaccgcaacaacaaccgcaacaattgcagcagcaaccgcaacaacaacaaaatgtcattccttctgccactactcctagaccaaacgtaaaggctccacaaggcgatcaatcaaaaacgaaatcgcaagttactaacgtaaatgcaacagcgtccatgatgagtaatgtaagttcaagtaagtcagcaatattcaagcaaacagaacctgccatacctatatctgaaaacatatccaccaaggcgccagctccggtaccttatagatccaacaggcctacgataacggggggctctgctatgaatgccactgctttgaatacacctgtaacgacaaaattaccaccctatgagatggatactcagagagttatgtcaaagcggaaattgagggaactagtgaaaactgttggaattgatgaaggtgatggtgaaactgtcattgatggcgatgtagaagaattactcctggacctggcggatgattttgttacaaatgttactgcttttgcttgtagattggccaaacataggaaatcagacaatttagaagcaagagacattcaactgcatttggaaagaaactggaacatcagaatccctggctactcagcagacgaaataagaagtacgagaaaatggaatccttctcaaagctataatcaaaaattacagaacatcaattctgataaggtagcgactgcaaaaaacaataacggtagcattccaaacctcaatcccaaaaaatag

SEQ ID NO: 489 - DNA, 1356 bp, Saccharomyces pastorianus
atgctttccagagcaactcgtactgcgactgccaaatacctagtaaaatctagagtagcaagaaacgtcttggctgcaccctcagtcaaaagacatgcttctacaaccgtatttaaacaagccaacaaggtccagtccctgggttcaacatatgcctttggcgcaagatccaagttccccacaagcccattctttacatctgccagccgctttaaatccacctctattgaggtgccccccatggctgaatccttgacagagggttctttgaaggagtatacgaaaagcgttggtgatttcattaaggaagatgagttgctggccactattgagactgacaaaattgatattgaagttaactcgccagtatcgggtaccgtcactaaactgaacttcaaaccagaggacaccgttaccgttggtgaagaattggcccaggttgaagctggtgcagctccatctgaagggtccgctccaccaaaggaggaatcaaaggaaacacctgcatcatctcaggaggccactccaaaggaagctcagaagcaggagactgctccaaagaaggaagctgctccaaagaaagcggccgaaccaaaggatgctgttacttcaaaggctaacgaaactccagctgtctccagttctttcacaccattcccacgcacagaaactagagtcaaaatgaaccgtatgagattgagaattgctgaaagattaaaggaatctcagaacactgctgcttctttgaccacattcaacgaagttgacatgtcggctttaatggaaatgagaaaattatataaagacgagattattaagaagaccggtactaaattcggattcatgggtctattttctaaagcctgtactctagctgctaaggatatccctgccgttaatggtgctattgaaggtgaccaaatagtttatcgtgattacacagatatatctgttgctgtggctactccaaagggtttggttaccccagttgttcgtaatgcagaatcgttaagtgtcttggacatcgaaaacgaaattgtccgtttgagccataaagcccgtgacggtaagttgactctcgaagacatgaccggtggtactttcaccatttccaacggtggtgtttttggttccttatacggtactcctattatcaattcaccacaaactgccgttttgggtttgcacggtgtcaaggaaagacctgtcaccgtcaatggacaggttgtttcaagaccgatgatgtacttggctttgacttatgatcacagattactagatggtagagaagctgttactttcctaaagactgtcaaagagttaattgaagatccaaaaaagatgttgttatggtaa

SEQ ID NO: 490 - DNA, 996 bp, Saccharomyces pastorianus
atggtcataaatcttgccatgactaacaattactaccttaacattcgaaacgctaattcagcgtcaactactacatcctctatattctccaatttgaatgaaaactacgaatcaaaaattaaagaaattgaagattactatataaagacgctacttaatgagaataacgacaatgatgacgacggtaatgacgacggaagtaccagtgatgggcgtaatataaatgaaacggacattctgagcgaatcttctccaaggccttccccttcgttgccttctaaaccgaactgttatcattcattggcagatttcaaagatttgatcatatctgattctaagcctatagatacattgtactctgccaatctctttgcaactagtaacaatatttcattaatcaattctaccgagaaaaagcacaagaagaggttgctcgaggtagagatcaacccaacttatacaacaaatgcatcttcattacctttaaccacagaaaatttacaaaagttatcacaactgaactcaccgccaaatggattaccatatgtactcccaattcagaaaacaacaaatatagaaccctctacaacctcccccttgcaagagcctcaactagttaataaaaccttatacaagacggaactgtgcgaatcatttaccattaaaggcttttgtaagtacagtaataaatgccaatttgctcatggtttaaacgaactaaaattcaaaaaaaaatcaaacaattatagaaccaaaccttgcataaactgggcaaagttgggctactgtccgtatggtaagcgctgttgtttcaagcacggcgatgacaaagacgtacagatataccaaagtgctaccaatggctcaagtaacggtgcggaagttgatgtgccctcctctatcacaactttcatcaacaataacaacaccaccaatttgactaagcccaaaaatttacatactagcgttaaagcattgcaaaggatgacttggtag

SEQ ID NO: 491 - DNA, 819 bp, Saccharomyces pastorianus
atggattataaagaagagcagacacaggaattagaagttctagagtcaatttaccctgatgaactgaggatcacaaacgatgagtatccaaagatcaaatttgaggtagacattaagttggagctggatacgggtgaatccacctcacctttgacaaaggagcacattataactgcaaagttcaagctgccagaaaactatccagatgaaccatgcactatctcattagaagcgcaggaagtcgccctcaatgaaggccaggaagatgaagacgaagaggaggatgaaaacgaagaggaagaagaggaggacgagtatgatgacaacgggaataagatactgaagaagttccaaaacctgcccgatacggttagttttaagggatacctacccgaattaacggtaaagttggaaacacaaatcgaaacggacatgttgctgggcatgcaaatgtgttttgctcttatttcgtcgataaaggagaattgtgaacaatggtacagcgaggaattgggcaaactggaaaaacaacacgagtgggagtctcaagagcgtgaaaagaaggaacaagccaagttccacggtacgaaggtaacaagagaaacgtatttggaatggaggtccaacttccgcaaagagctgaaactggatgaaagagaccaggtaagaagaacgaaggcccaccatgggaagctgaccgggaaacaaatgtttgaacaaggtgtggtgggcacaggcgacgatttcatagaggaggatggcacgagtgtggacgatgtgtccaaggccctcgccgataccgaactagtaaatcaatga

SEQ ID NO: 492 - DNA, 1200 bp, Saccharomyces pastorianus
atggactcgttatcgaagaagattcagaatctaggcatgcacgacattagaaacgccgcaaggttcgcccaaaacgtgattgtacaatacgaaccctaccaggtagacatccgtcgtgccaccaacaccgatgcctggggccccacgccaaagcatctggccaaagtcctaagaaacaggtaccaggtaccgctatacttgatgaccgaatacaccctgaaaagactggtagaccatatcgccacgagacccaagaatctgtacgaaaaggcaagaaaggactacgtcaactacggatctgaatggagggtggtcttgaaatgtctggtagtcgtcgagttcttgttactgaacgtcgacaccggcgacgaactaaatcaaattagatcttgtttactcacccacaaacacatactgactagagaaattgcccaattcaagttgaagttctcgaacgatggtaagatggaagttcacgaaagagggattaggaaaaagggtgaattgatcttgcagtacttggaagaccctcaatttttgaaaaaggaaagagccaagaataagaagaacgccttgaagatccgacagcaaggggaatcctccatttacaacgccaaccaaatctcctcttccgccaactacgatagcgtggacgatgaagggtttgggccggacgctgatgggtccgacgatgaagtagacgccaacaacgtcactaacttcaacgttcccgtggaaacagaagcgggctcgagcactcgcaggcgttctcacatggacgaacaaagaagacaaagaagagaaattctcagagaacagatcaaaaacaaagaacagcaaaggaaaagaaaacaacagcaagataacatacctgatctgatcgacttcgatgattcgaccaccacaaacagcaatcacaacactaatgacgacgacgaagacgaagacgacgaattcggcgatttccagagcgaaacaagtcccgatacaacagcgcccagaacaaccggaggacaaatcgatgacctgctagactgggacggtccaaaatcaagcgcggatatcactgccgccacagaaacgtcactgcctattgtcgaaaatacgcaaccaaaagcccgccctcaagctacaaaggacaagaccaaaggcaacgacgccttttccgaccttttctcttactccaagtcattggtctag

SEQ ID NO: 493 - DNA, 489 bp, Saccharomyces pastorianus
atgtcccaagtttattttgatgtcgaagctgatggccaatcaattggccgtgtcgttttcaagttgtacaacgacgtagtcccaaagaccgccgagaacttcagagcgctatgtaccggtgaaaagggtttcggcttcgccggctcccccttccacagagtcattccagacttcatgctacaaggtggtgacttcaccgccggtaacggtaccggtggtaagtccatctacggtggcaagttcccagatgaaaacttcaagaagcaccacgacagaccaggtttgttgtccatggctaacgccggtccaaacaccaacggttcccaatttttcatcaccaccgttccttgcccatggttagacggcaagcacgtcgtcttcggtgaggtcgtcgacggttacgacatcgtcaagaaggtcgaatctatgggttctccttccggtgccaccaaggctagactcgtcgttgccaagtccggtgaattataa

SEQ ID NO: 494 - DNA, 1098 bp, Saccharomyces pastorianus
atggctggaaaaaaaattgctggtgtcttgggtgccacaggttctgtgggtcaacgtttcattcttttgttggctgaccatcctcatttcgaattgaaagtccttggggcctcttccagatctgccggtaagaagtacatcgatgccgtcaactggaaacagaccgacctgctaccagagtccgccaacgacatcgtcgtttccgaatgtaaatccgaattcttcaaagactgtgacatcgtcttttctgggttggacgctgactacgctggtgccatcgaaaaggaattcatggaagccggcatccccatcgtgtccaacgccaagaactacagaagagaacaagacgtgccattgatcgtccccgtcgtcaaccctgaacatttggacattgttgcccaaaaactggagactgccaaggcccaaggtaaaccaagaccaggtttcatcatctgtatctccaactgttctaccgccggcctcgtcgcccccttgaagcctttgatcgagaagttcggtcctatcgacgccttgaccaccaccactttgcaagccatctcaggtgccggtttctcccccggtgttccaggtatcgacatcttagacaatatcatcccatacatcggtggtgaagaagacaagatggaatgggaaactaagaaaattttggccccattgtccgaagacaagacccaagtcaaactattgacccctgaagaaatcaaggtctctgctcaatgtaacagagtggctgtgtctgacggtcacacagagtgtatctctttgagattcaaaaacagacctgctccatccgtcgagcaagtcaagacatgtctaagagaatacgtttgtgatgcttacaagttgggctgccattccgctccaaagcaaaccatccacgttttggaccaagccgacagaccacaaccaagattagacaggaacagagacaacggttacggtgtttccgtcggtagaatcagagaagacccattgttggacttcaagatggttgttctgtcccacaacaccatcatcggtgccgctggttccggtgtcttgattgccgaaatcttattagcaagaaacttgatctaa

SEQ ID NO: 495 - DNA, 3939 bp, Saccharomyces pastorianus
atgaataccgaattcggctcaatagtgccttccgctaattttggttttttcaatgggcctactaataaagatactacaaatgtcaatgccaatgccaatgccaatgccaatgccagcaacaacaatttctttctaaacggcaatagtaattctaatggcacggattcttcgaaaaacgccttcatgataagttccgttgcctcatggcctaaatcacaacaacagttgcaggatcacttaccttcaccatcgcatacagggaaagcacctgaccaaaaaaagaaatatatgattaatgaccaaaataccatacagcttataggtcccttgattgcttctcctgagagtgttggtttccagaaaaaaccacacaagcctagagaattgccgagattcttaatcaaccaggaacctcaattggaacagagaaaattcgtacaagattcctgggatgaggccaatcaacaaaagatgttaaccttggaagaatccatcgacgatctgaacgaactatatgaaactttaaagcaaatgagaaataaggagcgttcaataatggagcacaaaggtctcgtagacaaggctgattcagcaaaggatctttacgacgcaatcgtatttcaaggtacatgtcaggatatgtgccccatttttgaaagatcaaggagaaatgtcgaatatacagtcttttcatatgaaaaaaatggaccaaatgataaaaaggcttccaggactagagcactaaaggttttcgcaaggcctgcagctgctgctgccccccctttgccctcagacgttaggccgccacacattctagttaaaacactggactatatcgttgataacttattagcgacattaccagagagtgagggtttcttatgggacagaatgagatctataagacaagattttacataccaaaattactcaggacctgaagcagtagactgtaatgaacgcatcgtaaaaatacatcttttgattttacatgtcatggtaaaatcaaacgttgaattttcacttcaacaagaattagaacaattgcataaatctttaatcacattgtcagaaatatacgacgacgttcgttctagtggcggctcttgcccaaatgaagctgaatttagagcttatgctcttttaagtaagataagagaccctcaatatgatgaaaatattcaaagattaccaaaacatatcttccaagataaaatggttcagatggctttgtgcttcagaagaatcatttctaattctgcatatactgagcgtgggtttgttaaaactgaaaattgcctaaatctttatgcacgatttttccaattgatgcaatcacccaacttaccattgttaatgggatttttcttgcaaatgcatttaacagaaattaggttttatgccgtgagagccttatcacatactttgaacaaacgtcataaaccaattccgttggtctatctagaaaatacactgcttttcaacagtcgacaggaaacgattgaattttgtaatcactactcaattgaaatcataaacggagattctgctgacttgaagacactaacccagtattcacataaactagcagaaacccaacctttaaaaaaaacgtacttaaactgtttagagaacagattacaagaaacgagttataagagtttgatcaattgtggtaaagagaattttgattcactggctgatgtaaaattttattcaagaagtgtaaaagcgttatctactattgaaaagcctttctttcaaacagatacaaagaataactccaaccagatactcaaccaaagtagtctttttggatcgaaaaattctgctccttcaaagataagcactacccatcccacggtgacttttttcccacaacaagctaaacaatcacctcaagtatctcaatttcaattttcaaaaaataactctccgttgactcgaacagatcctgcatttcaattagagcaaaaacaacaacaaactaatggtacggcagataaaaactctcgaccagttaatcaattgttaccgagctctgaagcgcaaatttcaggacctgaaaagatatccacgaccgatattgatacagaagatgcaaagctggaacgcgagagacttagagaagaaaaaatgaagaataaagaactagaaagaatagaagcagaaaaaattcgcctaaacaaacaggaagatgcgaacaaacaaaaagttgttcagcaaattacagatgaactaataagagaagtagttaacaataatgcaactgaaattgttaaacgagagctttcagaagtttatcacaggaaaaagctcattgatacgatgtcgtatgagctttatgatgcatttattcatgaaagattatatcttatatatatggattctcgcgctgaattaaaaagaaattatgcgctaatgaaacgttactttaagaagtggaaatcatcttactctcacttaaaaaataatcgcgcaattgaagagcgaaagaaggaagaaatcgaatttgtgagccaccaattaggagtaccaagctttaaaaagcccactcgtttattgagaactccatacaagagtaatgtagattcgtcatttagattatcatcttcagataagaaaaatataaccttctcacccgtcaacgatgaattcaacaaatttgccacttttttaacgaaaacctcgaaattatgggaaccgttagatctgaagtcaatctattatgataaaatgactaagaaatttcccacaaatcttctcactcccgcaaatatttttatttacgctaaagattggtcatccctctcgaatcgttggattttgaataaatttaatttgcaaacgatgcgggattcaaaggaatttgagaataacattatttccagcaagatcagctgcattgatgataactatgaaccatctgattttagtgacttgcaattattgatcttcaatacaggtgttacaaatcctgacatattcgatttagaaatgaaactgaaggacgacggtgaggaactcatcaaactaatcactggcgtttccctaaacactaatatatgcttttgtcttctgattatttattgggaatctgcggagaatacgctatcggaaggtactattaaacagtccctaaaactaaatcggatatctaaaaactataacagtgttattgagcgtatcgacctgatgaatctcacggaggaatcccctcataaatgtctggaagagaaactatctgagatctctcagtcatatatttattacttgacggagagaggaaaatacaataaaacgcttcgtcaaaagaggtcattggccggaattcactcacgcaactcccaattacagactacaaaggatatagatgaaaagatggagacaatgctagaaaaagaaaaaaacaaatatcaacagcaaatgggcgaaaggaatacttatgcacatttagaatctcatatatctgcatcgcctagggtcaaaaaaagaaagctgccaatactcctgtcgtcgtcacactcaagtgaatttaaaacacctttggcttctagactaaatacgtctggcacctcaacgtcaccaccactaccatctcatctggcaataaaattcaggaaaaactcaaggataactagtttgcatactgtactaccagttagcacaccaagtcacagcaccaatttaccagctgcaagttcggacgctacggcaacaacagatatacagtcaactagaaattcaagaaatgctgtaggacttttaagcagtgcctttgaaggaatatcagaaagccactcaatatgtcagacaccaataaacacttcagctcctgcgtcggagggctgtgataaaaatatagatgatattcccgatagtatattagaactcaagatcttgatcgattctgtgaagaaaaaagtaagtaatgaatag

SEQ ID NO: 496 - DNA, 2556 bp, Saccharomyces pastorianus
atggcttccagcaatgaagtatatggcctatttccaaacgaaaacaacatccaagttacagactctcattcacaggggcaagatacctcttccagcattgttaagaacgataccgaccatacaacaagtatatctgatagtatagacactggaatcttaaaatgtattattgaagaacaaggatggaatgacgctgagttatatagaggtgggattcaaaaccaacgattctttttgacggatagatatactaaaaagaaacatctgactataaacgacatgattaattcagaagaggaacaaacctaccaagaacccattcaagattttgaaacttataacaaacgtgttcaaagagaatatgaactcagggaaaggatggatgaattattccgtcagactactaaaaatggtgtacatattttaaacgaagattcgctaaaccaacagtattcaccaatggggcctattaatgattgtcagccgcccgacaggtactctagaatgaaacgtatgacttcgaccttcttcaaaagaaatcttaatttcggcggagaattgaaaagaagaggtgataacgtcaacgttgtcgatcatgtcaagggcaacagttctatatcgacttccggtaccgacgtaatcgataatacaagctacagaaatattgccatcgacgaaaatgtagacatggcctataaagaacatgctattgaagaatttaatgtgcaaggtttatctggtaatgaatctactgcagaaggtgggtcattactgcacgacattgaaaaagtatttaataggtctagagcaactagaagataccacgtccaacggaaattgaaagtgcggcatatccaaatgctttctattggggcatgcttcagcgtcgggttgttcctgacatcagggaaagcattctctatcgctggaccatttggtacgttacttgggtttggacttactggtagtattattttagcaactttgctgtcatttacagaactatctacccttatccctgtatcatccggattctctggattagcttctagatttgtagaggatgcttttggttttgcattgggttggacatactggatttcctgcatgcttgcccttcccgcccaagtttcttcaagtacgttctacctcagttattataatgatgtaaacatatccaagggaacaacggcagggtttattacgctgttttcagcgttcagcattgtggtaaatttattagacgttagcatgttgggtgaaattgtttatgtcaccggtatcagcaaagtaatagttgcgattttaatggttttcacaatggtgatactaaatgctgggcatggaaacgacgttaatgaaagagttggctttaggtattgggatagttccaaatctataaaaaacatgacttacggattatatcgtcctacctttgatttggcagatgctggagaaggaagcataaaaggcattcctgggcccaaggggcggtttttagctacagcttcggtaatgttgatttcgacatttgcatttagcggtgttgaaatgacgtttttggccagtggagaagcaataaacccaagaaaaacaatcccttctgctatgaagagaacgttttccattgtattgatatcttacatgtttttgattttttcagtcggtataaatatatacagcggagacccaagattactgtcatattttcctggtgtttccgaaaagaggtatgaagcaattgttaaaggtatagggatggactggcgacttaggaccaattgtcacggtggtgtggattatagacaaatttcagttggaacaggttactctagtccctgggtggttgcactgcagaatttcggattgtgtacgttcgcatccgctttcaacgcaatattaattgtttttaccgccactgcgggtataccgtcgttatttagttcttcacgaacattatacgccatgtccgtgcaacgaaaggcaccatccgtttttgaaatttgcgataagagaggtgtaccatatgtatctgtgatattctcttccttatcttcggtcattgcctatattgcagtcgatcaaaccgtcattgaaaattttgatgtcttggccaatgtttctagcgccagtacatctattatatggatgggattaaatctttcgtttttacgattctattacgctctaaaacagagaaaggacatcatatcaagaaatgattcatcgtacccgtataaatctccgctccaaccctatttagcgatttatggtctaattggctgttcattattcgttattttcatgggatatcctaatttcatacaccgtttttggagcaccaaagcctttttttcagcatatggaggactgatgtttttctgtgtcagttacataacatataaaatatttggaacctcaaagatccaaaggctagatcaattggatatggatagcgggaggagagaaatggacagaacggtctggaccgaacacagtcaatatttaggaacgtatcgggagagaatgaagaaactgctaacatggctggtctag

SEQ ID NO: 497 - DNA, 1164 bp, Saccharomyces pastorianus
atgagtgaactagaagctaccatcaagcaagccaaagaagctctggctgaaaataatgccaaaaaagcactaaaaatattgaaaccgttcaaaagttcactaaagaaagaaaatgcaaacaatgtgatactaaacgaagtatttgcggaagcgtatttggataatggccaagtggaaaaagcctatcccattttagcacgtgcttgcgaattagattcagaagggcaagttggtgggccaaacaagtttttcaccatgggtcaaatcataggtggacaagatggtgtttcaataataactcgtggaatagtgagtattttcagtattgctggcgacaaattaacaaatgatcaagttgaaaaaattgttggtgggctactttctatgattgagatatggatgactgatttgtgtatggaacaaaatgcagaagaacagtgtgaggagttaatacagagagctatggaactcacagatggaaaatcccctgaaacgtggtccactttgggttcaattagaatctctcaacagaaatttggtgaagcgtatgaagcattctcgcaggcttggaagttctttgacctaagaaaacaagaaattggtgatggtataaatgaaaacaatagcgtagcccagactattggcttgcagtcagagtttatagatcttttacaacctttcttatctttggccaagatgtgcctcgaagtgggcgcatatgaggtcgccttaaaggttattacggcagtaagagatattgacgaagataacatagaaggatattacctggaggggtttacttattatttgatgagtaaattggaaatcttcaagctaaaaaaccctgaagtaaatctcaatccagaaaatatatacgagttcaaccaggttattcaagaagttccattagacttatccaacgaattgattactcaatttgtctatgattctcgtttagcattgagttttgcattacaaatgggcattaatgctgatagcaaggatgaagttgtacaagaattattgggtggtgcaaacgcgttgcttcaagagatcggaggacctgtggattcaaaagaattgtcacgagttaagaagggagaaacaatcaatgagaacgaggattttcaagagttggatttagtggaggatttttctgactag

SEQ ID NO: 498 - DNA, 729 bp, Saccharomyces pastorianus
atggaaaatatagaaacaactgcacatgaagacactaatatcatcaagactggtctaagaaaacaaatgggccttctcaatgaaacaatatcaaaaaatgagagcgattcagcagtggtacaaaaagaagataatgattcgatggaagatactggggccgctacgataggttatatatcaattaaagactatgcatacgaggattcaaatccgctccattatggttattttgatggagacaatgaagaagatgaaatggcttctgattcttcagatatggatgacggatataacaaaaggcaaagtatagcgctacccgacgactacatagttaaccagcgtgcggttgccctctacgatttcgaacctgagaatgataatgaactaaaattgacggaaggtgatctggtattcatcagctataagcatgggcaaggttggctagtagcagaaaatgagtcaagatcaaagacgggactggtaccggaggagttcgttacctatatacagccggaagatggagaggaagaaaaagaggacactgctcgacctttctatctaacgcatttgattacacaaagtgtaaatcctggaaacaacaataatgacattgacgacgacgatgatgacgacgaggatgacgatgatgatgatgatgaatgggaagatattgatgatgttgccgaggttgaaacagatataaaaacaaaactaaaaatatcggattga

SEQ ID NO: 499 - DNA, 519 bp, Saccharomyces pastorianus
atgacgacatcacacagaccacagttagaggcaagaagtggtgcaaaagctgccgcatatactccaacaagcattgaacacgcaagattactaccaggacacacgaaattgaagtataggaagttcaagcaagatataaagtgtaaagaaagttgttcacaaggcgaaggaagtagcgatggcagtgtagacgagaggcaaattaacgaagacgaacaagacgatgtggaggatgagaatcttgaagagagtgaggatgaccaggaagatttgctgaaggaattagcgaagatccaagaggctaagttggacaagaaaatacggcttcagcaaaaggagaaaatagaagaacagccgtccaaacgatcttggaggcaaagcacggcgtttggacgtcataaaatcacaaaaataacaaacagtaatgacgatggtgcaaaaaatccactatctggatacgttaatgatatgacaaaatctaaatatcatcaggaatttcttcacaaaaatattaaataa

SEQ ID NO: 500 - DNA, 2175 bp, Saccharomyces pastorianus
atgtcggatttgattgaattacagaggagctacctattaggggttttaaaccagatcgaaacaaagaacaacttaaagtttcttatcatcgataaaacagtggagacaatactaagttacctgttcctcacacctcgagaattgctaaacaatgttacttctgtagatctgatcgattcacctactaggaagggtcaatcttccattgacgctatctacatattggagcccaccaagttcaacatcaattgtatcgacgctgactatatggtgagaccccccaaatacagaaggtgccatattaggttcttaccggggctaacgaatcccatatttcagttcttccaatcaaaacgttacattggccaaaaccttgactcattcaagcccattgaattggggtttttcgttaaagaagctcaattgttccagactttacaaatggaaaattcgttgcaggtttttttcaataagaactgccaaggtctaattcctactaatgtgaggaagattgtgggctctttggtgagcttatgtgtcattactggagaatatccgattgttagatattccgaaccaaatcttttagatgaagaagatgctcgtgactcaaatcccgtggcaggctcaaattctttgaccaggtccattgcaaatgcctttcaaatagcaatagatacctacgctcgtaataaccccgaatttcctcctcaaaatactgagaggccacgttcaattttgatgataactgatagaacattggatccctttgcccctatattacatgattttagttatcaggcaatgtcttacgacttggtctcaaacgtggatacacaaaaggatacataccactattttgcagagaatgaagccggtgaacaagaggaaaagactgcgaaattagtagatctatctgatcctgactgggttgatttaaaacatcagcacatcatggatgcgaatgagtacattcaaggtagaatcaaggaactaatcgccaaaaatccgctgttggttgatagatcaaacgttaaaaatactaccgatttattaagtgtggtggcacacttaaaagatttcgacgaggaaagaagaagactgattttacataaaactttaattgatgaatgtttaaaagaaaatgcggagagaaaactggctgatacgtccactattgaacagagcctttccggattcgggttggattttaacggtgaaaagacaagacatatcattgacgacctcttaccttctttaatgatgaaggagccaaaaacactagataagctacgttatataattgcgtatgctcttttcagaggtggcattattgagttggattttatcaaactattaaattttatcgggattaatcatgaacatgaaaatttccagcagtatctgacaatattcagaaactacagtttgattgattttaaattgattaaagataagccaaaggacaaaccgttccaaaaagaatggttccatgatacgttagtaaatgatccaaatatattccacacttcaagatttgttccagctgtaggaaacatcttgtccaaggtcgtcgcgaatccgttattattgagtgagcaatatttcccctatttaaaggataaaccgattgagctcttgaatgaagaagaatttcaggcaggcttagttaatacttctgccaattcctcctcgtcattaaggaatccacgccataaagcagcttggaccacgaaaaactcgagcttaaaaaaaagcataccaagacaaaggtttttttattacgttattggtggtatatcactttctgaagtaaaagcagcatacggtcaatcaaacttgaaaaatagagatatattcattggtagtgacgagattttaactccaatgaagttcttagatgaagtgaaacatttacaaaatccaagagaattcttcaagtttaaagaagatcaacagcagcaaacgaaccctccggatttccttttgaaagaaatgaaaccagtggcacaacccgtctcccatattcatttgagaagccagaatgatggacccaaaccaggcagttctagtccagctgtagcaggctctccaaaccaagagttgcctgaaaaggaaaagaagcgcagtaaattctcgagattcctgaaaagaaaatcccatcacgataaatga

SEQ ID NO: 501 - DNA, 1338 bp, Saccharomyces pastorianus
atgactgtgattcaccctttgcaaaacacactcacgtctcgtgatggctctctggttttcgccattgtcaaaaattctattctaagttttaagtatcagtcatcaaatcaatgggaacttattggccaatggtctgacgatttcaataaagcccaagaaataaagaagagcgtcactaaagaacagcaaagacaaatcagcgaaaatggtatcaagaacaaaaaattaaaaagcaataaaggcgactcaattatcaagacagaggctaaaattccatcaccaggtattggtgcccctccaatatattcatatatcagaaacctacaactaactccagacgaatcaaagctaatcgcgtgtgctgattctgacaaatcagttttgattttcaatgttgataaagcttctaagacaaacgttttgaaactgtctaaaagattttcctttcccaagagacccaatgctatttcgatagctgaagatgcagccacagtcatcgtggctgataaatttggtgatgtgtactctattgacatgaactctagcccagaagagaaattcactcaagaacctatcctgggccatgtgtctatgctgactgatgtgtgcatggttaaggactctgacgatcatcaatttataatcacaagtgatagagatgaacatatcagaatttcgtactatccgcaatgttatgtcgtagataaatggctgttcggccataagcatttcgtttcttccatatgctgtgacaaagaatatctgttgctgagcgctggcggtgataatgaaatatttgcttgggattggaaaactggtgaaaatttgtccacttttgattacagcgacttgattaagccttatttaaatgaccaacatttggcaccatcgagattccaaaatgaggaaaacaatatcattgagtttgccgttagtaaaatcgcaaaagtaaacaacctaccgtttgttgcgtttttcgtcgaagctacaaaatgtatcataattttggaaatatctggaaaggaaaaaggcaaactgtcactaaagcaaatcatagatttgccatataatgtcatttcattgtccgcacaaaatgacgaattccaaattactttagataatcaaaagtcgcctcaagttcaaagcagtttcgccaaattcattcagtatagtaccaatgatgataaatttgtcatcaatgatgaaaaatcgaatctattcgataaggttattactaaatctttgcaagaagattctaacttgaatgctgaagaagacgatatttatccattgtacaatatcgcttcgttgagaaaacacggggaacattattcataa

SEQ ID NO: 502 - DNA, 624 bp, Saccharomyces pastorianus
atggattttgaggaagaatacgatgccgaatttgacgacaatcaagaggggccattagagacgccttttccagccgcaagcaccgctgacaatgagaaagagcataacgccggtgaagatacatcttcacaaaagaataagaagcagaaaagagaaacagtcgtggatgatgggagtgaaaacccatttggtattcccgaatttacaaggaaggataagaccttggaagagattctagagatgatggacgatacgcctcccatcatcccagatgcagtggtggattactatctaacgaaaaatgggtttgatgtggcagacgtacgagtgaaaagacttttagcattggctacccagaagtttgttagtgacatagccaaggacgcgtacgaatactcgaggatcaggtcctcggttgccgtatccaatgcaaacaatggtcaggcaagagctagacaattactgcaagggcaacagcagccgggagtacaacagatttcacaacaacagcaccaacagaatgagaagactacagccagcaaagttgttctgacggtgaatgatctaagtagcgctgttgcagagtacggactcaatatcggtcgtcctgacttctaccgctag

SEQ ID NO: 503 - DNA, 1521 bp, Saccharomyces pastorianus
atggccattgactactctaaatgggacaagattgagctatcagacgattctgatgtcgaagtgcatcctaatgtggacaagaaatcgttcatcaaatggaaacagcagagtattcatgaacaacgttttaaaagaaaccaggatattaaaaacttggagactcaagtagacatgtattctcatttgaacaagagggtggataaaattttgagcacgctaccagagaaagatttggttgacttgtcagctgttaccaaattcttaaatgcaaattttgataagtcagagaagaataaaggtgaaaatgtggaccctgagattgcaacgtataatgagatggtagaagacctttttgaacaactgtccaaagatttggccaaagagggtaaagactctagggacgcttctcttttaaaaaattctattttaaaacatagagctaaaattgattcagttactattgatgccaagaagaaattagatgaactatacaaggagagaaacgcccacatttcatctgatgatttccacactggatttgatagtagtttcatgaacaagaaaaaggaagaggctgagaaattagaggcagcagcttctagcgctcccaaaagtacatctgactcctctattcttaacaaattagtcaaatcatcgactccacaagcctttatcaaattcgaagatgatccaatgaaattagctgaagaaactgaagagtttggtaagatccatgttaatgaatattctaaatctcagaaatttttgttagaacatttacccatcatctcagaacagcaaaaggatgccttgatgatgaaagcgtttgagtatcagttgcatggtgatgatatgatgaccttacaagtcattcatcaatccgagttaatggcttacattaaagagatctacgacttgaagaaaattccattcttaaatccaatagaactatcaaatgttatcaatatgtttttcgaaaaggtcatatttaataaagataaaccaataggcaaagaatcttttctaaaatcggttcaagaaaaatttctgcacgttcagaaacgttcaaaaatcctacaacaagaggagatggatgaatcaaatgctgaaggagtagagacaattcaactaaaatcattggatgactctactgagttagaagtgaacttgccagatttcaattccaaggatgcacaagaaatggaaaaggttaaagttttcaaaaccttattaccggaggaaatgcagcaagccataatgaccaaaaacttggagaatattaataaggtgttcgaagatataccaatcgaggaggctgagaaaattttggaggtgtttaacgatattgaccttattggaattaaagcgattttagagaatgaaaaggatttccaaaacctgaaagatcaatacgaacagggacacgaagatgccactgtagagaagctgaccataaatgatagtgacaaccggggagaagtacatgaagaagtaaacaatactgctgatacagttgattag

SEQ ID NO: 504 - DNA, 1551 bp, Saccharomyces pastorianus
atgtcagaaaaccaagaggacgtatcgcctcctcaaaatatatcggtcaaatcagagctaaactctaatattttcaacacaaaacctatttctacatcgtcacctgcagggttggcagcggctcaaagggtgactcctgggaaattatccactctattactagaaaagggaccattggccattaggcacatcacgcaaactttatgtctggacattccctgcttcaaagatttatcgtcttcaaagcaaagacgactcataatgagtgcaatggaaagtggcgataaagaacgatcggtggtatttgaaaaaattggttggggccagtggtctgctaaaaaggtagacccagctaattttgataaggagctggaagcgaccaattttgctaattccaaggtgaaagacttaatttctcaagagagtcaaagaagaaaaagtaacaactcaaactcgaattcgggcggccacgttgaaatgccagttagaatcgaacataacaatgctggcattgaccatatcactactcctgctactgccatcggtaatcctgctgctgccattcctgttaatatcaaacgcagtaaatcgccactttcagcagctaacgtggtctatatagatgaaaacgcgcttgcttcggaagatgaggatgaagattttgatgaagatgatcatcatttgcactatcagaataaatcaaggaacagcagtaataattctggaaaggttcctaacaacgatccttatagtttcggtaggaggaggtcgcaagtcgtgtttgctgattccacccctgaaaacattgaacatgaaataatagcacaaaagatcagaccacttctaaggaatagacgccgttccagtataaagccacatacttcgttcatctcgaagttaaacgcgcaccaggactcatcccatctctccgccagttcaacttcaactactataccatcaaacaacagtagtagcactaatcaagggaaagtagatttagagaaaataactgcgactagtgaaccaacttcgagaagagcttcccgtttgtctgtctcgaaagagtcaagcattagatcaactcttttccccaataaaaattatttgatcgtcacgacaaaccctacctcaaaagttacatcagcttctacttctcccaaactagaagatcagataaatttgggttcaagcaatttattgttatcggacaaagaaaagcataaaatgacattgccacacctgaacggcgattcatccccgcaacttcgttcccgttcccatcatcaacctcactctgatacagatgaagaagattgggaatcgattggcgctgcctctttaaggaataacagtttggtacccaatatagatagtgtagcaagttctaccaatggcgtggttagtccaaaacctacaaatccaaattttatcaactctcagaatagagaaaccggatcgcccttacaacacggccagcaaaaacacggccagcagccaaaaaacggtgaagacaacagcgctgcctttttattgatgagtttaaaatcctag

SEQ ID NO: 505 - DNA, 5988 bp, Saccharomyces pastorianus
atgtctgagcagaatccagaactgagttctgaaacaagtactgccggagcacctccaaatgtagagaccacttcttcaaccgatcacactgtagaaccacaccatggcgaaaaggaagggcaagaagaaaaagaggttaaaccggtaaatcatgaagagcagaaacacaaggacgctaaaaacgcatccgagggaaacggggtaaatagtcgtgaagctagcggctcccgagtgtcggacgaagatcctggagatactaatgatgacgatgaagatgaagatgatgacgatgacgaggacgatgacgatgacgaggacgatgacgacgatacagatgacgacaacagtacctcgggttccggctctgaaggaggggaaggctccgaatcaatctcgacagaaagcgctggtgaagacgagggactagaggaaactgatggaaatacatcaaatgactcttcaggtgacgaaagtgcatcagaagaggaagaaggtgacgaacctgttgtctctgaacaagaccgtgctcctatcaacaatactgctgccccatcggcctctcataccagaaatatttcactttcctcaaatggttcacacacaagctcgactataatcttagtgaaaacaactttggaaacaatcttaaatgataaggacatgaaaaaacattcgaatgctcaaaaggctatcgaaaggacactacaaaaatttaaagaattcgatccacaatccacaagtaactcacattacgtcgattcaatactggtttttgaagcattgagagcgagttgccgtaccaaatcttccaggatccaaaacttggccttagattgtctgtcgaaactattttccttcagatctttggacgaaaagctgctagtcaacccccctgattctttagcttccaacgaccaacagcaagatgtagccgatggcataacaccacctccaaagcaaaaaatcatagacgctgccattgacactatttctgattgtttccaaggtgaagggactgatgaacgagtggagttacaaattgtaagagcgctttccagttgcattttagaggaggattcaaattccctatgccatggcgcttccctgttaaaggccatcaggacaatttacaatgtctttgttttctcattgaacccttcaaaccaaggcattgcccaggctaccttaacacaaatcattggttcagtatatgacaaggtcgatctcaaacagactgcctcttcaacattgtctttatcggcaaagaaccaccagcaaccatctaccactgaactttccgaactttccgacaatgtagaaacgccggtgcctttaactttggaaaatatggataaactgaatgacgacgaagaaagactcatggattctcaacaacctgactttaacgccatcactaatcaagacctagcggtcaaagatgcgttcttagtttttagagttatggcgaaaatatgtgctaaaccgctagaaacagaactcgatatgagatcacatgccgttagatcaaaacttctgtcgcttcacattatttactctatcatcaaagatcacatcgacgttttcctttctcataacatcttcctaccaggaaaagaacgtatttgttttatcgattcaattagacaatacttgcgccttgttttatcaagaaatgctgcatctcctctagctcctgttttcgaagtgactttagaaattatgtggttattaattgctaacttaagagcagatttcgttaaggagatcccagtctttttgacagagatttattttcctatttcagaattaactacatccacctcccaacagaagaggtattttttgagtgttattcaacgaatttgcaacgacccaagaaccttggttgaattttacttaaattatgattgtaatcctggaatgccaaatgttgtggagataactgttgattatttaacaagattggctttaacaagagtggaaattactcaaactcaaagatcatattatgacgaacaaatctcaaaatccttatcaacttatgatttttcccagttgcccctcttaacttcctctaacttgtcttctagtcctgatgttggccaaatcaacttactcttccctctagattttgctctcaaaatggtgtcgctgaattgtattgtgtcggttttacgttctttaagctcatgggctcacaaagctctaaatccaaaccaaagtgcttctaaaacagcactgaactcaactccatgtggtcctcaggaatctagatcatctttgaatgatgacgtaaggtcctctgctgtagtaattaatgatgactttagacctacatatgaagatgaagaaagcaagtcactaagcagtcaaaatgttgatacagatgatcccacccaatttgaaaatttgaaattaaggaagacagctttatcagaatgtatcgctattttcaataacaaacccaaaaaagccattccagtgctcattcaaaagggatttatggaggatgactccgcaacctctattgctaagtggttactagaaacggaaggattagacatggctgccattggtgattatttaggtgaaggtgacgacaagaatattgcgataatgcatgcatttgtagatgaatttgacttcactggtatgtctattgtggatgcattgagatcatttttacagaaattcaggctgcctggtgaaggccaaaaaatcgatagattcatgctaaaatttgcggaaagatttgttgatcaaaacccaggaatcttttcaaaggcagatactgcatacgtgctttcgtactctctaataatgcttaacactgatttacattcatcacgaatcaaaaataagatgtctttacaagagttcttggaaaataacgaaggaattgataatggaagagatttacctaaagagttcctggaaggcttatttaatgaaatcgctaaaaatgaaatcaaattgctttctgaacagcatcaagcaatgctttcaggcgacaccaatgttgttcaacaacaacaacaatctgctttcagttttttcaattctcgtgacttaacaagagaagcgtacaatcaagtctcaaaggaaatatcatctaagactgaactggtctttaagaatctgaacaggtcgaaaaacaaaagaagcccagatatttattatgctgcctctcacgtcgagcatgttaaatcgattttcgaaacactttggatgtcctttttagcggctttatccccaccatttaaggaatatgacgacactgatactacgaataagtgcttggagggtttgaagatatcgataaaaattgcttctactttcagaattaacgatgctagaacttcttttgtaggtgctttagtccaattctgtaacctccaaaacctcgaagaaatcaaagtgaagaatgttaatgcaatggtaattcttcttgaagttgcattatccgaaggaaattacttggagggatcatggaaggatattttactagtagtgtctcagatggaaagactacaactgatatctaagggtatcgatagagatactgtcccagatgtcgcgcaagctcgttttgcaaacccaagagtttcttatgaatcatcaagatctaataacacatcgctttttgatgtttggggcaagaaggcaactccaaccgagctagctcaagaaaaacaccataatcaaaccttatcgcctgaaatttcgaagtttatctcatctagtgaattagttgttttgatggacaatatatttactaagagttcagagttatcaggcaatgctatcgttgagtttatcaaagctttgactgctgtatctcaagaggagattgaatcatctgaaaacgcttctactccaaggatgttttctttgcaaaaaatggtcgatgtttgttactacaatatggatcgtattaaattagaatggactccactatgggctgttatgggaaaagcattcaataagattgctacaaactctaacttagctgttgtattttttgctatcgattctctacgtcaattgtcaatgagattcttggatattgaagaactgtcaggctttgaatttcagcacgactttttaaaaccatttgaatacacagtccaaaacagcggtaatactgaagttcaagaaatgattatcgagtgttttagaaatttcatcttaacaaaatcggaaagaatcaagtctggttggaaaccaattctcgaatctttacaatatactgctcgctcaagcactgaatccattgttttaaagacacaactgttagttagcaacgatatcgtgaccaatcacttcgaagatgtattctcccaagaagatgccttttctgaattggtcggtgtctttagagaaatcaccaaaaataagagatttcaaaaattatctttacatgctttagaatcactaagaaagatgacacagaatgttgcggaaatctgcttctacaacgaaaataaggcagaggaagaaagaaaacataacattgctttgctgcgtgggaaagacatattccaggatgtatggttccctatgttattctgcttcaacgacacaatcatgacagctgaagatctagaagtcagatcacgtgcgctaaactacatgttcgatgctttagtagcatacggtagtaaattcaatgatgagttttgggaaaagatttgcaagaaactacttttccctattttcggtgtattatcaaaacattgggaagtcaatcaatttaatagccacgatgacttaagcgtttggctatcaaccacattgattcaagctttgagaaatttgattgcccttttcacacattacttcgaatcattaaataagatgcttgatggatttttgggtcttttagtttcttgtatttgtcaggaaaatgatactatcgctagaattggtagatcttgcttacaacaattaatattacaaaacgtaaccaaattgaatgagtaccactggaaccagataggcgacgtgtttgataaattgttcgatttaactactgccaatgaactgttcgattatgacccattgcagcaaggaagaaaaccctccgtctctcatcatcaaaccacaaatgatatcagccaacaatcagataatgataataacgatggaagtgaaaacgaatccaatatcagtgagactgttgagagagcgcaccaagaagaatctagtgaagatgtaggcggcgacatggtcggaacgctaaatggacaaaacgggggaactaagttgaacaatgacaattctgaactggttgttaaagaagagtcaaacttaaaggccgctactttgaatgtccccaaaagaaccaagaatatgaaacgtaatgagagtaatgaagatatacgtcggagaataaacgtcaaaaactccattgtcgtcaaatgcgttctgcaattgttaatgatagaattactgaatgaattatttgaaaatgaagattttgcgcattgcataccttataaggagtccatcagaattaccagattactagaaaaatcttatgaattttctcgtgattttaatgaggattacgggttgaggacaagattagtagaagctcgcgtggttgataagatccctaacctattgaaacaagagacaagtgccgccgctgttctccttgacatcatgttccagttatatttgaacgatgatgagaagaaggctgatctaatagtccgtttaattggtatttgcattcaagttgttgagggttacgtttccttagatgatagaaccatggaacgtagtatcaacgcttggcgttcagtgattgttgaaatcttgcaaggttactatgaatttgacgatgaagactttaaattgtattgtccagctatgtacgccttggtgattcagatattagacaagagtgtcccaacggaattgagacaagccgtcaagcagttcctaagtagagttggtgaattatatctttctaccgattga

SEQ ID NO: 506 - DNA, 1155 bp, Saccharomyces pastorianus
atgagcttttaccaaccatcattatccctttacgacattttgaatgcattgtccaaccaaggtggcctgagagagcagcaggaacctccccgtcaaacgcaaaggccacagagacactatccgcatcacggtcagtcacatgctggcggacaccacccccatcaccaccacccactgtacaacaggtataacggccctcccagtagctattactaccagttcccgggacaagcccattactacagcccagaatacggctgcgatgacgaaagcggctacgaggaagaccaagacgaagatatggtcgataacgggagaaactacggtgaagagcaacaagaaagtggccgctccaggcagtatccatcctactaccacagcaacgctgcgaggaactacagtaacgaccaacaggcgaacagtttgaacgacttgttgactgctttaattggcgttccaccttatgaagaagttgaaccagaggtagaagcaaaggctgtagagaaggaaaatgaaaacgggaacgggaatgagaatgagaagccacaaacatgggcaccaggtgaaaaatccgaggaaccaaaggtggaaacgtcaggaaacaataacaatcctcctctagagaaaccggaagcgtcctcaaaaccaccgctaaataagaaacgctcatctttcgctcacttacaagctccatctccagttcctgaccctttacaagtttccaaaccggaagggagaatggacttgccattttcacccgaggtgaacatctacgataccaaggacacttacgtggttgttcttgcgctaccaggcgccaactctaaagcgttccacatagattaccatccctcctctcatgaactacttatcaaaggtaaaatcgaggacagaatcgggattgacgaaaaattcctgaaaatcacagaactgaaatatggtgccttcgaaagaaccgtcaagttccctgtcttgcctcgtatcaaagacgaggaaatcaaagcgacctacaacaatggtctactacagatcaaggtccccaaaatcgtcaacgatactgaaaaaccaaaacctaaaaagagaattgccatcgaagaaatacctgacgaagaattagaatttgaagaaaaccccaaccctgctgaaccaaattga

SEQ ID NO: 507 - DNA, 2025 bp, Saccharomyces pastorianus
atgtctgatccaaaccaaggtaacaatcagcaaaactatcaacagtacggtcaaaacttcaaccaacagcaaggtaacaacaaatttcaaggttaccaagcttacaatgctcaagcccaacaacctgcaggtggctattaccaaaacccccaaggttacgctggctaccaacagggcggttatgaccaacaatttaacccggaagtaggttaccaacaacaatacaacgcccaaggtggttaccaacaacagttcaatccacaaggtggccgtggcaattacaagaacttcaactacaacaacagccaacagggattccaagctggctttcaaccacaatctcaaggaatgtctttgaacgacttccaaaagcaacaaaaacaaactgctcctaagccaaagaagactttaaaacttgtttcaagttccggtatcaagttggctaatgcgaccaagaaggtcgacacaaagcctgtcgaaactgagaagaaagaagaagaaaagcctaccgaaacgaaagaaccagccaaggtcgaagaatcaatcaaagatgtggaaactccagccagcgctgaagaaaagaaggaggtgaattctgaattaccaaaggtcgaagatttgaaaatatctgaatcgaacgataacagcaagcctgctaaccctatcaacgccgatgccttgatcaaagaacaagaagatgaagtagacgatgaagttgttaatgatatgttcggaggtaaagatcacgtttctttaattttcatgggtcacgtcgatgctggtaagtctactatgggtggtaatctactatatttgactggctctgtggacaagagaaccattgaaaaatatgaaagagaagctaaagatgctggtagacaaggttggtatttgtcttgggtcatggacaccaataaagaagaaagaaacgacggtaagaccattgaggtcggtaaggcttatttcgaaaccgaaaaaagacgttacaccattctggatgcaccaggtcataaaatgtacgtttccgaaatgattggtggggcctctcaagccgatgttggtgttctagtcatttctgccagaaagggtgaatacgaaaccggtttcgaaagaggtggtcaaacacgtgaacacgccttattggccaagacccaaggtgttaataagatgatcgttgtcgtaaataagatggatgatcctactgtcaaatggtccaaagaacgttacgaccaatgtgtaggtaacgtcagcaatttcttaaaggccatcggttacaatataaagactgatgttatattcatgccagtatcaggttacagtggtgctaacttgaaagaacatgtagatccaaaggaatgttcatggtacaccggcccaactttactggaatacttggacaaaatgaaccacgttgaccgtcgtatcaacgctccattcatgttacccattgctgctaaaatgaaggatttaggtacaatcgtagaaggtaagattgaatctggtcacatcaagaagggccaatccactttattgatgcctaataagaccactgtggaaatccaaaacatctataacgaaactgaaaccgaagtcgatatggccatgtgtggtgaacaagtcaaactaagaattaaaggtgtcgaagaagacgacatttcaccagggtttgtgttgacatccccaaagaacccaattaagaatgttaccaagtttgtggcgcaaattgccattgtcgaattaaagtccattatagccgccggattttcatgtgttatgcatgttcacacagccattgaagaggttcatattgttaaactactgcataagttagaaaagggtacaaatcgtaaatcgaagaagccacctgcttttgctaagaagggtatgaaggtcattgctgttttagagactgaagctccagtttgcgtcgagacttatcaagattatccacaattgggtagatttacacttagagaccaaggtaccacaattgccattggtaagattgtcaagattgctgaatga

SEQ ID NO: 508 - DNA, 1041 bp, Saccharomyces pastorianus
atggatacgggtcataacttcaaagtcttagagcataaagctgctggtcacgacggcactctaactgatggtgatgggttgctaatcttcaaaccggccttgccacaggaactggaattctataaagttgtacaggcgagagacatgagtcgggatgagccactggccagccaggatgctcctttacactcttggatgcccacgtatcttggagtcttggacgaaggggctaaagttggcagcggtggcaatgccgggcttttagaggtagatcagcggttgagtgattctacagatgacctcgacttgacatcctcgcaggccaatggagacaaggaatacctcgttttagaaaatctgctatacgggttcagtaaacctaacgtacttgatataaaattaggtaaaatattgtatgattcgaaggcaccattggagaaaagggaaagattgaaaaaagtcagtgaagaaacgacttcaggctctttgtgttttaggatatgtggcatgaaaatacagaagaacccttcggtactggcccagttatcgcctgaacactacgaagaaggagcagaaactgattacgtctttataaataagctatatggacgctcgaggactgaccacaacgtggcagatgccattgccctgtatttcgacaatcctcacctgtcggataccaggaaacaccaattgaagaaaatgtttctgaaaagactacagttattctacaatactatattggaggaagaggttaggatgatttcaagtagtcttctgtttatttatgaaggggacccaaagcgatgggatttgttgcatgataccgatcagctaatgcgggatgatttcatagacagtgacgaagacgacgatgaggaggtaggggaagacagaaaacaaaaggataaaaaatccacttgtctgagttcgatgtcattaatagactttgcacatgcagaagtaaccccgggaaagggctatgacgaaaatgtcattgaaggagtcgaaaacttgctgggtatcttcatgaagttttga

SEQ ID NO: 509 - DNA, 741 bp, Saccharomyces pastorianus
atgaccacagacccttctgttaagttgaagtccgccaaggactccctcgtctcctcgttattcgaactatccaaagctgccaatcaaactgcctcttccattgttgacttctacaatgccatcggtggcgatgaagaagagaagatagatgccttcaccactttgactgagtcgttacaaacgttaacttctggtgtgaaccatttgcatggtatcagttctgaactggtcaaccctgcggatgacgataaggacaccgtgatagcacctccagtcaaggctgtgaggagaaagattgaacgtgatccaaacgctccaaagaagccattgaccgttttcttcgcttattctgcctacgtgcgtcaagaacttcgtgaagacagacaaaaggctggtttaccacctttatcctccactgaaatcacacaagagatttccaaaaaatggaaagagttgagtgatcacgaaaaggaaaagtggaagcaagcttataacgttgagttggaaaactaccaaagagagaagtccaaatatctagaggcaaagaaaaacggcactcttccaccagcttctctcgaaaacggtcccactcatgcgcccgttccaattcctttcagtttacagcatgccgctgaacctcctgtggaaaagagacctcatgatgacgatggatcttctgaaaagaaaaagaagaagaagaagaaggacaagaagaaggacaaatctaactcttctatttga

SEQ ID NO: 510 - DNA, 648 bp, Saccharomyces pastorianus
atgtccagggctaagaggattatgaaagagatacaagctgtcaaggatgaccccgcagcccacatcacgcttgaattcgtgagtgagtctgatatccaccatctaaaaggcacatttttgggtccacccggaacgccttatgagggtggaaagttcgttgtggacattgaggtccctatggagtatccgttcaaaccacccaagatgcagttcgacacaaaagtatatcatccgaacatatcatcggtgacaggtgccatttgcttggatattttgaagaatgcatggtcgccagtgataactttgaagtctgcgttaatttcgcttcaggcgctattgcaatctccagaacctaatgatcctcaagatgcagaggtagcacagcattatctacgggatagagagtcctttaacaagactgctgcattatggacgagattatacgccagcgaaggcgccaatgggcaaaagggcaacatagaggagtctgatttatatgggatcgatcacgatcttattgaggagttcgaatctcaaggtttcgaaaaggacaagattgtcgaagtcctgagaaggttaggtgtcaagtctttggaccccaatgacaacaatacagctaatcgtatcatcgaggaattgttaaagtga

SEQ ID NO: 511 - DNA, 4473 bp, Saccharomyces pastorianus
atgtcgtatccaggagaagacactaacattcccagaaggatggtagaagctctagaggaccatccattgagttatctggttcccaaggacgggttggcggcgttggtaaacgctccgatgcaaacttctttgccctttgacaaatctgtctttaccaacgccgatgatagcagagaaattgatgtaagccatcttattgctgcgaacaatacaaccttttctatacaaaatgacttagaacaaaacaagcttgttttcaagagacctgaaaactttatattatcgaccaagcaagattatgctccatcaaacttgttggagggactatcgccgttagcacagactgtcctatcagaccatcaagatctagttgtttctaatgaaatagtgaaaaagagcgagatagtaaacaaactgcaaccaaaacataagctagaggatttgaccccaaattccagtaacttaagttttaacgaggactctccaaacaagaaaacgaaagtttcgacaggtgtaacaatgacccaggccaatttagcagaacaatatttgaaagatctagaaaaccttttatatattgtgggatttgatcacagctctgccgaaacgggaaacatcgagtactggctcaagttaccagatgaaaaattcattctaaccaccaattgtttagtcaaactacagatgacagttaagaatattgccgctaatccgcagctatggagctcgattaaggtggcatggctattgagactgctagatgtaatggtctccaacataaagtctagtaaaaaatttttgaaggcaggttttgatgattctatgttgcgatatattgccctactatccatagtcatcctattcaatattttcctcctaggtaaaaacgacaacaacttacatcgtgaatcatacattatggagccgctaaactttctaagtgatttagtcgaatctttgagagtgttaccaaaggattatgattctttgaaaatagaactgaatacgtttcaggaagctttgggtttgctaccaaaatatatatgcaagggcccatttttagatgataacgtaaccacgaagcttgtgtacatattcagtgacttattaatgattagtgacattgaagtaactgctaacattcagtttctaaacttctgggatagtgtaaaaaaagccagttctgatattctagtctcgttgttcagtaaactagatcaacagagggaatttatcatcgaagagttaatttctcatgttgaaaagctccccacaaagagaatacagaaaaaactaagaaaagttagttgtgaaaatatctatatcaccgattttacctttactttgatgtcaatgttggaaaatatcaattgctatacattttgtagcaacatgaaagaacttacgtcagaaaacattgagctcttaaaggaaaactacaaaatacaagaacagttcctttttaacactatagagcacataaatgacacaatactagaactatttttcaagaatccatcctcttcacgatatgtgatagataattttgttcaagatctattattgctaatcccttcccctcaatggccaataacagagaaaatattgagctcattgttaaagaagcttttaaaagtatttggcccatctattcagctttctgcaaacatcgaaacaatatgtctacaacacattggaagtattggttctaaaatttttgatattaaatgttcaacaagagagcacgaagataataatttaatcaaaataataaactacccagaataccttccgacctttttgaagttcttcagcgcatgcatattacacaatgaaacaatcaaatctcgtgattctgccacaagatttctttggaatttgagattaggtgcaatattcagactggaagaatatacaaaagatgccaaggaccaaaattcaactattactcaccaactaaagaacatattggaacaagtgcatgacaatagtcttgaaactcccttagaaaccacagaaatggtcgctggcacgattcgattagattatttttccattttgcatgcttttgaacttttgaacctgtatgatccatacttgaagttaatattatcactgttagccaaggataaaatcaaactgaggtccacggctataaagtgtctgtcgatgttggcgtccaaggataaagttatattgtcaaactcgatggtcaaagcaactatccagcaacgtttaaacgactcatctgcatctgtcaaggatgccattctagatttagtcagtatcaactcttcatatttcgagttttatcaacaaattaacaacaattatgacgacgacagcataatggtgagaaaacatgtactgaagataaatgaaaaaatatatgacgagacaaatgatgttgttacaaaggtatatgtggtggcaagaattcttgtgaaaattgaggatgaagaagataatataattgacatggccaggttaatcttgttgcatagatgggttctaatggtagatgggtcaatggaccagtctgaaaaactgaaagaaatttcttcatcggttctattagtaatgtctcgtgtggccacaatgaatgagaaatgctcgcaacttttcgactggtttcttaacttttatctgttaaatagagaagcacattcgaaggacatgtatgacaaaatagctcgcgtcttaaggactctcacagatttcctggttcaaaatattgtcgaattaaactcaaaagaatcaaaagaaaaagactcaattattaataagcagaatctcttaaatttgttagccaagtttactgactgtaccgtgtcatttataacaaaagatcatatcaccgccctatacccgtatatggtatcagatgaaaaatcgaatttccactatcatatccttcaagtgtttagaaacacatttgaaaaattgtcaaacttcaaacctaaatttttatatgacttagagacgaccttactgagcaggctcccaaaaatgaatgtacgggaaatagacgaagccatgcctctcatttggtctgtcgctactcatcgtaatgataccgctagagtagctaaagcgtgctcctcctgtctttcccatttacacccttacataaacaaagcaaacaaagaagaggaagccattgctgttgatgggaaattgcaaaggttaatatacttagccaccggatttgctagattttgcttccctaaaatttcaagtgaaaagattgcatttttacaagaagatgaaacattatatgaacatgttaccaaatgcttgcttgtactttcgaaagacaaaatcacccacgtaataagaagagtcgctttaaagaacttgacgaaattatgcggaaatcatcccaagttgtttaattcaagacacgttttgcatttgctagatcaagagtttcaaggaaaccaattggacatcaaactggtgatattggaaagtttatacgatctttttttgctggaagagcgtaaatctgtgagaagtattggtgttagtagcacattatcttcgaacactctattaaaaaaaaaaatactgaaaaccaaaaaggcggatttcgtcaacgatggtgtatgttcagcactagctactcgatttttgaacagcattctccagctctgtcttctatgcgatctaaaaagttctcttgtggcaattcggctattgaagttgattttaaaatttggctacaccaatccctctcattcgattccaactgtagttgctctagttgcctctgatacccagtatattcgtcatgtcgcctcggaaattttagaaggcctttttgggaaatacgaaacactagtgtttagtggtttatcaagaggtattacgaaggcaatacattactctattgatacgggtggtaaatattattacaaacgcgatttttttttggtttcacttgagagaatatgtggagtggggaagaaaaatgctccaaagtttttcaaaattgtaaagagaactatacagtcttacctcgatgatatcactagtttaaaattatctgtttccattcaaaagtctattttcgtgctttgtaccaatatttcgaatatcacatacagtacccaattcgatttggtatccttactcaaaaccatagatctgacaacagacagattgaaagaaatcattatggatgaaatggatgatgctccatcttccagcaaatcggaagaaacattccgtgaaataattttaatacagttatgtttgcaagacttaggtactcatttgttacacttgtacggattaaggaatgacgttcttctactagatattgtagaagaatcggaattgaaaaataagcagcttccatccaagaagcaggaaactggtgacttttctgcacagttggaaagtatcgaacagcactcgtcaaacggtaaacttattgcatactttaaaaagcacataaaagatacgtaa

SEQ ID NO: 512 - DNA, 1482 bp, Saccharomyces pastorianus
atggcataccgtaacagatcgaaaagtgttttatccaaacaaagcaagaagagcgatgataaagcacactataaatcacattcaaagaagaaatcaaagagcaagagcaagagcaaaaagaagttgagaatctattggagatacatatctatcatatgggttctatggttgggattggtatattactatgaatcaatggttgtcaagagagcaatgaaaaagtgccaatggtctagttgggaaaactggcctgagggcgccgaaagccataaggtgggtttatttgccgatccacaaatcatggatgactattcatatccgggaaggccaaaaatagtgaactacttcacaagggtgctccttgaccactaccataagagaaattggaagtacgttcagtattacttggaccctgatagcaatttcttccttggtgatctatttgatggtggtagagagtgggatgatgagtactggattaaagagtatacgaggttcaacaaaatcttccctaaaaagccattgagaagaacaattatgtcgttaccgggcaaccatgatattggttttggagacacagtcgttgagtcgagcttacaaaggttttctagttacttcggagaaacttcaacttccatggaagttggtaatcatacgttcgtgcttttagatacaatttcactttcagataagaaaaatccaagcgtttcaaaagtcccaatggaatttttagataatttctcgatgggctcacatccacaacccaaaattcttctgactcatgttcccttatacaggaatgcacaactacaatcttgtggggaattgcgtgaatctaaaaaacttttccctattgaaagtggtaagcagtaccaaacagtcatagatagtgagatatcgcagcaaattttaacacaagttcaaccagaactcttattttccggagatgatcatgactattgccacatatcgcattcatatccgtttcatggagaaaccaagattgctgaagaaatcactgtaaaatcatgtgcaatgaatatggggatcaataggccagctatccaactactttccttatataatccttcagatctgaaaacggtaaatgccggtgaagaatatgagtcaaaaacttatcaaacagaattatgttatatgccagatccgtacaaatccatcagaatgtacttatttgggttattatggtcctttttttttgtcctttacatgcatttcctcccaaaatcatttaacggtcatgtagcaaccagaatggatagatcacttacgcgttctcacagtggtaattccgctttgccattacctgcaagtgtttccaaatctaaatccaaaaaatcctcggcacattcaaaatactctgttaatgaaacgcgttctaccaaacagttcttagtcaatgtaggtatactatttgcatctgtgatgccaatttttatctatttttatagtatagtataa

SEQ ID NO: 513 - DNA, 540 bp, Saccharomyces pastorianus
atgaaatcatttcagaaatcctatgaattcgattacccatgggaaaaagtgaccacggcaaactggatgaaatatccaaacaagatctccacccacgtcatcgcagttgacgtgcttcgcagagaacttcaagaacagggcaatgtactcctaacggaacgacttataaccatcagtcaaaacgccccccgctggatgtccattctggtggggaacaccaacctagcatacgtaagagaagtgtccaccattgaccgacgaaacaggtcaatgactatgagaagttgcaatatgacgtttccgcatatattgaagtgttacgaaacagtaacttatgcgccacatccaaaaaatccatcaaacatgactatcttcaaacaggatgcaaaattcatatccggcatcccgacccagatttttagcaggaaggtggaaaattggggggtcaaaagattcagtgataatgcaatgaagggtaaggtcgggttcgatagcattttggaaatgtttaatgatatctggagcaacggtaacgaatag

SEQ ID NO: 514 - DNA, 2541 bp, Saccharomyces pastorianus
atggatacggtcggaactgacgcagccgcatctcctagggtgagtgtcaagtctcaggactcactgttcctcatcacgtactccaatatccagcagccgttggtgcaaacgtcgcttgctgcgcgatatccattgctggctaagctgaacgtgctgctttatatagatattcccaccatcgattactacaacgatgaaatgacgcataacaagctctcccggctgaacaagcggttcaagttgcaccgcctgaagggctctatctcgcagagcttctccaacacggccacggcagaggagaacgacaggttctgggacgagttgaaggatctggtcgccactcggcactcggccgagaacaagttcgacctcaacgtgcagatctcgtcatcggggtcgctgcgatacgtggagacgatccggttcctaatcgagaaggtgtacaactccttcaagagcctgtacgcgcagcagaagttgaaccttacgtttcagatcaacgtgtcccctacctcttccaagtggttctccacctttttgaacgcggaactgctgaggctgaatattatccattggcagaacatcgggtctttcaccaagaccatccagaattctaagtcgctgccgttcaaagagtactacactaagttgaacgagaaattcaccaactccagccaccatgccgtgagcatgcaggaccagaccgttttggactccatcgtcatcgtgacaaacagcaccggtgtgaaagccctgctgacactgctctcggaccacccgttgaccagtcttatctcccaggagtcgataaaggccctgcacgaatactcggactctctcaacgacgacaagaacgacttggccggcacaagcctaaaaagaaactcctcgtctcttctgagcttccagaactctgtcctgacttccaataaagacaagtctgttagggtcaggtccctgtccatcaaccggaaatccaatagagcgcacatgttcaagacgaatgagtccatcaccaccatcccgacaacaaccatcaacaatctcatcagcaacgggtccaacctgcgtaagcaatgttctactaccgcgttgcagctccaaacacatttacatccgcattctcgttcgcagtcgtattcgagctcgaacacgtctagatctccatctcccttcccctacggcaaaaccccctcaaacgacaatctagtatatgacgaacttaataaccaaatcaacgaagtacaagaccgtgccaagaatcaagaaatttctcagtacaacgataacaattacgacgatttcgcggaagaagaagaagaagaagaagaagagcaaacatacgcagatgattatgacgacgacggcgatgatgatgatgatgataacgacgacgacgacgatgatgatgaaggcctaagcttttatgctccaagcattctctcacgctccggttccagcacagatatgttgtccgcaggggcagatcccatggcgaacagttcaaaggaaattaagggcaggttcagatccttaagtttaatggacccggccctgaaaaaaccattcaaccagaagcacacacacaaccaacagctcgaccccaccagagcagacctccctaagagatcctgttcctcgagccatttcaccaacgtccacgtgcacgacggtgactttgatggtgccgatactattagcaataaaaagaatttgtcatccgcaacgctcatcaaaagaaaatctctcatgaatagaaacctgactccttccatcagcaacgggctgataccaccggagttcatttccaggatatctacaccttcttctagcgcaagcagctcgaactcgtctttgaacgacatgtccaccatgtcgaacgctttttccaagctattgaacgacacaaccaagaagcagaacttcttgaattcaccagtcccacaacacacgtcacaggcatccccgctgttactcagaagcgattcaaacagcaacttgctattcgaaaaaaacctgatcaacaaatcgtttgaagaactgagaagacaaccgtcaatcaatcttttcagtaccctgatgaatggtaaaatggaaaaaaatggcttagcgctaaacttcaaatctagaacgcccaccgacgctttgatgggcggcaaaaacaccagccatggactattgaatctggaagaagaagaccaaatcatgtctgggtgcgcgaatataaaggaacgcgaagacgacgatgattcgacaagcagcacaatcataccgagccatacagatactgatagctacaacaataatgataacgacaatgatacaggtataaatttcaagaatttaaatctgaatctttatgatgatgatgaaaataatgacgacgtaggctataatgtagatcctcaaaagataaagcactcaaattcaaacactacagtcaccaaacccgtttataaaaaggccattacattggacttatacggtgaagacgatatggataacatgggaggatgggtattaggtggtaatgctcgataa

SEQ ID NO: 515 - DNA, 1998 bp, Saccharomyces pastorianus
atggccgtggaagaaatatcctccgggaaggatgtcagtctaagagacatgcagatctcagccattctgaaaatgctctttctaaacaaggactcgaacaacaacgacaacatcaccaccatcacagacgacattttcaaccagcaggagatcatctggaaggtgctggtccttgatgtcaagagcaccgccacaatctcctccgttctcagagtcaacgatctattgaaagctggtatcaccgttcattccttaattaaacaagacagatcgcccttgcccgacgtgcctgccatttattttgtttctcccacaaaggagaacatcgacgttatcgtcaacgacttgaaaaatgacaagtactccgaattctatatcaatttcacttcatctttgcccagaaaccttttggaagacttggctcaacaagtgtcaaccacggggaaatcagaaaaaattaaacaggtctacgaccaatacttggacttcattgtcactgaaccagaactgttttctctagaggtcccaaacgcatatttgactttaaacgacccaagaaccacagaagaggaaatcactggtttgtgtgctaacatcgctgacggcctcttcaacaccgtaatcaccactaattccatccccattataagagctcctaagggcggaccagccgagattattgcggaaaagttaggtaccaagctacgtgactacgtcatcaatactaatgcctcatccacttcaactttgcacgggaacgattctttggaaaggggggtcctgatcatattagatagaagtattgattttgcctctatgttctcgcattcgtggatttatcaatgtatggtcttcgatattttcaagctatcaagaaacaccatcaccattcccttagaaagtaaaccagatggagacgacactacgacttcgaatccaatagcctccaagaaatacgatatagagccaaatgatttcttttggatggagaactctcacttgccattcccagaagctgccgaaaatgttgaaacagcattgaatagatacaaagaagaagcggcagaaattaccaggaaaaccggtgtcacgaatataacagacttagatccaaactcaaatagtgatactgttcaaatccaagaggtcgtgaagaaacttccagaattgacagctaagaagaacaccattgatactcatatgaacgtatttgctgcactgttgtcacaattggaaagtaaaagcctcgatacattttttgaagtagaacaagatcctggcagcaccaaaacaagatcaagatttttggacattttaaaggacggtaaaacaaataatttggaagacaaattaagatcgttcattgttctctatctaacatcatctaccggactaccaaaggatttcgtccaaaatgtggaaaactatttcaacgaaaataattatgacatcaatgccttaaaatatgtttataaactaagggaattcatgcaattatcaaacatgtctttgcaaaataaatctctagaagatgggtccgattctaattttaaaccaagcaatttaacattatccggtatatacggattgaccgaaggtaagttacaaggtggtgtgggaagtttgatctcgggtatcaggaaattgctacctgaaaaaaaaactataccaataacaaatgttgttgatgcgataatggaccctttgaatagttctcaaaagaacttggagaccaccgatagttatctttacattgacccaaaaattaccaggggttcacatactaggaaaccaaaaagacaatcttataataaatcattggtttttgtagttggtggtggtaactatttagaatatcaaaaccttcaagaatgggctcactctcaattgcataatccaaaaaaagtgatgtacggtagcacagccattactacaccagccgaatttttgaatgaaattgctcagcttggtgcaagtaataacaatactgatgcataa

SEQ ID NO: 516 - DNA, 1392 bp, Saccharomyces pastorianus
atggttgctattagtgaagtaaaagaaaatcctggtgtgaatggcaccaattccagtgtcgttactagaactgcagctcacacacacatcaaaggtttaggtctagatgagagtggtgtggccaagagagtcgaaggtgggtttgttggacagattgaggcccgtgaagcttgcggtgttattgtggatttgatcaaggccaaaaagatgtccggtagggctatcctattagctggtggtccatctacgggtaagactgccctagctcttgccatttctcaagagttgggtccaaaagtccccttctgtcctctcgtaggtagtgaattgtactctgtagaggttaaaaaaacagaaactctaatggaaaacttcagaagggccatcggtttaagaattaaggaaactaaggaggtttacgaaggtgaagtgacagaattgacacctgaagatgctgaaaacccattaggcggatacgggaagacaatctcccatgtcattgtcgggctcaaatctgccaaaggtactaagacgttaagattagatccaacgatatatgaaagtattcaaagagaaaaagtcaatattggcgatgttatttatattgaagctaacaccggtgccgtcaaaagagttggtagatctgacgcatacgctactgaatttgatttggaaaccgaggaatacgttccactgccaaagggtgaagtgcataagaaaaaggaaattgtacaggatgttacattacatgatctggatattgctaacgcaagaccacaaggtgggcaagacgttatatcgatgatgggccaattactcaagcctaagaagaccgaaattaccgaaaaattaagacaagaagttaacaaagtggtcgctaaatacatcgatcaaggggttgctgaactaattccaggtgtcctattcatcgatgaggttaatatgctagacattgaaatcttcacatacttaaacaaagcgctcgaatccaatatcgccccagtcgttgtattggcttctaatagaggtatgaccacagtccgtggtactgaagacgtgatatcaccacacggtgttccacctgatttgattgacaggttattgattgttcgcactttaccttacgacaaagatgaaattcgtacgatcatagagagaagagccgctgtggaaagtttgcaaatagaaaatggcgctttggaccttctagctacaatgggctcagaaacttccttacgttacgctttacaattattggcaccatgtggtatcttggcacaaacaagcaaccgtaaagaaattggtattaatgatgtcgatgaggctaaattgttgtttttagatgccaagaggtcgactaagattttagagacatcagcaaactatttgtaa

SEQ ID NO: 517 - DNA, 1296 bp, Saccharomyces pastorianus
atgtcaagtttcggtaatccgttcacgtcgggcgtcaagcccaatctctccaatacgaacggtatgaatccgttcactgccaacgtcaccaataacaacgccataggaaccagtgcattcggccaacctagttttggcgctacgaatgcaactgcaggtggtgccactacctctgcgtttggtgcgcctcagtttggtgcaaataccagtaataccagtaatacaacaatgagtgcttttggaagtaccgctggcgcagcgaagccttcggcatttggggctcctgcgtttggttctaccgcgcccaccaatgttaatgcgccctccactacatctgcatttggtgctccctcttttggatcatccggctttggctctgcagctgcaactggtaacccttttagcaaagctcccagctcaatggggtccgcatttggacaagcaggatttgggctgaatggtaccgctactataagccctaatgttactaataacaacaccggctctgcatttggtgctttgcaaaataaaacggtaacatctggttctccatttggttcattgcaacaaaatgcattgccaaattcgtcttccgcatcatcagcatttgggaaacctgcgttcggagctgccagtaatgctcagtcagcatttggtgccaatcaaaatacaactaccagtgcaggaacaggagcagctccatttggctcatttggtattaataacaataacaaatcaccttttggaaatctacagaacgcgctaccagtttcgtcaccatttggggtcgctaactccaaagccaacagcatcggcaatagcagtccattcgcagcaacgaataaccaagtatcaaccaataagtcaccttttggtatggctgctagcggtacctttggctcagtatctaactctaatgtgacgaatacaaatgcgaatacaagcgctcaatctcccttcggtaataaagggttttcatttggtattgcatcacaaacagatgctaattcggcgtctcaaaccaattctccatttggtcaaacagcctcagatcccaacacaaattttcaaaataatagtacaacttcgtttggacagcaaccagccagcacagcagccaacaatatgaacacagcggctggaaacactagatttgttcaaggtttaccctctgaaaaggacattattatagagttaagcgaccttgccgaggaaacaataaaaattttcagagcaaataagtttgaactaggtcttgttcctgatatacccccaccgcctgcattagtcgcgtag

SEQ ID NO: 518 - DNA, 1992 bp, Saccharomyces pastorianus
atgttgacttctgtactgataaaaggtcgttcaccccttctcgtgggaagaagcttctcggtactgctcaagaactgtagccgagtcaatggtggaatttctaaaagattgtatcacgatggcgacagggaccaaaagaattttggtaggtaccagaaaaacgacggtaatagaaggcccaggaatcctcgtttcaattctcgtccaagaacaacatctagagatgatggtgacgaagtgcatttcgataaagcaaccttttctaagctaattcacgtacccaaagaagaaaactccaaagaagtaacgcttgattctttattggaggaaggcgttcttgataaagaactacacaaggctattgccaggatggagtttcctggtctaactcctgtccagcaaaagactataaagcccattttatccagtgaagatcacgatgttatcgcaagagccaagactggtacaggtaagacttttgcgtttttgattcccattttccagcatttgataaacacgaaactggattctcaatacatggttaaggctgtcattgttgcaccaacaagagatttagctttacaaatcgaagcggaggtgaaaaaaattcatgatatgaactatggcttaaagaaatacggttgcgtctctctagttggtggtactgatttcaggggagccatggataaaatgaataagctaagaccaaacattataattgccactccaggtagattgattgatgtcttagaaagatactcaaacaagtttttcagattcgtcgattacaaggtgcttgatgaagctgatagattattagagattgggttcagagatgacttagaaactatttctggtatgctgaacgaaaaaaattcgaaatcccccgataatatcaaaacactactattctcagctactcttgatgacaaagtacaaaaactagcaaacaatatcatgaataagaaggaatgccttttcttggataccgtcgacaaaaatgagccagaagctcatgaaaggattgaccaatccgttgtgatttctaaaaaatttgcggacaacatatttgctgccgtggaacatattaaaaagcaaattacagaaagagattctaattacaaagccattatcttcgctccaaccgttaaatttacatcctttttatgtgatattctacaaaatgaattcaaaaagaagctacctattctagaatttcatggtaagatcacacagaataaaagaacaagtatagtaaaaagatttaagaaagatgaatctggtattttggtctgtacggacgtgggtgctcgtggtatggatttcccaaatgttcatgaagttttgcaaattggtgtaccatctgaattagccaattacattcatagaattggtagaactgccagaagtggaaaagaaggttcttccgtcttattcatttgcaaggatgaattaccatttgttaaagaattggaacatgttaaaaatataaccattgctaaacaagaaacttatgaaccaactgaagagataaaaactgaagtgttggaagccatgagccaagaaacggaagagctgtccgatgtcatagtaagtttgatctcatcctacagatcttgcatcaaggaatacagattttctgaaagacacatattgcctgaaattgcatctacctatggtatactttcaaacgatcctgaattaaagatccctgtatccagaagatttttagaaaagttagggttgagccgtagtccaattggtagagcaatgtttgaaataagagactataatagtaacagagacagaagtgaaaactcatacgatgatgaagattcagacacttccttcagaagcaacaacaattatagtagaaacagaaatagagatcacgaagatggacaattcggacgcgacaacaacaatagacgttcattctcccgcaacaatgataaaaacagttatccaaaaagaaataataacagatattag

SEQ ID NO: 519 - DNA, 1167 bp, Saccharomyces pastorianus
atgtcaagtccaatacctagggtctactccctagggaattctcccatgtcatatttactagcattaagaattgcacaactcccgagtcaacctaaagttcccttagttgtccttctcttgaacgatcagaagaaattgaataggtttcttgacaatgactccaaaattattgtcaaatcgaataataataataaagaaattcatcacagacagtttatggcatcatgtgttccgcctattctaaacaatggtgaaattgccccgattgaaaatctaataatttctgataaatcttcaaagttcataaccgcccaactttcgaaatatagtaaatctttgacacctgagaccaacattttacttttgaatccaagtttaaatttactagaatatatgcatagataccggtggcggtctgcgcaaacgagaccaaacttgttcatggggtttacatcaccagttgaggttggtactatccatcaagaatttcagttatcaattgacacaaaaaaaagaatacagtttcatttggctaagattgatgattttccttcattgggcggcgctggtcgcaatacagatcttcctctgatcggcgacagacctacaaatgaaaaggaaaccccgtttaataagctgtttaaagaaatggccaaactgcggcccaggattggttcgagattgatcaattttgatttgcatgttcatagttttcacgatttgttcttcgtcgcattagaaaacttgatgttggaaagttccattgagccactactagcagtgtatgattgtacatacaaaaaggagctgctaaaaatagccggggcacaagatacaattcacaagttaataaatgaacaattatttgtcattgatcaatcctacccatcattaaagaattatccaaactactctattattttcgaaaaagaaagaatattcaacttaatcatgagagacttgaaagtgaacggaaacaagcgcgccaaattggcccgatctttggatcaattgaatcatacaaatattgacgaacttaacggatattttgttgcacttgccaagtacaaaaaatgtgattgcaggtggaacgaaatgattttgactttagtcaaagggaagcagtcaattaccaagcaaaaagcattagattatcattatttgtaa

SEQ ID NO: 520 - DNA, 510 bp, Saccharomyces pastorianus
atggcagatgcactggaacagagtgtgcttgctttggagagtacactttcggtgttgaaagattctgtcgaatctctgaagcacgcaaatgaacctagcacgaaccttgcatcaacgatgctacaaactaagagggttttccgtttagtgcccgagtatgacgtggagaggtctaaattggatttaattgaagaagtagagccgcttgttaggacgttgggcgataaattacgcaagtctatggggagaatgcaaagagaactggatacattgcagcagacttatgaattgaatgatttacgattaaagaagaatatcaatatggaagaagataacgatggtctcgataattcggacatgggtcgcgatgatggaggtggagatgctgatgttagtaccgatgtggttatgatggcatcttctactaatgaggaattagaagaattgaagagattaaaggagaagaaaaagcaattgcaagaagatttgcaaacacttaagcagaaatag

SEQ ID NO: 521 - DNA, 2658 bp, Saccharomyces pastorianus
atggaactatcggatacccaaacagaagatattcctgccgcttttgatggtataaaaagtcagttgaacagcatattagaatcgaatcaattatttcaagattatgcactactgaatgggttcttggcatttgtccattcgaagttaaatggcattgtcgtctcatccattgagtccgaacatgcttttcatttatccaaaaattcaagagtagttgatcctgtttcccttgaaaacggaaaggttctttcgattatagatttttcctgggaaaatgtgcattatccaatatttaaatggtttcagatgtggagaaactatattcttttcaagaaagagaaccaaaagcaacaagccagatttattgaatttagaaagatgaattccaagatgttgaagtttttcaaaacggtccagaacttttatttcaacattataaacacaatctataaaagatatgatatatctgtacttttgccgaataaaattgttcaagacctaaagttagctgatatcaagagagatatcaatgttgagttgaatacgtttgataatgggtgtccattcgcccggctcattcaggttattttccatcgttgcgtgttatttttaggaacagcgtatcgctacaagagtctcattgaagaactctcaaacaaatatcccacatctacttttaaaaaatctctgagttactttcacttagcttcattgatattaccaggcgccggtgaaacatattcacaagcaggaatggtatttctgcaaacagggaacttggggcctgcaatgtacgagtttgttaaaggcatgatgacaaagatgccgagtcctgtgtccatcaaaaatttccattcaataatggtagataataaaagctccctgaaccgcaatttgcatgctaccattatgaacacttatttacaggaatctaaaggatggaaatcacctaataaagagatattggaattttattatctgggccttcttggatcagtttggtcgcctaatagttggagagacgatacgaagtctaaccaactaaataatggtattaaattaaaacatttggaagcagtgctttatgagaccatgtcaacaagatatttgaaaaatgtgcaaaccatttttaagaatttgattattacgattggtggattccacttattactgaaaaggcgttccgacgcagacataaatggtttacaagatttacgtaccaatgagttggattatctaaaattcgttttcagattcattggtcacattttaaacgatattgtcaaggagtcatggagtgaaaatgtcgaggttcccgaaatattaggtatggtaagagttatcaattgctggataaaatcaaacccaatagtattacaatattgtgaaactgatatagagtttgttaattccttggcatacttggttaacgatatcatgaaaaacaagccaagcctttctttcaacataacgggtcgccaccccaaaagaacatactggtttgaagaagatttgatggtgaagggtctatcatttatgaattttcaactatccgactttgaagattatgaggagataattcacatggacagtaagtttgatagattaattggtgatcctccattgtgtgataaagaacctgcatcttccgaaatgctattaagattgcaagctatcgtgaattcgagttataagctcctggcagaaaataaatgcggggtgaaatggtcagatgacaaatcgcgctatatctttaacaataaaatcggattcagagagaatgttaaatccaacacaaggtcaccaaaggagctaatcgaaaggactaagtcgcgaacaaagaccaaaacttctgttacgaatgggtcgatctccatggctgatttggaaaggcaaatgaggaacagcagcttaaatccttctaccccgattatgggttacagtggctcatctgtacctatggcaccggatacgtttgacgtcagacccagtgggataataacaggaaataagatgatctcaaatatgctggagattgaagtaagcgatcaaagacccgatgaaaccgttgcgaatttatctgctgattacaacagcgcagccacttcttcatctatttcaacccccgcaagtggatcatcctttaatttgaatagtatcatatcctctgtgcaaacggaacatttggaaaaatcatttgttgaatccatgcaaggactaaacgaacaaacaccaattaatgatatttatcatcaacagcaggttcaaagttcgacgcagagacatgtgtatcaacaacctccagcaatgtcctcgataaactcctcctatccaagtcccatgatgccttcatcggcatcagtatcatatccttacaattttttgaaccaacaaagccaaggggtagcgctgccatttaatgcacatgattcacaatggcaaaatgaaatatgcgcattgaattcaaggaactttttgaatccaacttggatgggcagccaaaaccagagtgccgcctcaccagtgtatacacaaccgcaacagcaactgtttcagcagcccatgcagcaagaaccggggaagtatgtgcaatttccgtatggcccacaagatactacaggcactatgaagggaagtggtcataacgatgtgttttaa

SEQ ID NO: 522 - DNA, 2511 bp, Saccharomyces pastorianus
atgctagacaaggcgccccctcaaagcaagcgcatagacgaatccaacgcggcggcctctttgctctcgatggaaacaaccgccaacaaccaccactacgagcccccccgcccactgatggcaaacagcagccaggacgcaagagtgcgcacagaggacgacggcggcgatgagacgaattcgcgccatcctaccatctccagcgccagcatcgagtctgtcaagactacatacgatgaaaaccctctgctgtccatcatgaagtcgacgtgtgcgcccaacaacactcccgtgcacactccgtctggctcgccgagtctgcaagtccagggcggaaacgatgctaaagacggcgacaactccaatggaaaggacgttgccgcggccgctgctagcttccaagtccgtcgtaacagcgacaacgctccccacactgccgccagcccgcatgcgccctccaatactccctctggagtcagctctttgtgcaatagtcggcccgtgcagcccaacgtattacaggtctctaacgctgtccagccgcggcgtcacgctaataacgacgttgtctttccttattcctcctctgcctccaatagcaacaagcctgcctctactactgttgtcggcggcgccaaagaaaaaataaatttgccgccaccaccagccatttcttcccccgttaccaccgctgttggctcgggctcgggctcgggcatgcgttcccgcacaggatcacagaatttgccgcccatcaatagcgcccacaaggacgacggcaagaacaccaactcgccactgtcgatccttggcaggaagaacagcagcaatagtaacaacgacggcaaatcatttcacggctcggagtcgagaggctcctccagcaataacgagaacggcggctttttgcgcggcgaaactaagcgcggcggtaattctccaaatgactctaaagctcagcatagtgatgcggatgatcagtatgccatgggcgtggctcctcgaaacttctatttcaacaaggatagggaaatcaccgatccgaatgtaaaactcgacgagaatgactctaaagtcaacatttcgttctggctgaactcaaaatatagggacgaagcttactctttgaacgaatcgacctccaacaacatcagttcgagcgcagatacgcccgctaattctcgtcacactaacaatagctcttctgtgcccagcagaaataattttcaacatttcagattcaaccaaattccctcccaacccccgacatctgcatcctcatttacaagcaataacaacaacaacaacaacaataaccaacggaataccattaatcgtggggaagacccgtttgccacttcatcaagaccatccaccgggttcttctacggtgatttaccaaaccgtaataacaagaacagccccttccatccaaatgagccttacgtcccgccacctccacccaaatacatcaattccaagctagacgggttgagatcaagattgctacttggcccaaattctgcatcttcttctactaaactggacgatgacttgggtactgccgcagctgtgctttcgaacatgagatcatctccgtatagaagtcacgataaacccatttcgaacgccaataataacaataaaaacacaaatacactcactgtgccaactagtaggcctcattcatcatctttcccatccaagggggttctaagaccaatactattacgtattcataactccgaacaacagccaatcttcgagagcaataattcaacagccgtgtctgatgaagaccaggatttgtcacattattatcttcacccctctcaaaattcaaattctaaaaaagtcctagacccaacttttgagtcaagagccagacaagttacttggaacaaaaatggtaagcgaatagatagacgactatcagcaccagaacagcaacaacaactggaagaacctgatttgaaaagatcaagaagatcagttggcaatggaagatccacgagccaaaataatagtgattataactcgcttggcgaatccccaacttcctctgctccttcttctccttctctgaaagcgtcgtcttcaaacttggcatatggcccagaatattctaatgccgattcaccagatacgagtaaatctaaagggaagacgaccaaggcaaaatccaaatcaaaacaatcctcaaaaaaaagatcaaacaataacagttccaaatcaaaggcaaacgactcgcaagaaatgaacaacaccgcttcctctgcagccgctcaaggtacaagatctcgtactggttgctggatttgtaggttaagaaaaaaaaaatgtaccgaagaaagacccaactgtttcaattgtgagagattgaaactggactgccattatgatgcgttcaagccggatttcgtatccgatccaaagaagaaacaaatgaaattagaggagattaagaagaaaacaaaggaagctaaaagaagagcaatgaaaaaaaagtga

SEQ ID NO: 523 - DNA, 2304 bp, Saccharomyces pastorianus
atgtcagtcttgcgatcacagcctacttctgtcgtaccgctacacctcataactcctgccagtcgcaacacagaattagagtcatcgctgtcgcactctgcagtaattgagcggcacaataacctctcggctccgaattcaaattcgaactcgaaccctgattcgaatcatcgaataaaaaaagatagcaacaaccacactagctaccactcttcctcgaattcagaatctaacatggagagccctcgtttgtctgatggcgaatcctctactccaacctctattgaagagttaaatccgacgataaataatacgaggctggtaaaaagaaattactcgatatcgatcgaccctttacataataacaacatcgacgacgatcatcctaatacgataacttcaccacagccaaacggtagtaataacaaggaattccagaagtacacttttcctgaagaaaacgactccaaaaaggtaacggctccctcgttaaattcaaacaactatttagataattccagtcttgttcacactgattcgtacattcaagacttaaatgatgaccatattttactgaataagcgtgtttctagaagatcttccaaaatatctacagtaacagcgacgtccacaacaataaaacaaagaagaaatactcaagattcgaacctacccaacattcctttccacgcttccaaacattctcaaatattacctatggacgattccaatttaataaaactggccaacacagataccaatgcgaagcctaatactgcccctagagttaaccattcaatgacttcgctgcccattcacccgctaccacaaccttcccaaaaatcaaagcaatatccaacgatatctaaatctaccacctctttacctccagcaaatgatcattactaccaacacaatcataacaataatcagaatcaacccgtcactactgctaccaatacggctttgaaaagatcagagtctgctaccgcagaaattaaaaaaatgagacagtctttgttgcataaaagagaaatgaagaggaaaaggaagactttcctggttgatgatgaccgtgttttgatcggcaacaaagttagcgagggtcacgtcaactttatcatagcttataatatgttaactggtatccgtgttgcggtgtcacgttgttcaggtataatgaagcccttaacccctggggatttcagattcaccaagaaattggctttcgattaccatggcaatgaattgactccctcttctcaatacgccttcaagtttaaggactattgcccggaagtgttcagagaattacgtgcattgtttggtctggaccccgcagactatttggtgtccttgacttccaaatatattctgagtgaattaaactcaccgggaaaaagtggttcttttttctactattctagagactacaaatacattatcaagacgattcatcattccgaacacatccatttgaggaagcatattcaagaatactacaatcatgtaaaggataatccaaacactttaatttgtcaattttatgggctgcatagagtgaaaatgcccatatcatttcaaaacaaaatcaaacatcggaaaatctacttcttagttatgaataacttattcccaccacatttggatattcatactactttcgatttgaagggctccacgtggggtcgctcaactagcatagataaggaaagattggcaaaagatagagcttatagacctgtaatgaaagatttaaattggcttgaagaaggccaaaaaattaaattcggtccattgaagaagaaagctttcttaattcaactgaaaaaagacgtagaactattagctaagttgaatacgatggattattccttgttaatcggaatacatgacatcagtaaagccaaagaagacgatttacagtttcccgacactgcatccattgaggagcaggcgcaaacacaagggcccatgagatctggtactggaacagtggtacggcattttttcagagaatttgaaggtgggattcgtgcatctgatcaatttaacaatgacctagacttgatatattacgtgggcataatcgatttcttgacaaattattcggtgatgaagaaattagaaaccttttggagaagtttgcgccatgacactaaactggttagtgctattccaccaagagactacgctaatagattttatgagttcatagaagattctgtggatcctctacctcaaaagagaaatcaatcatctgcgtataaagacaatcctaatcaaaaaaattataaagattga

SEQ ID NO: 524 - DNA, 219 bp, Saccharomyces pastorianus
atgagccagcaacaaggttactatcaacaaggccctcctcaacaacaaggctattaccaacaaggcccaccacaacagggctactaccaacaaggcccaccacagcaacaaccagtctacgttcagcaaggaccagcaaaggaggaaggaagctgcatggatagttgcttaaaatgtctgtgctgctgcttcttactcgagttgctctgcgataactga

SEQ ID NO: 525 - DNA, 2139 bp, Saccharomyces pastorianus
atggcaccaaagaaggggcaaaagaagaacgggcaaaacaaccatgcaagaaattctgacatggacgttgaagaccgtttgcaagctgttgtcttgacggattcttacgaaactagattcatgccgctaacagctgtcaggccaagatgtctgttgccgttggctaatgtaccgctcattgaatatactttggaatttctagccaaagccggtgtacacgaagtttttttgatttgctcttctcatgctaaccaaattaatgattacatcgaaaactccaaatggaatttgccttggtctccattcaaaatcacgaccataatgtcccctgaagctaggtgcacaggtgatgtcatgagggatttggataacagaggtatcattactggtgatttcattttagtaagtggtgatgtggtgaccaacatcgacttcagtaaaatgctggaatttcataaaaaaatgcattcccaagacaaagatcatatctccaccatgtgtttgagcaaagctaccagttaccctaaaacaagaaccattgaacctgccgcattcgtcttggataaatccactaatagatgtatttactaccaagatctaccattgccaagctctagagaaaagacttccattcaaatcgatcctgaattattggacaatgttgatgaatttgtgataagaaacgatttgatcgattgtaggatcgatatttgcacttcccacgttcccttaattttccaagagaatttcgactaccagtcactgagaacagatttcgttaaaggtgttatctctagtgatatcttggggaaacatatttacgcctacgtaacgggtgaatacgccgtaagagttgagagttggcaaacctacgatacaatctctcaagatttcttaggaagatggtgttatcctttagtcttggattctaatatacaggatgaccagacatattcatatgaatcaagacatatatacaaagaaaaagatgttgttttggctcaatcttgtaaaattggtaaatgtactgctatcggctcaggcaccaaaatcggagagggtactaaaattgaaaactctgttattggaaggaactgccaaattggtgaaaacattagaattaagaatagctttatttgggataactgtgtcatcgaaaacaatagcattatcgaccattcattactcgcttccaacgccatgttgggaaccaatgtacacgtaaatgacggttgtatcatcggctataatgtcaaaattgatgctaacatggatttagatggaaatactaaaatatccgcaaacccattgaagagcgctttctctgggatgtatggcaacgatgatgacgaagaacttagtgaagacaatgatggccaagtattagctgtctctatagttggagaaaagggtgttggctacatctatgaaagtgaattttctgatgacgaagacagttctacagaagcctataaagaagtgaacactttgagtaaccaattagaagagttatacctaagtgatgactccatttcctctaccaccaaaaagaccaagaaaaagagaacgatgtctgtcaatagtgtatacactgatagagaagaatttgattcagaatttgaggaagaagatttcgaaaaagagggtattgctactgtagagcgtgctatggaaaataaccatgatcttgacaccgccctactagaattaaatactttgagaatgagtatgaacgtcacgtaccatgaagtgagaatagcaaccattactgcattattgaaaagagtttaccatttcatcgcaactcaaacattaggtcccaaggatgctgtggccaaagttttcaatcaatgggggctactatttaagagacaagtctttgatgaagaagaatacgttgatctaatgaacatcctaatggagaaaattgtagaacaaaattttgataaaccggatttgatcctatttagtgcattggtttctctatatgataatgacatcattgaagaagattccatttatagatggtgggacagtgtttctgttgatccttgttatgatgaagttaagaaattgacggtgaaatgggtcgaatggttacaaaatgctgatgaagaatcttcctcaggagaggaataa

SEQ ID NO: 526 - DNA, 1680 bp, Saccharomyces pastorianus
atgtcccaattatttaataattcccgctcagacactctgtttcttggaggtgaaaaaataagtggtgatgatattcgtaatcaaaatgttttagccactatggctgtagcaaacgttgttaagtcatcgttaggccctgttggattggacaaaatgctcgttgatgatattggtgatttcaccgttaccaatgatggtgccactattttatctttgttagatgttcaacatccagcgggaaaaattttggtggaattagcccaacaacaagatagagaaattggtgacggtactacgagtgttgtaattattgcttctgaactgttgaaaagagctaacgaattagtcaagaataagattcatccaaccaccattataaccggcttcagagttgcactaagagaagctatccgttttattgatgaagttctttccacaagtgttgattctcttggcaaggagacactaatcaatattgctaagactagtatgtcttccaagattattggtgctgattctgaatttttcagtaacatggttgtggatgccctattagctgtcaagacacaaaattctaaaggtgaaattaagtaccctgttaaggctgtcaatgttttaaaggcacatggtaagtccgctaccgagtctgtgttggttccaggttacgccttaaattgtacaattgcctctcaagctatgcctaagcgtattgacggtggtaatgttaaaatcgcatgtttggatttgaacttgcagaaagctcgtatggcaatgggtgttcaaattaacattgacgatccagaacaattagagcaaatccgtaaacgtgaagctggtattgttttggaaagagtaaaaaagatcattgatgctggtgctcaagtcgtgttgactactaagggtattgacgatttatgtttgaaggaatttgttgaagctaagatcatgggtgtaagacgttgtaagaaagaagatttaagaagaattgctcgtgctacaggcgccacattagtgggttctatgtctaacttagaaggtgacgaaacatttgaaagcagttatctaggtctttgtgatgaagtcgttcaggctaaattttccgatgatgaatgtatcttaattaagggtacttccaagcattcttcttcttcaattattttaagaggggcaaatgactattccttagatgagatggaacgttctctacatgactcactctctgttgttaagagaactttggaaagtgggaacgtcgtaccaggtggtggctgtgttgaagccgctttgaacatttatcttgacaattttgccactacggttggttctcgtgaacaattagctattgctgaatttgctgctgcattattgatcatcccaaaaaccttagcagtaaatgccgctaaggattccagtgagttgattgctaagttaagatcttatcatgctgccagccaaatggctaaaccagaagacaccaagaggagaagttacagaaattacggtttggatttgattagaggtaaaattgtagatgaaattcatgccggtgttcttgagccaactgtaagtaaagttaaatctttgaaatcagcgttggaagcctgcatagcagttttgagaatcgatacaatgattacagtagacccagagccaccaaaagaagacccacacgctcattga

SEQ ID NO: 527 - DNA, 2787 bp, Saccharomyces pastorianus
atgagtgaagtcggtatacataatcacagaaaatcagtgacaaaacctaggagaagagagaaggttatcgaattaattgaagtagatggcaagaaggtaagtacaacatcaacgggtaaacgcaaatttcacaacaagtcgaaaaatggctgtgacaattgtaaaagaagaagagtgaaatgtgatgaaggaaagccagcctgcaaaaagtgtacaaatatgaagttagagtgtctatatactccaatccacttacgcaaagggagaggcgcaacggtggtaaaatacgtcacccgaaaggctgatggtagcgttgagcccgagtcctcggtagatttgccaactatggtcaagaaggagcagacgccctttgatgatgtttcctcagcaataaaagcttcgggatcatcaaacgattcgtacccatctagcacttccacaacgaaaagcgaaagtgaagaaaaatcatcagtacctatagaggataaaaatactatgacccctctaagtatgggtctgcagaatacaataaataaaaaagatatgatgaacagtttcttctctcagaacggcactattgcatttggctccccagaaaggctaaactcgggaattgatggcttgttgctaccacctttgccctctgcaaatatgggccctttccaactgcaacaacaaactcagtcgcagcagactcagtcgcagcaaactcaaccccagactcaatcacagcggacccaaacgcagcaacaaccacaacctcaaccgcagccagcaagtgggactccaagcgatagatatggctcgtttgatctcgctggtagtcctgccttgcaatcgacgggtatgagtttatcgaatagtttaagtggaatattactttgcaataggatcccatcgggacaaaattacactcaacaacagctgcaatatcaattacatcaacagttgcaactgcaacagcatcaacaagttcaattacagcaatatcaacaattacgtcaggaacaacaccaacaagttcagcaacagcaacaggagcaactccagcaataccaacaacaatttttacagcagcaacagcaaatactacttcagcaagagcagcaacccaacgaagaggaatctgctattcgggaggaaactagcaaaaagataaagggacagcctttgcaaccgcacacaggcgaacctactttgaataatgatgccgccacactacaagcagacgcactatctcaattaagcaaaatgggattgagtttgaagtccctaagtacttttccaacagccggtattggtggcgtttcttatgatttccaagaattgttgggcataaagttgccaatgaataatggtaactcaagagccgcaaaagttagcaacgcagaggaagctctggccaatatgcaagaacatcatgagcgcgctgcagcttctgtgaagggaaacgatggtcaattatccgatacaaaaagcccaacaccatcgaacgtacaaggaagaagtaccagtatattgggatcgcaaggatctaccgcggtttcaacgatggcccctatatcaatgatcggacgacatatgaacggtgacgatgccctttctccttcgacgcctgctgcggtgctggacggcagacaaggaatacaagacactttgagttctctaggaaatttgacaaaagtagccttagaaaatgacggcacaacaatgggtgtacaaacgttacaaacaaggaatgacgatcaaggctcacaacaagacatgtcttcaaaattaaacaacgaagacggagattctatttctgtcggtacaagtggtatttccaaacttttggatctttccaccaagggcaatctgaatctgatagacatgaaattattctatcattattgtacaacggtctggcctacaattactgcggcaaaagtttctggacctgaaatatggagggattatataccagaactggcttttgactatccattcttaatgcatgccttattggcattcagtgccacacacctttcgagaactgaaacagaattagaacagtacgtttcatctcaccgcctagacgctctaagattattaagagaggccgttttggaaatttcagaggataacactgatgcattggttgccagtgctttgatattaatcatggactcactggcaaacgctagcggaaatggtacagtaggcaaccaaagtttaaatagtatgtcgccaagtgcttggatattccatgttaaaggtgcagcaacgattttaaccgctgtatggccattaagtgaaagatctaaattccacaacattatatcggttgatctcagcgatttaggcgatgtcatcaatcccgatgtgggtacaataaccgatttggtatgttttgacgaaagcattactgatttatatccggtcggcttagattcgccatacttgataaccttagcttacttagacaagttgcaccgtgaaaaaaaccaaggtaatttcatacttcgagtttttacatttccagcattattggacaaaacattcctcgcgttattgatgacaggtgacttaggcgcgatgagaattatgaggtcatattataaactactgagaggatttgctacagaggtcaaggataaagtctggtttctcgagggtgttacgcaagtgttgcctcaagacgttgacgaatacagcggaggtggtggtatgcatatgatgctggatttcctcggcggtgggctaccatcaatgacaacaacgaatttttcagacttcgcgctgtga

SEQ ID NO: 528 - DNA, 1056 bp, Saccharomyces pastorianus
atggtcgttaataatccaaataactggcactgggtggacaagaactgttttggatgggccaaagagtatttccaagagaaactggttggagtggagaccggctcagcaaaggacaacaagtatgccaaaatcaaatctgtttcatccattgaaggtgattgcgaagtcaaccagcgtaaggggaaagtcatatcgttatttgacctgaaacttactctgttaatcgagggccacgttaactctaaggacggctcgccattgccatttgaaggtagcatcaacgttccggaagtcgccttcgacagtgaagagtcaagctatcaatttgaaatatcgattttcaaggagactagtgaactgaacgaagtcaagccggttatcaggtccgagttgttgcccaaactaagacagattttcctacaatttggcagagacttactggccactaatgctaatgacatccaagtaccggaatctcaagtgaaatccaactacacaagaagcaaccagcaaagtagccgcggtgaggccaagggaccagcttcgaagccaggaaagagcgcgtctccatctgcagcagcagcagcagcagcagcaggctccgatgccaacaaacccattcaaaaggggagcgggaacagcacctccatctatctagaacccactttcaacgtgccatccagcgagctatacgaaacattcctcgacaaacagcgtatactggcatggagcagatccgcacagtttttcaacagcacgcccaaactagaggccaacgagaaattcgaactattcggtggcaacgtcatcagcgagctggtgtcgtgcgaaaaggacaagaagttagtgttccgctggaaactcaaggactggtcagccagcttcaactccaccatcgaaatgaccttccacgaatctcaggagttccacgaaaccaaacttcaagtcaagtggacgggtattcccgtcggcgaggaagaccgcgtgcgcggcaacttcgaagattactacgtgcgctccatcaaactgacctttggcttcggtgccgtgttatga

SEQ ID NO: 529 - DNA, 2139 bp, Saccharomyces pastorianus
atggtgagtgcacctctgttatttctgctgctaatcgagcaagcgccactcgtcttttcatcacagcaggtccaaggtaacaagcccgcgcacgttataggtgtttcgaaagagaagcagtacttgtatgcatcaaacgaaccggattcgaccaagtggcactgtttaaaccgtgcggatattgtgctgaacttaagccagattaatgatggggtttgtgactgtcctgatggttctgacgagcccggcacctctgcttgcgatgaagatatatttcaaatggtagcggagcaaagtaatgaggtgaataagtacttttactgtgataataagggcttcattccaagacatatacgaagatcagttgttgcagacggcgtttgcgattgttgtgattgttcggatgaactactgtctgaatataaaccttttgatgtaggatccgattgtcctaaactaaaaaatgaatttgatgctatggcttctactgaactacttggctatgaaaagggtaggaaagcattgttagcattggaaaacaaatacggcgtaaagccagaggtagatgatacggttagtagtgacagcttagagaaaactaaacaacggcttgttgacgacataacattactctccaataaacacgcaaaagacaaggttaaattagatcaagcaaaaagaaactatgtcgatcaattgcaaattgaggatccagttttgtatcaatttgaacgaatgagtatgactgctttaacttcagatgtgtattcttcatttaaggtagtttcgactgtgagcaaaagtcatgaagatatcctgaaaatcttagttgaactatctgattcttatacgcgttctttaaatgatgaagttgttaataacggtatcaagaaattcaaaaaactgaaaaggcaggccgaaaaggccaaacttactgcggacagtgtaattgatgacgaccaacgagataatctcatctcatacttcacagaggaattacctcaaatgtttttggaaagagagtcagaatactcgttaagatatgttataggcaagtctaactttgtcaaagcattgattgagggtaaaattaactataccaacgatatactacaatatgtcaaagaatatagctcaattatgaacgatatttcccaaaactataatgtcaacttccaagatgcaggagtcaaaaacgctgttgattcatataaggattatttgagtaaatataatacattgattggacacggccaaatatctccatcagaaactctatcaaaattactgaatgaagtgacatcattcgttaatgagaatgcaccaaagatattgtcgcctgatgccaatgaagaagaacacgctacgaatagtaatagcggtggtgctttggaagacttacgtaataagatttgggatgttatacccaatctagatcaattttcctctaggggaaagctaattacattgaagaagcagctcgacgtttatgaaaaagattttgctcagctagattcaaaattacaactgacgaaagctaaactaactgcaatagatttaacggatggagaacaagatgaagataataacgctattgtgggagaactgactaagctattagaaggtatgggatcccagtcgtattgtattgaagacgtattagacaactattcatacacaatatgttttcaggaaccaatgaatcaaggcacaatataccagattgaaagtaagtctagcggtaaaaaggtcttgattggtcgtttcaagacattgggtattgacgcagacttgaacatgaacaagtacgtagagcatttgaagagggcacacagtgacgatagcgatttgacttcacatttagcaagtatgcaagagggtgatgagaaaacgcaaaattacatattcggcaacttgaacgaattggacaatgggtttgtattgcaatacgaaaacggagaccagtgctggaacggtccacatagatcagccacggtattcgtccgttgcagtgacactttccaaattcggagcgtacacgaagtaactaagtgtaactacatatttgacgtcagcgggccgctgggctgcgacaaagcctttgaatacaagcctccgaagttcaacttggccaaataa

SEQ ID NO: 530 - DNA, 1263 bp, Saccharomyces pastorianus
atgcttcaatcgggaaatgaaaaaataaagttcgcttccatccaagaggtggactataaaagtccggtgggcaagagtaagaaatatactcttattaacgctatccaaccattagagtggtattgtaacaatgatagtgagacaggttaccaacaaactatcaacaacaacaagagtgatggtattgtcagcagtggtataggtttattcaaagcagtgaaaaaatccatggagacaagagtcgagactcaaacattgtattttactgacttacaatctgggttatgcggatttgtacaattactctactccacagtaatgggtggtatctataagggctttcagctaaatttcaagatttttagtttagaaaataacaataacgattatgatgtttgggaaagttttaagttgaatgacatatctgaattcaaaccattgaagtttgtttctagaaatgtcattttcgaatttttggacaacaaggatgaaaacttgggatcaattggccaattatctgtcaaatgtgatttgcccacttgtaataatacgattcaaaacttgaagattgacttgttgatagatttgtttcaaggtttcaaaatgaatcctaacggctgtaattactactttgacaaagagatctctgccactggtgaactcctttcctcagacaaaatgattagacacgtcttcgtccccaaaggtagttgtaatggccagatttcttatgacaaaaaattaaataacggaagcttccaaagtaaagtgatcgaattaaccgatgtccctgtggcttatctagacgccgttcaaggtcttttaccaaataaagcagctagtaaatggaacttcttatgtttccacagtgaaaactactccattttggctatagaattcactactcctcaagaacatgataatgtcacagtaacagtatggtccatatctgagaagaacaaactgaccgctattggttcttccgtccaaagtccaaaacgtcacgtgcggtttcgggctactagtacagataaagaaaatggctggatatatccaacttccatcaaatttcccggtagattttcagagcataatttgaggttggttaatagatacgatgttcttggtgaactgccaagcatggttagatcgctagctcagaaaatcgtcagcattaatcctttcatttaccaatattgccaaccttctaaattcaaacatgaaaagggtatttcaatcattgagagtacctttatcagttga

SEQ ID NO: 531 - DNA, 396 bp, Saccharomyces pastorianus
atgtctgctaaagccgaaaagaaacctgcctccaaagccccagctgaaaagaagccagctgccaagaagacctctacttccactgatggtaagaagagaactaaggctagaaaggaaacttactcctcttatatttacaaagttttgaagcaaactcacccagacactggtatttctcaaaagtccatgtctattttgaactcctttgtaaacgatatctttgaaagaattgccaccgaagcttctaaattggctgcttacaacaagaagtctactatctctgctagagaaattcaaaccgctgttagattgatcttaccaggtgaattggctaaacatgctgtttctgaaggtactagagctgttaccaagtactcttcctctactcaagcataa

SEQ ID NO: 532 - DNA, 399 bp, Saccharomyces pastorianus
atgtccggtggtaaaggtggtaaagctggttcagctgctaaggcttctcaatctagatctgctaaggctggtttaacattcccagtcggtagagtgcatagattactaagaagaggtaactacgctcaaagaattggttccggtgctccagtctacttgactgccgtcctagaatatttggccgctgaaatcttagaattggctggtaatgctgctagagataacaaaaagaccagaatcatcccaagacatttgcaattggccatcagaaatgacgacgaattgaacaaattgttgggtaacgttactattgctcaaggtggtgtcttgccaaacattcaccaaaacttgttgccaaagaagtctgccaaggctaccaaggcttctcaagaattataa

SEQ ID NO: 533 - DNA, 669 bp, Saccharomyces pastorianus
atgtctagctcagaatccattagaatggtcttgatcggcccaccaggtgccggtaaaggtactcaagctccaaacctgcaagaacgtttccacgccgcccatttggctaccggtgacatgttgagatcccagatcgcaaagggtactcaattaggtttggaagcaaagaagatcatggaccaaggtgctttggtctccgacgacatcatggtcaacatgatcaaggatgaattaaccaacaatccagcttgtaaaaacggtttcattttggacggtttcccaagaaccattcctcaagccgaaaagttggaccaaatgttgaaagagcaaggtactcctttggaaaaagccgtcgaattaaaagtcgatgatgaattattggttgctagaatcaccggtagattggtccatccaggttccggtagatcttaccacaaactcttcaacccaccaaaggaagacatgaaggacgatatcactggtgaagctctagtccaaagatccgatgacaatgctgacgctttgaaaaagagattggatgcttaccacgctcaaaccgaaccaattgtcggtttctacaagaagtctggtatctgggctggtgttgacgcctctcaacctcctgccaccgtttggaccgaaatcttgaagagcctgggtaagaactaa

SEQ ID NO: 534 - DNA, 1854 bp, Saccharomyces pastorianus
atggatcacgacactgaagtcataatcaaggatttcaatagtattcttgaagagctaactttcaattcgagaccgatcattaccactcttacgaagttagcggaagaaaatatatcatgtgcccaatattttgttgattgtatagagaataggatcgaaaaatgtatgcctaaacagaaactatacgccttttacgccttagattccatttgtaaaaacgttggtagtccatacacaatctacttcagtagaaatttgtttaatctatacagaaaaacatatctcttggtggataacactacaagaacgaagctcatcaacatgttcaagctttggctaaacccaaacgacaccggcatgcccctgtttgagggctctgctctagagaagattgaacaatttctaataaaggccagcgctttgcaccaaaaaaatttacaagcaatgttaccaacccccactgttcctcttctactaagagatatcgacaagttaacatctttgaccagcgacagattaaagaaccagccaaacgatgaaaaactgaaaatgaaacttttggtcttatctcaattgaagcaagaactgaaaagagagaagctaactctcaatgcgttaaagcaggttcaaatgcaactgagacaggttttttcgcaagaccaacaagtattacaagaaagaatgaggtatcacgaatttcagcagcaacagcaacagcaacagcaacaatatcacgaaactaaggaaacccaaggaacctctcctcaaaatttcaatgcggctatcccactatttggtaacaaccctgatataatgaaccatcagggcactttatcttcatctctctttggaaacatttccggtgttgaatcttttcaagacatcgagaaaaaaaaaaacctaagtaaaatcaaaaacctttatgaatctttgcaatctgaggggttaatatatactccaccaaaggaatccattgtaacgctttatacaaagctaaatggccattcaagctattctttggactccagggaaaaacaattaatgaaaaacctaccaaagataccgctactaaatgacattctctctgactgtaaagcctatttcgccacagtcaacgttgatatcttgaataacccaaccttacaactatctgaacaaaccttacttcaagaaaacccaatcgttcaaaatagtctcattcatttattgtacagatcgaaaccaaataaatgtagtgtgtgtggtaagagattcggtaattcagaaactgaaaaacaactacaaaacgagcatttggactggcatttcagaataaatacaagaattaaaggttctcaaaatacagcaaacacaggtataagcaactcaaactcaaataccactactacaaggaaaaatatacaatcaagaaactggtatttgagcgattctcaatgggtagctttcaaagatgaagaaatcacctctacacagcataaagttgactacactgatcccaatattatggaaaacagtaataacatcgataattcaaatagctacgctaatgacattaatgaaaagtctgcaaaggacactttaggaaatcgtaaagataatgaagtaaaaataaaggaaaaatatgttgtcgtaccagaaacttcacaggatatggttttcaagtgtccgatttgtaaagaaactgtcaccggtgtttatgatgaggaatcgggtgaatggatctggaaaaatacgattgaggttgatgataaatattttcattctacttgctatcatgaaacctccgaaagtttaaataaatttgatgaaggctcagttgatttagacgatctaaaaaaattaatcactaaataa

SEQ ID NO: 535 - DNA, 1407 bp, Saccharomyces pastorianus
atgcctagtgataataatgaacaagtacacggatctccttcgagtgagcacaggctgagagtcgagcgggatgacggtaaccattacgacgtgtctcctgacaggtatgctcctcacttgtcggagttttattcgatcgtaaacagcaaaaagcccgtggcgagtagtgctggctccgacgataatgatcatctggacgacatgcaccatttgcgtacatccaaagtatattccaaggcccgccgggcatccagtataacttccggtacaagtacgatcaacgacctgcaaactctaattacaaaaagagatgtcaaggatactcaagaagcgctgtcgactttgtttaggaattcgaatgcttattcggactcgttgttgaaaacatctcacaatggggcggagattgccctttctttggaaaacatcgccaaattgaaaggctgcaacgacgaaacagcagagaagctgctaagtgccagcgggttgttctaccttttgtccaatcatcagctcataatgtcaaagtatttcaatgaattactgggagacaacttaattgacgacatcgatgaatttaagttacagacaaagataatggagaataaattcaaggtccaaagtaaagaacaaagcttgaagttgaaattgcaagaaagacacaatttcgatatttcgaaaaggaaaataaggaacttgatatcgtaccgagaaagcctctccagtttacaagcacgattagaccaactagagacgctaaaacatgatttttacatggactcatacgagctcgtggaaaatacctgcaataaagtactaaacaaagtcgccacagtgtccagggcgcaagtggagatttctgagaatattgctaggaagggctggtctggcggtggactggatgacttattatatgatgcggacgaccctttcagcaagaagaccaagggaccctacgggaccgcggacggagatgaagagacgggagacggggaagagtgtatggacgacaatgaggatacaagcgggggcgatgtggtgctcaatgaactactagaaggaactagtcgaccttccacgtcaaaaacattttcaccaaagtccaagagctcctcgacagcatctacgccgcaccattcctactccaatacaaatgtggaggaggtacgaagcagcaacaacgaaggccgcgaaaatggcgacgaagacgatgatgaggatgtggacaatctgatgggggcggagaactcgttttcgttgccgcctacaagaaactcaaacgaggaaacagcggaaacggcggaaacggcggatacgttgagacagttgtctattgaaagggacaatgacggcaacggcagcgatagcaatagcgacgcgatggaagaccagtcaagtaatatataa

SEQ ID NO: 536 - DNA, 621 bp, Saccharomyces pastorianus
atgcgttggtggccatggtcaaatcagacacagcatgagcagcagcagcagcagcagcagcaagacagaccggaaggagaacccgtactgacgaactactcgcggggccagaagattctactggaggatactccgcccaagttcaccaatgacctatccaactcccagttggccaagaaacaagaacgggccacgttaaaggaggcctgggactcagtcaggtggggcgacttctctctagagaggctgacgtcgatcccgtgcttcagagatgcgggcatgctcgggttttccagtatgtttttgatggggtctgtcatattcatatatcataaaagccccacaaaagccacgaactgggccatgagctctctgatactgggatcaattgtcgggtgggagcagtgtaggttgaagagacaaaaaagcttccagattgcccagttggcaaaggaaaccgtggcgaaaaaggaaagaccaatgatgcataacgtggtgcatgacccagctttgccagaacaatgggaggttgccaagaatgaaaagcaggcccagttccagcaaagcaaccagcgcctatcgcagggctcttctgataagaaatggtataaattctggtga

SEQ ID NO: 537 - DNA, 882 bp, Saccharomyces pastorianus
atgtctgctcccgttcaacatactcccgttcaacaacaacaacaaagctgtaattgcgatttgctattatggaggaaccctattcaaaccggtaaatactttggtgggtccttattagccttgttaattttgaaaaaagttaacttgatcactttctttttgaagattgcttacaccgtactattcacaacaggttccattgaattcgtatccaaactctttttgggccaaggtctgatcactaagtatggtcctaaggaatgtccaaacgtcgctggcttcatcaagcctcgcatcgatgaagccttgaagcaattgccagttttccaagcccacataagaaaaaccgtgttcgctcaggttcctaagcacactttcaaatccgctgttgccctatttctcctacacaagttcttctcatggttttccatctggaccattatgttcgtcggcgacatcttcgttttcaccttgccagttatctaccactcttataaacatgaaatcgacgccaccgtcgctcaaggtgtagagatctccaagcaaaagacccaggaattctcccaattggcctgtgaaaaatcaaagccatatttggacaaggtcgaatctaaattgggccctatctccaagttggtcaaaaacaagactgctactgtttcctcaactactggtcctgaaaccgccaccactgtcaacttggccgctgaagttccattagaacctgagtctaaagcctatacatcttccgctcaagtcatgccagaagtcccagaacacgagccttctactaccagagaattcaacgtcgatgaattgtctaatgaattgaagaaaagtacaaagaacttgcaagatgaattggaaaaaaacaacgcttaa

SEQ ID NO: 538 - DNA, 2082 bp, Saccharomyces pastorianus
atgttacgatcaaccgctgctactcgctcattccatagctccagagcctggttgaagggccaaaacttgactgagaagatcgtccagacctacgcagtggacctgcccaagggcaaagttgtctattccggcgactacgtctccatcaagccggctcactgtatgtcccacgataattcttggcctgtggctttgaagttcatgggacttggtgccaccaagatcaagaacccctcacagatcgtgaacaccctcgaccacgatatccagaataagtctgaaaaaaacctgaccaaatacaagaacatcgagaactttgccaaaaagcacaatgtcgactactaccctgcaggtagaggtatcggccatcaaatcatgatcgaggagggctacgcattccccttgaacatgacggtcgcatccgactcgcactcaaacacctacggtggccttggttcgctggggacccccatagtgagaacagacgctgcggccatatgggccacgggccagacctggtggcagatcccaccggtggcccaagtggagttgaagggcaaactaccacaaggagtctccggtaaagatatcatcgtcgcattatgtgggctcttcaacaacgaccaggtcctaaaccacgcgattgaattcacaggcgactctttgaacgtgctacccattgaccatagactgactatagccaacatgaccactgagtggggggctctttctggcctgttccccgtagacgaaactttgatcaactggtataagaaccgtttacaaaaattgggcacaaatgaccatccaagaatcaacccaacaaccatccgtgaactggaggaaagggcgcagattgttagaccagacaacgatgccagctatgccaaaaaactggtcatcgatctatccacgcttacccactacgtttcaggccccaacagtgtcaaggtctcgaataccgtgcaggacctatctaaacaagacatcaagataaataaggcgtatttggtgtcgtgtaccaattcacgtttatctgatttacaatctgccgctcaagtggtttgccccactggggacttaaacaaggtcaacaaagtcgctccaggcgtgcaattttatattgctgctgcctcatcagaaattgaaaaagatgcccgtcaaacaggtgcctgggaaaaattgttaaaggctggttgcatcccattaccttccggttgtggtccatgtattggcctaggtgcgggcctattggaaccaggtgaagttggtataagtgctaccaacagaaacttcaagggtagaatgggttcaaaggatgcattggcttatttggcttctcccgcagtggtcgctgcttccgctgtgttgggtaaaatcggttcacctgctgaagttctatccataagtgagatcccatttgatggtgtcaagacccagataaccgaaaacactgtctctgaagaaaagggcgaaacagaagctccggttccaaagcaatccgttgaaattttggaaggtttcccacgagagatctcgggcgagttggtcttttgcgacgctgacaacatcaatactgatggtatttatccaggcaagtacacttaccaagatgacgttcctaaagagacgatggccaaagtctgtatggaaaattatgacgctgatttccaaacgagggcccatcctggcgatatcgtcatcagcgggttcaacttcggtaccggatcctccagagaacaagcggccactgcattattggctaaaggtatcaacttggtcgtgtccggctccttcggtaacattttctctaggaactccattaacaatgctctgttgactttggaaattccaactctagtcaagaaactacgtgagaaatatcaagacgctccaaaggaactcacaagaagaactggttggtttttgaaatgggatgtagctagtgccaaagtagtcgtcaccgagggctctttggatggtcccgtcatcatggaacaaaaagtaggtgagttaggtaagaacctgcaagaaatcatcgtgaaaggtggcctagaaggttgggtcaaatcccaactataa

SEQ ID NO: 539 - DNA, 657 bp, Saccharomyces pastorianus
atgtttagctggactttttatgtttcaatattgattgtgttagcaggtaccttcttgatacatcgaaatacgaatactgatatggtcgatagtttcaaacgagaagtagacttgcccatacctgtacaaccacgtccaccattcccgcttgttacagattattgtgacattgttagcgggtttggacgtggatctgctgaattaggcatcccaacagccaacgtgcccatagagcagttacccaaaggtataaacgatctggatttgggtgtttattttggatttgctcacatcaaggctattgaccatggagaacccttggtcgaaacaaggcaggatggtagaactgtggtttataattacggtcaatacttaagtgaagcaaatggtgatttaaacgtgctccccatggtactttcagtaggaaaaaatccgttctacgggaatgatttcaaaaccatggaattgcatgttcttcacgatttcaagaacgatttttatggggccaaggtcaaatttaatattctgggccacatcaggcccgaattgaattatactactaaagaagccttaattaatgatatcaatatcgatataaagattgcacaaaaattcctatccacctcgccgtatcaatcatttaaacgtcaactatag

SEQ ID NO: 540 - DNA, 879 bp, Saccharomyces pastorianus
atgcaaaagtttacatcagttactcatagatcattttcccattcatgtattaatgctaaagctgcatgctcgttaatcaaacccgttcatcacttagtaaagattgacaaatcaaagttatcccctaggtttccagaactgaaatacgataaaagtgatattaggtcacctggattcaaaccaaaagacactcacgcagacaggctcaatgatcattatctaaacactctacaatccgaccttctgttgatcaattattcgcacgatgcggccgtagaaaaaggccttaaacaaagagcatggagtggggattcgccatatcacttgaacagaccacctaagaatcctcagggttctaaagtccaactacctgatatccatcccatcaaatggggcaatatccctggattagaaaatgttgtgataaattgttttgttagagaggcaagagaaaaccagttgtttgctatcactgcagctcttcaattacaacaaataaccggatgcaaacccaaaccaattttttctaaaaacgatgttcctacctggaaactaagaaagggccatcagatgggggccaaagttgaattgaaaggtaaggaaatgtcacagtttttaacgacattgacggaaatcgttttaccaagaataagagaatacaaaggtattagcaaccaatccgggaatagatttggtggaataagttttggtttgaccgctgaagatatcaagtttttccctgaaattgatgcgaaccaagactcatggccaaaaacttttggtatgcatataaacataaacacttctgctcaattagactaccaggcaagaactttgttaagtggattccagttcccattcttcggagatgaaaaataa

SEQ ID NO: 541 - DNA, 1650 bp, Saccharomyces pastorianus
atgacagttcaatcggcatggacagaaaaagttgaattaaaacgagagcagttaaaagacaaaatagctgatgaatggaaattagacaatgaaaccataaggaggctgaaggatgacaaaaaaaatctcatcaaaaacatcgatgatttgtgttcttctatagagaatcaaatcactcattccacaattattaaattaagggagaaactgaacgcaaaacaattaacctgttataaaataacctctgctttttgtcatagagcggctctaattcatcaagttgtgaattgtttatcggaaattatgttcttagaggcactgaaactggctgattactatgataaacatagaccagccacattaccgcctctgtacggtataccaatttctctcaaggaccaatgtaatgtagagggagtagacacctcactaggttatttatctcgaacttttaaaccgaagaccaaggatgaggagtcattgattgttagttatttaagagacttaggagcaataatatttgtgaaaactacggtaccttcatcgatgatggctacggatacagaatctaatacgtttggatatacgtataatagtataaatttgaatttctctagcggcggttcatcgggtggagaagggtcgttgatcggcgctcatggttctcttttgggcttaggtactgatataggtggaagcattagaattcccagtagttatcaaggattgtttggcctaaaacctacttttggacgggttccttacttaaaggtggataattcattcgaaggaagagaaacaattccaagtgttattggaccattagcaaaagatctttctgatttgaggtacttcatgagttgtatcataaatgtctgcaaaccatggatgcgagatgtaaaatgtcttccatactattttgactccactgcaaatgaattacatagtgattatgttgttgggatatggtacagtgatgatgttattggtcttccacccagcgacatcagggctttaaaactgtgtgaagatctaattaacaaaaccgaaggtatgaaagcagtcaaatgggaaccgcccagtaaactaagtatagagttatttgacatcgcaaatgaagcagatgttgcggactcaggtaacgaaataagagacgaatttgaactttctggggaaccgctgttggatattttaaaaccaatggttttagatgatggaagacctccatacacagtcaatcaatggtgggatttgaccaaaagagtttacaatgcgcaacaatctatgagagaatactatctctctcttccagaattagaaagacctgacgttgttatatgccccacaacattaatgcctttcaggcctggtgacatgttaaagaccactttaaggcacattttactgttcaacgtcttaaattttccatctttgtccgtacctgtaggtactgtcgattgccagatggatggactaatggatgtttcatcagctcttaatgcagaagataaaatgatcaggacatattggaatgatttgatagagtctggagatatagaggggtttcccgtaggtctacaaatagtcagccctatttttgatgacagcgagatttgtaaattcgcatcttggctttttaccaaaatataa

SEQ ID NO: 542 - DNA, 1770 bp, Saccharomyces pastorianus
atggcaagaccggttgatgtaagccagctaattgttggcctaaacaagaaaaacgggccaaataaggatatttcaggcaaagttaagaagcccaagtttttgagcaaacaagaaagacttaaacaaatagaatttaacggcagtacagagagtttgaaatctgtaaaggataataccgctgaactctttattaaacagcaagataatgataacaatgatccactcgaagaaggtggcaatgaaaaaaatagtttgcccaagcaaaatggctccaaatttcagttttcatgggacgaaagcgaagatactttggcaggctataatcctattgtttcaacgaacgttaatgctttgttgcaaaagagggaaaccccatctaagacggctttagagtcctcgtatatggggaagcattggaccgagaagtctttgagtgagatgaatggaagagattggagaatattaagagaagatttcgctattgttacaaaaggtggggcagtggagaacccgatgaggaactgggaagaactggatgtcataccgaaagatctattacgcatcgttactcatgacctgcattttttgtcaccaacgcctattcaaaggattactatccccaacgtctgtaggaaaaatcaatatagggatttccttggtgtcgcgtctacaggttctggtaagacattggcgtttatagtaccgattttgatcaggatgagtagatcttcttcaaggccaccgtctttgaagattatggacgggcctaaagcgttgattcttgcaccaacgagagaattggtacaacaaatacaagcagaagcagaaagggttacaaaaatatggtctatagagaataattatgactgtaaagtagtttccattgttggtggacattcattggaagaaatctcatattctctgtcagaaggttgtgatatcctagtggctacgccagggcgtttgattgattctttagataatcatctgctagtaatgaaacaagtagagacattggtcttagatgaagctgataaaatggttgatttaggatttgaagaccaagttacaaacattttaacaaaagttgatgtaggtgccgatccctcaataaacaggcagacaatgatgtttacagctactatgacttccgtgatagaaaaaatcgctgctgggtatatgaagaagcccgtctacgcgactattggggtagatacagggtctgaacctctgattcaacagattgtagaatactcagacaatgacgaacaaaaattcaaaaaactgagatctgttgtaactaaatatgagccacccataataatttttataaattacaaacagactgccgactggttggctgaaaagtttcaaaacgaaactaatatgaaagtaacaattttacatggttccaagtcgcaagatcaaagagagcattcgttgaaattattccgcagcggcaaagttcaaattatggttgcaacgaacgttgctgcaagaggtttggacattcctaatgtttcattggtggtcaatttccagattcctaaaaaaatagatgattacattcatagaattggtaggactggtcgtgccgccaaagaaggtaccgccatctcttacgttggtggtactgaagatgaaacattaataggcgagcttcacaagtacgtaaaaaagcatgacccattgaataacaacaggttttccgatgctgtgaagaataaatacaactttggtatcgaaaaaaggaatgaagttatatattaa

SEQ ID NO: 543 - DNA, 1833 bp, Saccharomyces pastorianus
atggacgtaggaagctgctctgtggggaacaacccacttgctcaactgcacaaacacacacaacaaaacagatctcttcagtttggccagagtaatgggcctcgtaatgagtcgcccctacagaataacatcaagccaaatggtacccaggctttcaagtccaataaaaataccatttcccaagaaagtatggcacatatgcataggttcatgaacggagaacccctagcggatgataagagaagaatggaaataggacaatcttcagccatgcctctatctctttcaagtatgcgttccttacaaattgaatcaagcccaaaccaaactagtggagcgattaacacatcgcactggtcgcaggaatttcaaaatggtggtaatattcagaataagatcacaaatgcaggcagttcagaaaaagtatggcaacacccgccacaagccacttcgaggcaatttcattatcccaataacatgatgaataactacccttactcttcaatgaatagtttcagcggatcaaggctccagtcacctgggttcatgaaccagcagcacacagaacgttctaaggaagacatcaaacagcaaggagaacaaccttggatggatcagtttgaaaagttagaaaaagaggtttcggaaaacctgaacatccatgatgggatagaagaagaagagaatataactgaagtggaacaaaataagccagaaatcgtggaaaaggacgaagtagtatttggagatcaatatcaatccgatttccaagaggtatgggacagtatccacaaagatgccgaagatgtcttgccatctgatttggtcaacgacgaccttgatttaggggaagactatctgaaatacctaggtggtagggtaaatggaaacatcgagtatacttttcaatcaaataatgtgtattcgaagaaccctaatgcttataagattggttgtctattgatggaaaatggagccaagttgagcgaagcagccctagcgtttgaggctgctgttaatgaaagacccgaccatgtggatgcatggttgagattgggcctggtacaaacccaaaatgaaaaagagctgaacggtataagtgctttagaagagtgtttgaaactagatccaaacaatttagaggcaatgaagactttagcgatcagttacataaatgaagggtacgatatgagcgcctttacaatgctagatagatgggcagaaaccaaataccctgaaatttggtcaaatatcaagcaacaagatgaaaggattcaaaaagaaaggggatccacacacattgacatgaacgcgcgtgtaacaaaacagtatctgcaattagccaacagtttaagctcggcagaccctgaagtacagttgtgcttgggtcttctattctacactaaggacgactttgacaagacgatagactgctttgaaagcgcgttgaaggtcaatcctaatgacgaattgatgtggaacagattaggagcttcactggccaactccaacagatcagaagaggcgatccaagcatatcatagagcattgcaactgaaaccatcttttgttagagctcgttacaatctggcagtgtcttcaatgaatattggatgttataaagaggctgcaggctacttattgactgtcttaagcatgcatgaagtagacaccaagaaaaaaggagatctagggtctctcttgaacacatataatgatagcgtcattgatactttgaagagagtttttatagcgatgaaccgagatgaccttttacaagaggtgaaaccaggtatggatctgaaaagctttagaggtgaattctcattttga

SEQ ID NO: 544 - DNA, 663 bp, Saccharomyces pastorianus
atggccatagaaacaatactggtcataaacaaatcgggcgggttaatctaccagcggaatttcaccgacgacgaacaaaaattgaacagcaatgagtatttgattctcgctagcacactgcacggtgtatttgccattgcgagccagctgaccccgaaggcattgcagcttactcaacaaacaaacacggaaaacatgatcccgtacgtaccatacgtgggcgtcgccggcaacaagaacgataacaggaacgccagtggcaatagcagtaaaccgcacggcactagtaggaaactgggcagtttcaagggagacgattttttcaaagagccgttcacaaactggaacaagggtgggttgaggcagctgtgcacggaccagttcacgatgttcatctaccaaacgctcacggggctgaagttcgttgccataagctccagcgtgatgccacagagacaacccaacatagccggcaccgagaagaccgaccgactcaagagctcatcgaacctggccatccagatagcagacaactttctccggaaggtatactgcctgtacagcgactacgtcatgaaagacccatcctactcaatggaaatgcccatcaaatccaacctctttgacgagaaggtcaaagatatggtagacaacctccagtag

SEQ ID NO: 545 - DNA, 1122 bp, Saccharomyces pastorianus
atgggctacattgtcacggggtatccaagtcggcatgacaagagaaagaaacatatacttcccttgcaccagtttgcagcgtctccgttgaacttacaacgatatttgcatctatttcaggctccagtattctccaagagatcaaggtcagatgaaagcaatcataccaaagctcaagtgaagaaacttcgacatcatcggaagcttaccttgcaagacatgccggtagagatcatccaacacatttttgtttttacaaaaggtgagcccgcaatgatcgccttgaacaagtttttttatgagtgtttgagaccttcattttcattgttgtctaaaatcatgtgggagaaatatctttttaatccacttgagtttggtgtagagaacatcaaaactgattcaggttgtgttgtaattcccactttatttgaacatgaaacatttttcagattactgctagatcatcaccatattctcttgcaaaatatttcccactttctcccaaagaaacacttccgggatatgcagaatggtgattttgatacttcaatagaactagatttatgttcgatgactaccgaagatgccgataaagaggatttcccgcgaaatttttacaacactatgcaaatttacctaactcacagagaatgcatacgatctatgggtaattattttattttaagaaatccatacgatgttatatcaccatttatagaatgggttttccaagctatcgaaatggaaggagaagaaataacctccgaatttactgtgaataacatgtttgaatcaatagatttgattctgtacgtttctggatctgcggggcaaaaattcacttccactgaacctcttttgactgtagtgtttttgttgtatttcactcacgtaaatttcctgcatacttcgaattttcatattttcttccaggatagatcaagactacaattcatggaagaattcatcttgaagtattattacgaaccatcattagtagagcacgaacttttatccgatgccaccgtttgggacctgctaagaagggtatctgatttaaagcttatcgatttagtggttcaatgtggcgggagacctcaatatggcgcgatgttttcatag

SEQ ID NO: 546 - DNA, 2571 bp, Saccharomyces pastorianus
  modified_base (1631)..(1696): a, c, g, t, unknown, or other
atgacatctgctttgagagttctggtatgcggagatcatccgaacctcatcctatacacctccagatttcaacacgccaagaacatagagttttaccttgtagacaactcagtgaatgcttcctacgaaattaattccctattttatgggacagaacggtttcagattcagaaccatttccaatccctttcggatttgatagacctaaaccgaaacggtggcttggtattcgatttggtcataatgagtgcgtcttcgttacaagaaattccgcaaacgttaagaaacttaaaaccaatgataaataacaccacaaagatattgtttgaaagcagtgggtttgtatatttggagccatttatcaaagcgtcagttgatctgccgctatcaaacatctttagcattttcactgattatgacgtcaggcgcttggataagaattcgtacaaacagtttgcgacttcaaattccaaatcattttctatttctattggccaaacaactgccatacaggaaagtagttattcaaaagatattattccaatcttaaatacgtttcaaaaattgtttcaaaaattgtttccaaaggacattgttaccctttatgattgttctcctttaaccttcctgaccaagcaatgggaactagccatacctcaaatatgtttcgacccattattgatcatattggaggagaaatcgccatcgaatttagataataatgtattggccaaacctctaatctctggcttattagacgaaacattatcgcttatccggaaaatgggtataaccttcaccaatccacactttcaaagcgagcagaccatactaaagtattggaaggaaaagtacgagggagtatctgacattcctacgtttttgtactatttcatccataaatcctcatctttgaatattgacctgctattactgcaaccgatattattggccgatgattttggtattaagactccatacttggaatgtttgtttacaatgatgtcccaataccaattgttgaacggaggtgattctgattggtttatcagaaaagatggtgacacaacacttacccatacaaatgattttcaaaacgacattgcattaaaggatggaaaaatcatgcagctacaaaatctagaaataaccctaagaagccaagttaagcaattgcaaaatcaagtggtgagcctaaaacaggaaatttctttaggcaaatcgagccacgaacaagaactggatattctgcaaaagagaatgcaatcaaaaacaaatgaattgcctgacggaaatctatcatgtgccaataccaacggtattaccagccctgaaaacatgaccaacagtgatgtgagctacgaaaagagcgaccatggtaacggtagtatcaatgatagcagaagacagtcttttttcaactcgacatctgacacaacattgtctagggatgaaacttcattgaaagaacgtgaattggaagtgcgaaagaaggaattagaacttcaagaacgcgagttagaattacaaaaaagagttcttcaacaacagcagcaatatcaacaaaggccacccaaacaggcttacaacggccctcctggaacaccaacagccaataacaacaataatannnnnnnnnnnnnnnnnnnnnnnnnnnnnnnnnnnnnnnnnnnnnnnnnnnnnnnnnnnnnnnnnngcaagggttataatccaagtagaaaatcgtcctacagtcaacctcaacacatggctatgatgagcggcagaagtttgcatggtccaaacgtctcaagccctagtcccgcgttttctgccaataattttgttgatccaatatttcctgggacatcatatgctggcaataatagcaggttcagccaacaagcgccatcacagcaatatatgcaccctgttaaacctacaagtaggaagaatagaaatagcgttatgccaaatataggatatgttccagggatagccaacaatgaatatggtaggaagtttaatgggaacgccaatgccgttaatggtactcaaagtcgcttaaattccctttctaaccaaagcacatttagatcacaacaagggcttcctacaccacagcaaaaacctttttcgaacaatggcagcaataatataagggcgaatcgagtatcatccgcgaactacaataatttgaatcaaaaaccagggtttgttaattctgtttcaagtccaaatctaaacaactttgagaacaacaacaatcaacaaaactttagaagtgtagattctgctccatgtgttaaccaactaaacaatggttctcaacaccaattacaaccacagcctcagttgagctctacaaatatacctcaaatcaatgtaacccaaccatcaccaatattgaataactttaccacaaataatgaccctgccccagtagcgaaattcgggatcccttctgaagctacggttacaagtacagctacaagcactaatataagtgcaatgacagacgaaaacagcaaagaggaagtcaaggaaaagaaaaagaagaaattcagcttcttcgggaagaagaaaaagtga

SEQ ID NO: 547 - DNA, 570 bp, Saccharomyces pastorianus
atggaggaccaagattcagcatttattaaacaagcgactaaagcaatcgtggatatatcgctagatataaataatatagatcctataataaaagaattactgcaaagggtaaagaatacacaaaacacatcacagcatagaaagaggccactcgcgtcaacagaaaatggtattggtactcataatgggatcgcgaaagtcaaaaaggaagatatagggcagggtttaactaaacccaacgaaagtaaagctcaagatcgtcgaaatagtaatggcgaaaaacaattcaaatgtgcaaaatgctccttagagttttcaaggtcatctgacttaaggaggcacgaaaagacacattttgccatattgcctaacatatgcccccagtgtggcaaaggtttcgcgagaaaggatgcattaaagagacattatgatacgttgacatgcagaagaaacagaagtaaactactaagtgcaggtggtgaaggtattaatgaattattgaaaaaggtcaagcagtctaatattgctagtcgtgaggaaaacaacaaaaataatggttggaaagggtaa

SEQ ID NO: 548 - DNA, 1266 bp, Saccharomyces pastorianus
atgtcagaattattggatagttttgaaaccgaattttccaaattctacactgacagcagcctagaggagacgaatcttcacaaatgtattgagcatactcatgaattcaagaaccaactaaagaagctgaaagcgcacttaaataagcatatacaagaatcagagccagagacttacaataatttggatgataaggaaaagcaaaagtttaggaggaaaagggaactaatcatcgaaaaactgaataaatcacaaagacagtgggatcactcagtaaaaaagcaaataaagcatgtttcccagcaatcaaaccgttttaacaaaaccactttgaacaaactgaaagaatttgatatagacagtgtatatatcaacaaattgcccaaaggaacaatgaataatgttgacgaggctatcggttaccatgtattaagatatagcatagataacatgccgctagaaaacaaggatgatgcattcaagtacttgaaagatgtatatggaattactaataaagaatccaccgagttcattgatatgggccagatcgtacatgatttgaaaaagggtgatacagaaagttgtttaaagtggtgttcccaggaaatggacagtttgtcatccaatcatgccgctttgtcatcattgaagtttgagctgtatactttgtcagcaatgcaatcagtgatgcgtgggaatcctgtggaagtttatcatcaaatgacgcagcaagctcctttggattgcttcaaacacagagagaaagaattgataaggaatgttgtgccattgctaactaaatcgctcataggacaacccgttgaaggaatcgattctaaggtagacgaagagttaaaaaaatgtgtgtccttattcattaaagaatattgctccgcaaagcacattttcttcaactctcctttatttttgatcgtcctaagcgggctgatttctttccaatttttcatcaagtataagactatcagagagctagcgcatgtggattggactactaaagatgagttaccgtttgatgttaaattgccagattttttaactcatttccatccgatttttatttgtccagtactaaaagaggaaacgactacagaaaaccccccttactcattggcatgtcaccacgtcatttctaaaaaggcattagacagattgtcaaagaacggaaccatcactttcaagtgcccatactgtccagtgaacacctcaatgagtagtacccagaaagtccgctttgtcatgctctaa

SEQ ID NO: 549 - DNA, 2436 bp, Saccharomyces pastorianus
atgttaaggcacataagacaagtacccatacaacaacacttacaaaaaacacaactattgagacagaattttccacggatctatgttcctctacagctacaaaggactatatgtagtttgaatgcaaggactcaaatagctaataaatcttctctagaattaagaacaaatccattgaacggagctgctatttcggcatttccgttagggcacctccaaagtgtgccagttttcagaagaacatacgtccaaatgagaatggatccaaaccagcagccagagaaaccagctttagaacaatatggtacgaatttaacgaagttggcacgagatggtaaactagatccagttattgggagagatgaggaaattgcaagagctattcaaattttatcgagaaggacgaaaaataatccatgcttgatcggtagagctggtgtaggtaaaactgccttgattgacgggttagctcaaagaattgtagcaggggaggttcccgattcattgaaggataaggatctggtgactttggatttggggtctttgattgctggtgctaagtatagaggtgagtttgaagagcgtttaaagaaggttttggaggaaatcgacaaagctaatggcaaagttattgtttttatcgatgaagtccatatgttactaggcttaggtaagactgatggtagtatggatgcttccaatattctaaaaccgaaattagctcgtgggctacgttgtatttcggcaacaactttggatgaatacaaaattatcgaaaaagatcccgctctatcaagaagatttcagcctattttactaaatgaaccaagtgtctcagatacaatttctattttgagagggttgaaagagagatatgaagtccatcatggtgtcaggatcactgatactgcattggtttccgctgctgttctttcaaatcgttacataacagataggtttctacctgataaagccatcgaccttgtcgatgaagcctgcgctgttctacgtctacagcatgaatccaaaccggatgaaatacagaagctggatcgtgctataatgaaaattcaaatagagttagaatcattaaagaaagagactgatcccctttctgtagaaagaagagaagcactggaaaaggatttagacctgaaaaacgaggaactaagcagattaactaaaatctgggatgccgaaagagcggaaattgaatctatcaaaaacgccaaggcaaatttggaacaggcaagaattgaactggaaaaatgccaaagagaaggtgactataccaaagcatctgagttgcgttattcgaggatccctgatctagaaaggaaagtggccttgagcaaagaaagtaaagacggagataaagtaaatctgttgcatgattcagttacttctgacgatatttcgaaggttgttgctaaaatgaccggtattcccacagagactgtgatgaaaggtgacaaggaccgcttattatacatggaaaactctttgaaagggagggtggttggtcaagatgaggccatagctgctatctcggatgctgtccgtctacaaagggctggattgactagtgaaaagagaccaattgctagtttcatgtttttaggccccactggtacaggtaaaacagaattgacgaaagctttagcagaatttttgtttgacgatgaatcgaatgtgattcgttttgatatgtcagaattccaagaaaagcataccgtctctcgtttaatcggtgctcccccaggttatgttttgagtgaatctggtggtcaattaactgaagctgtcagaaggaagccttattcagttgttttattcgacgagtttgaaaaagcgcaccctgatgtctccaaattgttgttgcaagtattagatgaaggtaaattgactgattctttagggcatcatgttgatttccgtaatacaatcattgtaatgacttcgaatatcggacaagacattttactaaatgacaaacatttaggcgatgatggtaagattgataccccaactaaggagaaagtgattgaagcgatgaaaagatcttatccaccagaatttatcaatcgtattgacgaaattctagttttcaacaggttatccaagaaggtgttaaggtctattgtagatattagaattgaagaaattcaggaccggttggctgaaaagagaatgaagattgatttaaccaatgaagcaaaggactggctaactgacaaaggatatgatccgatctatggtgcaagaccactgaatagattgattcatagacagattttgaattcaatggcaaccttcttattaaagggccaaatcagaaatggtgagaccgtaaaagttgcagtagaaaagggtaaacttgtggtgaagccaaaccatgaagaaggtgaagcgattgaagaggaagccgaaaaataa

SEQ ID NO: 550 - DNA, 513 bp, Saccharomyces pastorianus
atgagttcaagttcatacagagattcatttttccaataccggcatttatcagcaccacaccacatcttatatgcagaatggaaccaggatatactagcacttccagacgaaatcggaaatgttgctatggccatggaggataacgctcgcaatgatgtgggggaaggaagggctactcaaggtggggaaagaaactctaacgtacacgaagggagtcaaaataaaacattgatgacaaacgagcaaaacagtaaccgttattggaactcatttcatgacgaagacgattggaatctctttaacggtatggagctcgaaagcaatggggttgtaacgtttgccgggcgcgcgtttgatcattctgtaaacggaggagtcaattctgggaacgacagtggcaaggagccaagaaaagaaacgataacgggttctattttcgatgggcgcgttacacagttggcatatgcgagaaataacggttggcaagagctagcgctgccacaatcacgatga

SEQ ID NO: 551 - DNA, 1692 bp, Saccharomyces pastorianus
atgcttctggctttgtattctctattggcatttctagttgcatccctgggcaaagtcgcccgagggattgatatctcaggcagcggagaatccttatcttccttggaactaaatgttcttcaaaacaaattcgcatcctactacacaaacaatagtattagtgtaaaaggtatcacaatcggtggctggttggttacagagccttacatcacgccatcgttgtaccgtaatgcaaccctactggcaaaacaacaaaactcctcccgaaatatctccataatcgatgaatttactctttgtaagaccttaggttataatacttctacaaccttgttagacggtcattttaaaacatggataacagaggatgatttcaaacaaattcaagccaacggttttaatttagttagaatccctattggatattgggcatggaaacaaaacgctgccgaaaacctttacgttgataacataacctacaaggatccgtatataagtgatggattacagctcaaatatttaaatcaagctctagagtgggcacaaaagtacgagctaaacgtttggatagatttacatggtgttcccggatcacaaaatgggttcgacaactcagggcagagaatactttatggtgatttgggctggttaagatcaaacgatactcgaaaactaactctagcagtttggaagaaaatgtttgaaactttcttaaatggtggtgacaaaagccccgtggtgggtcttgaaatcgtcaatgagccgctcggtggtaagattgatatgtcaaatataacacagatgtactatgaagcatttgacttattcaaggaaaaccaagattcgggtgacaacacaacttttgttatccatgatgcttttcaaggcatcggcaattggaatttagaactgaatccgaattaccgcaatgtttcagaccactatttcaatttgactaaagcgaattatagctctcaagatattctagtcgaccatcatcattacgaggtctttacagattaccagctggccgaaactcaattttcacgtatcgaaaacattataaattatgggaattccatacacaaagagcttccttaccatcctgcagtagtcggggaatggtcgggtgccattaccgattgcgccacctggttgaatggtgtgggcgtgggtgcacgatatgatggctcctattataatacgacactgttcaccaccgacagtaaaccagctggtacgtgtgcctcacaaaaacccttaagcgattggacagaagattaccgtaatcgtgtcaggcaattcatcgaagcacaattggccacctattcaacaaagacgactggatggatattttggaattggaaaacagaagatgctgtggaatgggattatttgaagttaaaagacgcagaactgttcccttcgccctttgataattatacatactttaaaacagatggttccatgaaggaaggtttttcatcctctttatctacacaagcattcccaataagtacaacttccatcccattctctactacaaccacctccaggaaaagtaaaaatttcgcaagttctactaagctgaaagcgagaacgtcactatcaattgatagtatgagttctatatggaaagaatgtatatgcatatccatcgtcgcaattattaccttctgtgctattttgtga

SEQ ID NO: 552 - DNA, 2289 bp, Saccharomyces pastorianus
atgacaaacgagtcattgactacgcctctggcctctactttggtggataaagggcaggctaccgatcccaatgaagactcgcaagaggatattagcctgggcggttctaatggcgctgcctcgttgtcttctttaaaggctataagatccgaaaatgaagatgcaaacgaaaatggacaaacagatcataatgatattgaagaggatccgttattaactcggtaccatactgcctgccaaaagggcgacctagccacggtgaaggaaatgatacacggcaagttactagaggttaacaaggatggagattctgttgaacacattactggtctacattgggcaagtatcaataacagactttccgtggttgattttctcgtttcgcaaggcgctgatgtcaattcaaaggctggtgccctacacgccacaccattacactgggctgccagatatggttatgtttacattgtggattttctgctcaagcacggagcagatcctaccatgacagatgaccagggtttcaatcttttacacttgtccgtcaacagctccaacataatgctagttctttatgtcctgttcaatgttgttagcaagggccttttggatgtagactgccaagatccaaagggtaggacgtcattattatgggctgcttaccagggtgattccttgactgtagcaatgctgttaaaattcggtgccaatataaagatcgcggacacggaagggtttaccccgttacactggggtacagtaaagggtcagccacatgtactcaagtacctgattcaggatggtgcagatttctttcaaaaaacagacgctggaaaagattgcttcgccattgcgcaagaaatgaacactgtatactcgctgagagaggcattaatccactctggatttaacaacgacggttatcccatcaagaaatggttcaagaaaagccaacacgccaagctagttacattcttgactccatttatatttctggggcttgcatttgctcttttttcacacgttaacccattgtttgctattattgtactttttttgttgacccttgcaaccaacaaatgtctgaacaaatttgttctgccgtcttatggaagaatgggcatttacaatgctactttactaaggtcacctttgttctcaggagtgttttttggcagtttactttgggtaaccattgtttggatttgcaaagtcatgccctggacatttgccgatgaaacgtatactaacatactattgctgatagtacttttgcttgtattttatctttttggccagcttgttacctcggatccgggctgtgttccagaagaaactgaccatgaaaacgttcggcaaacaatttccgatttgcttgaaatcggtaaatttgatacgaagaatttctgcattgaaacctgggcaagaaagccgctacggagtagattttcgtccctaaataatgctgtggtggcaagatttgatcattattgcccttggatcttcaatgacgtcgggcttaagaatcacaaaggatttatattttttattacgttaatggaatgtggcattttaactttttttgtgctttgcttggaatactttgatgagcttgaagattcctatgaggatagagcccaggaacagggcaaatgttttattttaggccactccgacctctgctcaggactaaggtatgatagatttgtctttttagtactcttgtgggccttgttgcaatctgtttgggttgcgagcttgatatttgtccaaacctttcaaatatgtaaaggaatgacaaactcggaatttaacgttctaatgaaagaaaataaagctaatggtgctgacggtatatcttttaatgagaacttcaatactacaccagaaggatttgctccttcaattgagttggatgaagataataatgatgcaatactggctcccgttccaggttcgacattgaggaagccacgaacttgttttggtgtttgtttcacagtaactggtatggaccaatggttcgcagttataaaggagactattggtatcaaagataatagcgggcataacatatattccattacatcgaaaattccaacaaactatggttggaggaaaaacgtcaaggatttctggcttacaagcgatgtaaacgcgcctttatggagaagaattctgtattctcccacaagttctaaagccttactcaacgggacagaagtcgactacttcaagctttacaagttgccagtaaaggaatcagagcaaggaagtgatatggtatga

SEQ ID NO: 553 - DNA, 1014 bp, Saccharomyces pastorianus
atggacaacgacactaaggtagaaaatgaagcacctgtgccactatcacagctgaaatttccgtttgccgatgctccaagtatagtacaagcgcaccaaaaggatgatcagattcaaaccctgttggtcctaaagattactgaattatgcaaactgataaaaaaccaattgtttgccaattcatatcctagagaactttccatttttgccaagctaatatatttactttttactacgggaaggcgtggtagaacattgggcgaggaatatgttgacttgatatataccaataagcgtggtaccaaactagcgggccgatttagaatgctggcatttgttttctcctattctttatgtccatatttgatttccaaattatacaagaaaattgcgaacagtaaaagggaaaatgaaaccacaggtgatgataatgtcaccgggttctgcgagagccttttggatttcgtgttagacttgcatatgaccctattttatttcaagggaactttttataacgtttttaaaaggatgtttggcatgagatatgccttcaagcatatcatgtcgaagaacgaagccaaatttagaaaagaagggtctaggacatacaaggtgctgggttatattttattgactcaaaatattttgaagtggtatccagttctaagctctaccttagggtcgtggatttctgaaaagaaaggtgccccaggttcgaatgtaaggacatctcttgatttacagggaacccttaaaggtggttctatagaaggaataccgaaagaatttcagttggctcacatacgtttgtcagacaaagatcaactgccctatatcgcagaagcttcgagaaaatgcattctttgtctcatggacatgactgatcctagctgcacaccctgtgggcatctgttctgctgggactgtctgatgagttggtgtaaagagaggcccgaatgtcctttatgtagacagcaatgtcaaacgcaagaaattttggtcttacgacaatag

SEQ ID NO: 554 - DNA, 1932 bp, Saccharomyces pastorianus
atgagtgaacccactaaggagaatgttgcttcaaaacgtaactttcgccgtactcaagggccccaaaacaataccaagcctagtaacgataagaagaacccaagaagaaagcaaaagagaaataacgtacctggtgcacccagtctcgacacctccaatactgaggacgattctgatgaagagaatgagttatgtgtaatttgtgcgcgtaagttattatatgtttctttgacaccttgtcatcataaaacatgtcatatctgtgctttcagacaacgagctttgtatgaaaagaggagttgtttaatttgtagaacagagaatgaagaagtgacgttcactgaccaaatagatgaagaaatctcagatatacaaaatttttacgaaaagaatgaaaaatatggaataaagttcgctagtgaagaggtcgccacggcaacaatgaatcttctaaagtttttttgtccgttgtcaaaggacgaagaagctgtagattttggtagtttcaagaaatacaatgaacatttgaaatctgaacacagtagaatgatttgtttgatatgtgcgacccacaagcacgccttccctgcagagctcgaaatctttgctcaaaaccaattacgtaaccatcagtctaaaggtaattcagaagggttcaaaggacatcctatgtgtgccttctgttctggtaaaagattttactcagatgatgaattatacgtccatatgagaaatcaacatgaaaagtgccatatatgtgatagaatcaaccccacttccccccaatacttcaaagattatgaccagttattcgaccatttcagacattcgcattacgtctgtaccgttcaatcctgcctagataacaaatttgttgtcttcaaggacgagttggaattacaagcgcatattttgcaagagcacggtaatatcttaaagggtaaaccaaagtttttccagtcagagctttccacttttatttcagcaccatccagggtagttagagaaagagatgcttacgaccttccatctatgtcttcgctgccgggttctgcgtccagttcaagaaccaatgtgagagctgcaagctctcctgaagaaagtagattaagattggccgagagggccaagtactatttagaaaactccaaagaagattttgacaagtttacttcatataatgagaattatgctaaaggttacttaagtgcggaaaaattgttggaatcgtataagctgttgttcacgaaaccaaatgcagatgtttatttgttggcgcataacctggctgagacatttcctagaaattccgccaaatacaacaatttgaatgctatatatgaacaacgagagcaagctcttgagcgacagacctccttgccatccttatcgagtgacccctcactttcaatgtcaatggccaggggtcattggggtgggactaatgatggtggtagcggaggggcaccatcaggtgttagaaatatcaaaaatctaccaactttgaaaagccctgcagcatcgtatgatccatttgcaacgactataaaaaagcaggcttcaaaaggcgtgaaaagctccaaaagaagtacttctcaaccaattagttatcgggctacttccaataacgcagttgctttttctccaacgtatttggagagcaaaaaaaactcgtcatctgctgcttcgttaaataatagcaaggacaagttgaagactttaaacttgcctcaattacctccaccaaagccaaaagtacaaattcctggtttgaatagacctcaggctgcagatccaaaacagtggggtaaaaagtcgagcatagagaatgccaatgtccacgatgatttgaaagaactgaatataagcagtaacggaggaaataagaagaaaagcaagcaaaaacaactattattccacattggtatataa

SEQ ID NO: 555 - DNA, 1140 bp, Saccharomyces pastorianus
atgctgaataggcaggcgattctgaggttagcaagcaagaggtggacaagcacagtgcaacgtgcagattataaattgaattctgaagcacttcctaaaaatgcaacagtatttagtatgattcagccaacaggttgttttcaccttggtaattatctaggggctactcgtgcctggacagatctgtgtgaactgaagaaatctggccaagaactgatatttggtgttgcagatttacatgcgattactgttccaaagccggatgccaaaatgtttcgaaaatttcgtcacgaggcagttgcaagcatattggctgttggtgtggatcctgagaaggcatcgattatttaccaatctgctatccctcaacacagtgagttgcactggttgctgtctactcttgcatcgatgggattccttaaccgcatgacacaatggaaatcgaaatcaaacatcaaacaatcagaaaataaagagtaccagattgatgataccgaagtggggaaagttaaactgggcctattttcgtaccctgtcttacaggccgcagatattcttctttataaatctacgcatgttccggttggcgatgatcaatctcaacacttggaactaacaaggcaccttgctgacaaattcaattcgacatataagactgatttctttcccaagcctatcacgatgctggcgcaaaccaaaaaagttttgagcttaagctctccggaaaagaaaatgtccaagagtgatccaaaccacgattcagtgatctttttaaatgacgagcccaagactattcagaaaaagattagaagagccttaacagattccatttcggacaggttttattatgaccccgtagaacggccaggtgtatccaatctaatcaatatcgtcagtggcattcaaagaaggtcgatcggtgacgtcgtggaagatgtgtcccggttcaacaactacaaggactttaaagactttgtatctgaagttgtaattgaagaattaagagagccaagaactgaatttgaaaaatacggcaacgagccagattatttacacagtgtcgttgaatctggcatgcgcaaagctcaggaaaaggcggcaaagaatctaagtaacattcatagaataatggggttctag

SEQ ID NO: 556 - DNA, 717 bp, Saccharomyces pastorianus
atgattttttttctcagaaggctcataggatcatctgtaatcgatcaagaatccaagagaacatcggggaaggaggaagttatgtctaacagtcgattagcgcttgttattatcaaccatgcctttgataaggtcgtctcactgacgtgccattgcgggattttatcagaaataagatcgggactgatgtttctgttcagcatctttcagttgctttgctccttgggtgtgatcatattactattgcccattatcatagtggacgccattgatctgtttctttatatatgccggttaatcgattacggctgtaaactggtccattataagagatcatccctagtgtcgtcgccatcgccgccgcaaacagagggtactgctttagacgcggacacaagcactaaagaggagataatcatcgatgaggaaataataaacatgctgaacgaatcctccgaatcattgattaatcatatgacaactggtttgaagtatgagagtcacacggggaacgccaccaaaaatgactgtctcgattcttcgagttcaatgacctatgtagatcgaaacagggattttgacgaagaaaagcggagttactattacgaggaagaagacgatgattttctatctaacacgaattttgataagatatcattaatcgaaaggtcgttcacgagtcgtttcgaagtggcttgtgagcagaaggctgcttga

SEQ ID NO: 557 - DNA, 168 bp, Saccharomyces pastorianus
atggattcctccaagatcatcaacattatattatctcttttcttacctccagtcgctgtttttctagcccgtggatggggtactgactgtatagtggacattattttgaccattttggcgtggttcccaggtatgctatatgccttgtacattgtcctacaagattaa

SEQ ID NO: 558 - DNA, 1302 bp, Saccharomyces pastorianus
atgtttgtctctccaccaccagcaacttcaaaaaaccaagttttacagcggctctcacacgactccgctaatcacagccgcgggtttgcaaatccgttgcaaagcattccagaaaacactgcaaataatagcgacaacgcatcatttcaaagcttaccacaatcagtgagtagtgtacaatccacaccctcaccaagaagagaaaatttcgtgaacgcccctctcgaatatactgatagagccagagatgaaatcaagaaaagattattagcttcctcgcccaacagaaagtcacaccattcaagcgggatgcattcggcaagtagaagatccagcacagctgatagtagaagtttactttcagatactgcctcatcttatcagtcaagtatattttcaacgccttcgacagtgcacacgcaactgactaatgaaagcgcattttctgacttttcaaatcacaaactaataacaaggatcagtttagatgacgccttaccaaagacattctacgacatgtattcacctgaaattttactagcagatccatctaacgttctttgcaacggacgtcccaagtttaccaaaagagaattattggattgggacttaaacgatataaggtcattattaatagtcgagagactaagacctgaatggggtaaccaattaccggaggtaataacgatgggtaataatatgccccagttcagattaaaattattgccattgtattctagcgatgaaactataattgccacattggtcaattcggatctatacatggaagccaatctggactatgaattcaaattgactagtgccaaatatacagtagctaccgctaggaaaaggcatgaacaaataaccggcagaaatgaaaccataatgaatctgtccaagccagaatggagaaacattattgaaaactatcttttgaacatagcagtggaggcacaatgtaggtttgatttcaagcaaagatgctcagaatataagaaatggaagttacaacagtccaacttgaagagacctgacatgccacctccaagtctaataccgcgtaggaacagctcagaaacaaaatcgctgttaaagaaggcactattaaagaacattcaattgaaaaatcccaataataacctcgatgaattgatgatgagggcgggcaccccttcaaaccaacaggggaaaaacaaagtaagcttgaccaaagaggaaaaggctacaatatggtcgcagtgccaggcgcaagtttaccaaagattaggattagattggcaaccggattcagtatcctaa

SEQ ID NO: 559 - DNA, 1053 bp, Saccharomyces pastorianus
atgacaatctccaaaactggaggtgaggaacgactaataattctgccggatgaatgcgatgcttcggaaatcataaacacatttacgctgccgccttgttctaacattgcatcgaagccactgattgaactatttgagaatactgatggtagactctaccaggtaaaatatttccagtttggtaaaggaccatcttattcacacgaggaagacttggcaaatgacaagtatcattatacaaaggaagatcacccgattaaatcaacctttatcatgaataattccaatcctgccgatggtcgcattttgaattcaagcaaactttacttttgtacgttacacgatgttgctttcagtcttattggatttcattatagagccagtgttgcggaggatgaacaagactacatcaagcccagcgacactggagagagccagactgctaacaggaggaaagaccatgagaggtttcttacaattcgcgactatcatgacttgctaacagatagtcattgcaaaaactggagccatatttctctacgctgtcttgaaagtgggcttacaaagatatccgaaaccatcgaagaagctggtgaaatatattacaagattacgcctgcactaataacgagatatttggtaggtaaagtattgaaaatcacaaagaattttcctccaagctttcccatacttagacatgcaccagtagatatagtacagtgctacaaggtagttatggctactaatcttttggtttctttgatcccgaaggcggcttaccgtaatttaatcgaattttcaccaagttcgacggatgataacctcaatttggaaataaaatctagcttcacaaacctcgaaaactatcaaaccaccgacgagttgaaaaacgctgaaaaagaattactaatgaaaaacgctatgaatgttggcataggttcaaatggcggttctgtgtctgtaaagaaagttgtgaaaaaagccgttgtcagcaaaaaaccaagagtcgctataggaaaaggcgctatcgatgggttctttaaacgtaagtag

SEQ ID NO: 560 - DNA, 2631 bp, Saccharomyces pastorianus
atgtcaaacttctttcgggacagttcaatgggatttaagcctcgaccaaacatatttgctaaactgagagtcagggattcagaaccggaaggtcctctaaacaacgacatcgacacttccgtcgattgtctcgaggctggttcttccattgaaggagatgatgcgttcaaaaaacccaataaaacttctaatgggagagaagtaactacgagtgcagagcatgttcaaagaaaccctagttattctagcgacgtggtcgatgcaagctctccgaagcgtcaaatggctatagatcgacacaataaatttttaaacaacagtggcggtacaaatgaaaatgataccgatgaagattttgaaattacagaagtaagggatgtgagtgaaggtgtggcaatggaaaccaaagaagatcatggtgatgtcaatgattccgagacaaccctaaaagataacaaagttcacgaatatgccataacaaatggcaagcccattctgcacacaccaattgatgcttccaatacatcttcgaatgatgttctcttagaagcatttacaaacactcaaagaatatgttctaatttgaagcaggaattacaaaatcagcaacaggataacgttaagttaaaaactcgattacaatcgtatgtttctgactcaggtaaaatcaacgacaaagtaggcaagtataaaaactggttagaaacccttcaggaaaacattacaaccttgactagccataaaaatagtcaagatactaaattaaaggatttaagacaaaaccaccaactgaatcagaggagaattaccgggtttaaaacaacaattgaaagcttgaatggaaaaataaatgaactaggtaaacataaaaaagatgctgatactgagctaatgaaaagaggtaaggaaatcgaatatctaaaaagagaattagacgattgttctggccaattgagtgaggaaaaaatcaaaaatagttcattggtacaggaaatagggaaaaatagagagcaattgaccaaaaaaatggaagaccttctttcagaagataaagcttatcatttactacaattcaccaagtttgaggagaaaatccgtaccatattcgaagagaaactacgggaacacttccgtggtgcaatagattctttcagcttagaactgaagaacaatggcgtagagttaaatgatcatacagagactatcttaaagcaacaatgtgaacagtttaaagaaaatctacaaaacaaaatgtctttgagtgagaacaatacagcaaaatttttaacagaactgggcataaagcaaaatgaacttgtgataaaagtacaagacgaacttttgacatcatcaaagaatactcaaacagctctactagctgaaatgaaaagtacaaaacaagatatacttgatgattcatcgcaagctgctaagaactcactagtcttggccgatttgctgaaagaatacaaagcagaaatagttcagtcaaacgagtatgaagaaaggataaagcaactggaaagtgaaaggtcgactttatcttcacaaaagaatcaaattattagctcccttggtactaaagaagcacagtatgaagatctcgtcaaaaaattagaggcaaagaacatagagatttcacaaatttttggtaaagaacaaagtttaattaaaaaaaacgagagcctttctaatgaactaaagaaagctcaggaccagcttgacaaaataagcagtctaaacaccactacaaaatcaaattacgagaataaaatttcctcacaaaatgaaattgttaaggcattaacttccgaaaatgacactttgaaacaaagaatccaacagctcgtagaatttaaggagaatgcgcaaaaggatcattcaaaaaaattagaagcattccaaaggaacagcgagcaactacagaagctaaatgtcgaggtggtgcagttaaaagcccatgagttagagcttgaagagcaatgtcggtacctaaaaggctgcttagataagaaggaaatcggagtcgaagaatcactgagcgatgtaaaagttttaaagcagcaattaatagtcttgaaatcggaaaagcaagacatcactgccgaaaagttagagttgcaagataatctagaaaacttagaagaggttaccaaaaatttacagcagaaggtacaattgcaaagaagggaactagaagagaaaattaaacacttggagcagatcaaaaaccacaaaagagctgaattcaaacaaagaggtatccaaagttctacgaaaccatcgggctcacctaaaaaaaatgatacaagatcggaatttattcctaactcttcgaaaattgattcctcatctaacaggccgcctagggtcgatcatacagccaaatcaaccaaaacggaaccatctaaagaaacatctaaatacaacgatgagtttgatctttcttcgtcttccaatgatgacttagagcttaccaatccctctcccattcaaatcaagccagtgagaggtaaaattaaaaaaggttcaaatttcatgaaacctccaatctcttcaagaaaaaaattgttactggttgaagacgaagaccaatcattaaagatgagcaaaaagagaagaaaaaaataa

SEQ ID NO: 561 - DNA, 879 bp, Saccharomyces pastorianus
atggtactaagcaagcaagaacttaaagaggtcgaaaacacattcattggtttactcaaaaatgaaattgggccgttattaaagtcacatgcgggaacaaatttgcagtcctatgatgataaatccaacggtgtggatttagttacagctttggacaaaaaaatcgaatccataatcaaatcggaattagctagtaaatatcccaagttcaaattcatcggcgaagaaacttatgtagaaggagttactaaaataactaatgacccaacatttattgtggacccaatcgatggcactactaattttatccatggctatccttatagttgtacttcgctgggtctggctgaaatgggagaaccggtagttggcgcagtttttaatccacatttaaatcaacttttccatgcctcgaaaggcaatggagctttcttaaacggtcaagagataaaattaacagaaagaccgttgatactacagaaatcattggtcgcattagaaggaggctcagaaaggactgaaagttcgcaagggaactttgataaaaaaatggggacctacaaaaatttgctcagtgagtcgggcgcctttgttcacgggttcagaagtgtgggaagtgctgccatgaacatatgctatgtcgctaacggtatgctcgatgcttactgggaaggtggctgctgggcgtgggatgtctgtgctgcttggtgcatcctgagagagactggtggaataatgattggtgggaaccctggagaatggaatattccgttagacagaagatgctatttcgccatcagaagtggatgtgaacctaaagatcaaaaacaattcgcagaggcattttggtctcatgttgcaggtaaattggagtactaa

SEQ ID NO: 562 - DNA, 936 bp, Saccharomyces pastorianus
atgagctccacagataacgacagcgattcggatttgacagaggatttagccgcactcaagaccattaaagagaatcctgttgccagaaaggtggtaagatatattttatcgaggggagaatctcagaactctataataacgagaaccaagttacagtctgttatacacgatgctgctcaggaggaaaatgtgactaaactttcgtttagcaaaatgtttatggatataaatacaatactagataacatatatggcttccagctaacagggctgccatcaaagaatagcatcagcactggtggtaacaacaataacactactgctactaataataacaatactagcgcaaataaactaatggatgagccgttgggacataggtctcagagatttattttgctaaacaacgctccatatttaaaaagttttgatgattttaaacttttacagagcattcgcacttacgaggagctggtagtcaacggagagtatgttggtgatgatatagggttggaaagctccaatactttagagagcaagctgagcactgatcaggatcttgcttacaaggggatcctaaccgttattctatgcattatttttttctccaaaaataatatcttgcaccaggagttgatcaaaattttagagacatttggtattcccagtgatggctcaaagattcctatactgaacagtactatcgatgatctgataaaggccctggaaaggcgcgaatatataattaagctggaagagaaatcggacactgatggagaggtaatatcgtacagaataggcaggagaactcaagctgaattcgggttgggatctcttgaaatactagttcaagaaatcatgggccttgaagaggaacaggctagaagcttacgtgatgatatagtgaagagtgtcggtgattcctattctatatag

SEQ ID NO: 563 - DNA, 1251 bp, Saccharomyces pastorianus
atgcccttttcgtctgaacaatttaccaccaagttaaatacgttggaagactctcaagagtctattgcaagtgcttcgaaatggttgcttttgcagtacagagatgccccaaaggtagcagaaacgtggaaggactacatgttgcggtctagtgtaaatacaagaaggaaactactgggtctttatttaatgaaccatgttgttcaacaggctaaaggccaaaaaattattcagtttcaagactcctttgggaaagtggcagctgaggtattaggcaggattaatcaagaattccctcgggacctgagaaagaagttgtcgagagttgttaacattttgaaagaaagaaacatcttctctaaacaggttgtcattgacatagacaagaacctcaaaactgagacctcacctgtcgaagcactagccctaccccaaaaattgaaggattttgctcgggactatgaaaaattagctaaattgcatcataacgttcgtgctatgaaaattaggtttgacaagtcagcagatgaactggatccatcaagttcggtttatggggaaaattttaagaccattagtaaaattgggaacatggccaaagatataataagcgagtcaattcgtaaaagagaaagcggtattcagaagctacaaagtgcactagacgacgaaaaaaaccgttttgacgaggaacagagcatgctgagtgaaatagagtttgttttatctgcgaaggatccatctaggttgaaacagaataccgacgaagataacattattcctacgtatgaagtcggtgacggagacgatgatgatgatgatgacgatgatgacgatgatgatgatgataaaaatgacgatgacgacgatgataaacatgatgacgatgaatccaacggcaacagttatggacttgatataatggaggacaagaaggaaattatggataaaatgaataatgatcatataaacttcatggaagatcctggtgacgattctcattctgagctaaaacgaacacatgacatgacaggccatgatgatcataatgaggtaccagagaaaagaatgcaccttgattcaaaaacatatggggagagtatttctaacgataatggccattatgagctagacgttgacgaccatgatggtgcagaggttgaggatgatgaagatgcgaatgaaccaaatgacaactctgtaggggtttcctctagtatacaagatttgttgagtaaactagcgaattaa

SEQ ID NO: 564 - DNA, 1866 bp, Saccharomyces pastorianus
atgtttgaccaattagcagtttttacacctcaaggccaggtactttaccaatataattgctcaggaaaacgtttttctgagtcacaaattaattcctttatatcgcaactgattacctctccagtaactaagaaagaaagtgttgcaaatgcaaatacgggcgggttcgatctcaacgttttaacagtcaacgatgaaattaagaattcaaattcattcaacgcaattttttacctaaacaagcagccagagatatattttgtagtaacttttgcggagcggactttggaactgaatcaagaagctcaacaaacgttagcactagtgttgaagctttggaattcacttcacttaagtgaatccatccagaagaacattaaaggccaaaatgaaaaaaatagacacaactatgtcgacgtcctccaagggcttgaagaagatttgaacaaattcgatcaatattttggggttaaatacgaagagtccataaaacaagagcaggttgattcaaatgagggaggcacgaatgaattggtatcacaatctggtaataaaaatacaaaaaagaaactaaaggacatcaaaagtaagaagcaaactttaggaaatgttggtagtgggagaaaatggggtcgtgatggtggaatgctggatgaaatgaaccacgcagacgctgctaagttagatttttcttcgtctaacagttacaatagcagccaagttgctcttgatgccactataaataaagattcatttggtaatagaacagaaggcggtgatttcctgatcaaagaaatcgatgaccttttatcttctcataaagacgaagttataagcgaaaatgaatcaaaaaataatggctatatgaacacagcttttggatttttgcaaaaacacgtcttaggtaataaaaccattaatgataatgatttgaaatctgtattagacaaattgaaacaacaattaataaccaaaaatgtggctccagaagcggcagattatttaacccaacaagtctctcgcgatctcgtaggctcaaaaactgccaattggaccagtgtcgaaatcacagctcgtgaatccttaacgaaagcattaactcagatattaacgcccggtgtgtctgtcgatcttttacgtgaaatacaaagcaaaagaagcgaagtagatgctgacggaaaatgtaatccatatgtattctccgtagtgggtgttaatggtgttggtaagtcaaccaacctttcgaaactagcgttctggctactgcaaaataacttcaaggtcctaattgttgcctgtgacacgttcagatctggtgcagtcgaacaacttagagttcacgttgaaaatttagcacaactcatggacgattcacatgtgcgtggttctaaaaacaaaaggggtaaaagtggcaatgattatgttgaattatttgaagctggttatggtggctctgacttagtgactaaaatcgctaaacaggccatcaaatatgcccacgatcaaagctttgatatagtgttaatggatactgcgggaagaagacataatgatcctacgttaatgtcgccattgaaatcgtttgctgaccaggctaaaccagataaaattattatggttggggaagctttagtaggtacagattccgtccaacaagccaagaatttcaacaatgcctttgggaaggggagaaaccttgattttttcatcatttccaagtgtgacacagttggtgaaatgttaggtactatggtgaatatggtttatgcaacaggaattcccatattgtttgttggggtgggacaaacttataccgacttgagaacattaagtgtaaaatgggccgttaacacccttatgtcttga

SEQ ID NO: 565 - DNA, 2031 bp, Saccharomyces pastorianus
atgagtaggaaaaactcgaaaaaactaaaagtgtattatttacctgtaaggttgacccaatttcaaaaagatttatcggaaatactcatatccctacatgctgaatcgttcaagtcaagtctagtagatgagcccccggcaaactccctgagtaggcttgatgggtcatctgccaagcctgaaacgcattcatatccacggctatcacaaagacaattgacctatatcttcgactctaacataagggccatcgccaatcatccttcgcttctcgtggaccactacatgcctcgacagcttttgagaatggaacctacggagagcttgattgctggcagccacaaatttcaagtccttaatcacctaatcaattcgataatctttagagatagaatacagacacccaataaaattataaaatgcgccatcatagcacatagcatcaaggaattagatttgttagaaggcctcgttttggggaaaaattttagaatcaagaggctatctggtacatcgctctacaacgagaaacataaattcgccactctaaccacgaccgataccgcgacaaataaagatgggaccccgaattctctaagtagcacaagttccaattcaaactcgacttcttatacgggttattcaaaagacgactacgactattcggtgaagagaaacttgaaaaaaaggaaactgaacactgacgattggttgttcttagcgactacaaaacatttaaagcatgaccaatatttattggccaactacgatctcgatatgattattagtttcgacccgatgctggaacttgaattgcccgctctacaactattgaagaacagcaccaataaaaatattccaatgataaagctactggtgcaaaattctccagatcattacctattagatccagaaatcaaaagttcgagttcgtccactgattcagtttatttgggcgataacgatcatctcgataatggcaaagaatatgaagaaattaaatcgtctttactctattttctgcaaacaaggaaggcaaaagttgataacttcaacgtcgattatgctgcgttggtaaaatgttgtttggaagggggagactgtaacgaattcttaccagctttgaatttggtcacgttggatgagacttccaaagacttcagcggttccgacttttggcaaccacaattaaccgaattaaattattttactacagaattgcctctttgggacagtccgttggacatcaagacttatcaaaccgaactaatgcatagagctgttattagattaaaagatattcaggatgaatttacaaaagataacgatctactaaatgaaaaacggtctaatgaaaatcaacggcaaaacaaactggatgatatcaaaaattctattcgagttacatttaagaacaagcaggaagtagaaaagtccatcaatgattctgaaaagagatatagacatgccatgaccgaatctaccaagctagatgacaaggtgaattatctgcttaaaaataaagcagaactggagaactttagtgaattgtgtcccggaaatagttcatctgaatatgatccggaaaaagaatctacattagcaaccaagttgagtcaatatgcagatgaggacgtaattatttccaataaattaaaagcactacaggaagccaatgcggaaaaattaaagaaaaatgatgaattacgtttccaatatcaaatagaatcttcaaaagctgcggaatcagctcaaactttgaaaacgttgaaagaatcactgggatctttagaaaatgaagtaaatggtcctttgacaaaagttcccgtagaaagctcaaagagggaacttgaaatgctgaaaaaagatttgcaatcgcttaaatcaaaaaacaaatttttgaaaaattacataaactcaatgaaccgacagtacgaccttaaaaacaaaagcaacgtccaagtagaaaaaaccgctacaactagtacacggttcagatcgacgaggtcaaatacacctaattacacatga

SEQ ID NO: 566 - DNA, 681 bp, Saccharomyces pastorianus
atgaaagtaaaccagtccatttcaaggtttcgtccggcgtcgtggttcgaaaagacaaaaataatcccgccccaagtgtacattttcaggaacttggaatatggacaagtgctgtattctcagttccccaatttttcgcagaaccagcttgacaagctgttcgtgaggccgaactggagcaacaggaaaccctcgataagaagggacatctggaaatgcatgtgtgtggtgaacctacaaaattaccagcagagcgtccaactgtaccaaaacctctgccgattgagatatctgcgcgacgtggcacagcacaaggacaacgacaagctcagaaagaaggactccaacgggcatgtctggtacagcggacaatataggcccacgttttgccaagaggccgtggcggacttgcgagagtcgttgttgaagatgttcgagggcagcgcacaagcggaaacgcaggctacgcccgccaagaaaccgtcgatatactgggaagacccgtggcggatgggcgacaaggaaaaatactggagctccggcgtgttcgacgctctggggctggaacacaaacttatcgagcgtgtgggaaacaccgcaagagaggagagcgtggtcctgaaagaactagccaagttggaatcgcagtctccggatcagacgaaagcacccccacaatag

SEQ ID NO: 567 - DNA, 639 bp, Saccharomyces pastorianus
atgtttaatagagtgtttactagatcatttgcatcaagcttaaaaaccgcggcttccaaagttgctgtccctccaccagtgagattattcggtgttgaaggcacttacgcaactgctttataccaggctgctgcgaagaattcatcgattgattctgccttccaatctttgcaaaaggttgaaagtacagtcaagaaggacccaaagttaacgcatttactacagaatcctgcattgtcgttgcatgatagaaatactgttattaatgccatcgtggacactcacaagaatttggacgggtacgtcgtcaacttgttaaaggttctttctgaaaacaacagattgagttgttttgaaaagatttcttcggactttggtattttaaacgatgctcacaacgggttgctcaaaggtactgtgacgagtgccgaacctttagatcctaaatctttcaagagaattgagaaggctttaagtgcatctaaattggtggggcaaggcaaatctttgaaattggaaaacgtggttaagcctggaatcaggggtggtttgattgtagaacttggtgacaagactgtcgacttaagtatctctacaaaaattcaaaaattgaataaagtcttagaggatagcatttag

SEQ ID NO: 568 - DNA, 1620 bp, Saccharomyces pastorianus
atggctaaatcgttggcggacaaaatttccgatattgccatcaaaccggttattaaggattatgatattgaagacgaagaaaatacatctctatttcaacacgatgaaaatggtgcagaaagtgatttgagcgacaatgaagatgttaactcaggacaggctaagaagtcccattacttagaagttgaaaaatctacgttgagagcagaaaagggcttggagttaaacgatctgaaatatacaggtgtgaaaggttctagacaggctttatatgatgaatcctcagagagcgaagatatggaaaaggacgaaaatgagagtggcgaagatggcgaagacgacgacgctctttcattcagaacagattcagaggacgaacaagcagaagatgcagaagatgaagaagaagagttggatgtggacgacgatgagatggaagaagccgcacagaaaagaagcgcactatccaaacttgttcagcaagaaaccaaacaggctatcaataaactgtcccaatccgttcagagggacgcaaccaaaggttattcgattctacaacaaacaaaattatttgataatatcattgacttaagaataaaattgcaaaaagccgtgataaccgcaaataagctacctctgacttcagagtcatggaaggaagctaaaatggacggttcaaaagaaacaaagcatttattaaaagaaaatgagaagctttttaataatctattcaaccagctagtaaatttcagaataaaattccagcttggtgaccatatcactcaaagcgatgaatcgaaaaagcacaaattatccaaaaaaagatccgttaaagagctttacaaagaaaccgatagtttagactcggaactaaaagaatatagaaacgctgtattgaacaaatggtccaccaaagtctcttctgcatcaggaaactcggctttgtcatcaagcaagtttaaagccattaaccaacctgcagatgtgcaagtcgagaaccaattatccgatatgtcccgtttgataaagagaacaaaactaaacaggagaaacataacacccatgtatttccaaaaagattggaccaatggtaaattaccagagctggcatctcaaaatgtagaagatggtgacgacattgacaacaattcagatgacgggctcgatattccaaaaaactatgacccaagaagaaaggataataactccattgataccagcgaaaacccgtacgttttcgatgatgaagacttctatcgtgtcttattaaacgatctgattgacaagaagatttccaacgcgcacaattctgatagtgcagctattacaatcactacggccaattctcgctcgaataacaagttgaagaaaaacatcgacacgaaggcttccaaaggtagaaaattgaactactctgttcaagatcctatagcaaattatgaagcacctatttcttcggggtacaaatggtcagatgatcaaatcgatgaattttttgcagggctaatgggccaaagagtgaactttaatgaggacgaagaggaggaccaacatgccggagaagacaacgatgcagaattagaggctgttaagaacgatgacatccagatttttggttag

SEQ ID NO: 569 - DNA, 4071 bp, Saccharomyces pastorianus
atgaatgtgtacgatgatgtcgtcgacgctactgttgtgtcgcattctataacagctcattttaccacatctgaatatgaggagctcttagttgtaaggacgaacattctttccgtgtacagacccactagagacggcaagttgtatttgacatatgagtttaagttccatggcttgatcactgatataggtgttgttccgcaacaggatagtctattaagttgcttgttattatgcacaggcgttgctaaaatctcgattttacagttcaacaccttgacaaactcaatcgatacactgagcctccattactacgaggacaagtttaaggacaaatcgttggttgaactggccaaaacatccacgctaagaatagaccctggaaatagctgtgcattgctatttaacaatgatattcttgcttttttacctttccaaaccaataaaaacgacgaggatgatgaagaagatgaagaaaacctggacgaagaagagctcgtccatagtacagacgagaaatcgcaaacattgagcgcctttaatagcagaaaaaaaattaagtcatacgaaacattcacagaggcaagtgtaatactaactgccaatgaattgtatgacggagctaaaaatattatagatatccagtttctgaacaattttaccaaacccacaatatcgatattatatcaaccaaagctcgcttgggcaggtaatagcatcctttcaaaactccccactcaatacgtcacactcacacttaatatccaatctgcaaagaaaagttctattattgaatcaacgacaatagcttttgtaaaaggattaccttgggacttgcatacaattgtgccggtttcgaatggtgctattatagtgggtgctaatgaactggcatttatagataacacaggagcattacaatccacgattctattgaattcatttgctgataaggatctacagaaaacgaaaatcatcgacaattcctctttagaaattttattcagagaaaaaggtacaacgtcaatttggatgccttcatcaaaaagtaaaaacggtgccaacaataacgacgaaaccctactgcttatggatatcaaatccaatatttattatatccaaatggaagctgaaggtagattactgattacgtttgacatctttaaactacctatcgtcaatgaccttttaaaagaaaactctaatccaagatccataacacgtttaaatgcgacgagttcaaataaaaatatggatcttttcattgggtttggttcaggaaatgctttagttcttagactgaataacttgaagtctacgattgaaacaagggaagagcacaaaacatcgttttcagatcaaaatactttgatggatgataacgacgaagatgacgaggagatggatgatttgtacgctgatgaggctccagaaaatggactaaccaacactggctccaaggacacagtagagaccgtccagccgtttgatatagaactactatcgtcattgaaaaacattggtccaatcacatctttgactgtggggaaagtatcttctattgatgatatagtaaaagggctaccgaatccaaataaaaacgaatattcgttggttgctacatctggaaacggctcaggttctcatttgaccgccatacagactagtgttcaaccagagatcgaattagcattaaagttcatcagtataacacagatctggaatctcaagatcaagggaagggataagtacctagtaacaactgattctaccaagtcgaggagtgatatatatgaaagtgacagaaatttcgaacttcacaagggaggtcgtttaagaagagatgctactacagtttacatttcaatgttcggtgaagacaaaagaataatacaagttaccaccaaccatctatatctatacgatacgcatttcagacgtcttactacaatcaagtttgattatgaagttattcatgtctcagtcatggatccatatattttgatcaccgtttcaagaggtgacataaaaatatttgaactagaaacaaaaaataaaagaaaattgttaaaaattgatttaccagaaattttaaaagagatggttatcacttctggtttgattttaaagagtaatatgtgcaacgaatttttgatcggattaagtaaatctcaagaagagcaattattgtttactttcgttactgcagataaccaaattatttttttcactaaagatcacaacgacagaattttccaattaaatggggtcgaccaattgaatgaatctctgtacatcagcacttacacactacttgatgagattgtgcccgatccttcgattaagcaagtaatgatcaataagctgggacacgataataaagaagaatatctggcaatactaacctttggaggagagatatatcagtatagaaaactgccgcagaaacgcagccggttttacagaaacgttacaagaaatgacttggccatcactggtgctcctgataatgcatacgctaagggggtcagttctattgaaaggattatgcattacttccctgactataatggctattcggtaatatttgtaaccggtagtgttccatatatattaataaaggaggatgattcgacacccaagattttcaagtttgcaaatatacctttagtctcagtcacaccttggaatgaacgttcggtcatgtgtgtcgatgatattaaaaatgctagagtctacactttaaccgttaacaatatgtactatggtaacaagttaccattaaaacagataaaaattagtaatgtacttgatgactacaaaactttacaaaaaattgtttatcatgaaaaggctcaattatatctcgtatcttattgcaagcggatcccttatgaggcattgggagaagacggggaaaaggttgtaggctatgatgaagaagcgccacacgcggaaggattccaaagcgggatactgcttattaatccgaaaagttggaaggtgattgatcaaatcgacttttcgaagaattctgtcgtcaatgagatgagatcatcaatgattcaaattaattcaaagactaaaaggaagagagaatatattatagctggtgttgcaaatgctactaccgaagacactccaccaactggcgctttccatatctatgatgttaccgaagttgttcctgaacccggaaaccctgatacaaattataagctcaaagaaatcttccaagaagaagtcagtggtatagtgtctactgtttgcgagattagtggaaggttcatgattagtcaaagccaaaaagttttagtaagagatattcaagaagacaattctgtcataccagtagcgtttttggatattccggtattcgtgacagactccaaaagcttcgggaatcttttgatcattggcgatgccatgcagggttttcaatttattggttttgacgcagaaccatatagaatgatttcattgggtagaagtatatcgaaatttcaaacaatgtcgctagagtttttggtgaacggaggggatatgtattttgcggcaacagatgctgacagaaatgttcatgttttaaaatatgcgccagatgaacccaactctctttcgggtcaacgtttagtccactgctccagtttcacgttgcattccgttaatagttgcatgatgttattaccaaaaaatgaggaatttggctctgctcaagttccatcgtttcagaatgtaggtggacaagtcgacggatctgtattcaagctagttcctttaagcgaagaaacatacagaagattgtatttgattcagcaacagatcattgaccgagaattacagttaggtggactaaatcctcgtatggaaagattggccaatgatttctatcagatgggtcacgcaatgaggcctatgcttgacttcaacgttatacgaagattcagcgggctagctattgatagaagaaggaataccgctcaaaaagcaggacgacaggcacattttgaagcatggagagatatcataaatattgaattttcattaaggtctttgtgccggaacaagtga

SEQ ID NO: 570 - DNA, 660 bp, Saccharomyces pastorianus
atgtcgactaaaaagagacctaggaagacagtaaagaaaactgtatcgttttctgacgatacaactttgactacgcatcaaaatcatgagaaaaagaatatagatcacgatcgtccgcctgtatatgtaagaaagacacctctaatgacttttccatatcacttgatactactgctctattactatgtttttatttcttctgactacaatacagtgaagcttttaagccttttaatacctgcacaaattggatatctaatttttcaattcaataaatgtacggtttatggtaataaaattatcaaaattagctattcattgtctttgatttgcctgggtgccacatttctgttgagttttcctgcaatgttattaaccgttctatttggtgcaccattgatggatttattgtgggaaacttggttattgtcgttgcattttgctttcttagcatatcctgcagtttattcagtgttcaattgtgactttaaggtgggcttatggaagaagtatttcatatttattgttgtaggtggttggattagttgtatcgtaattcctttggattgggatagagactggcagaattggccaaccccgattgttattggagggtatttaggtgctttagtcggctatactattggtgcttacatataa

SEQ ID NO: 571 - DNA, 2682 bp, Saccharomyces pastorianus
atggatattcgtggtaggaaaatgaaaaaaccgccagcatgtgtgcagtgccgcaagcgcaaaataggttgtgaccgtgtcaagccaatatgtgggaactgtatgaaacacaataaaatggactgtttctaccctgatgttcctggacaatacgttccctccagctcgtcctcttccaatacacgccaaatagccaacggcccgtatttaaattcttattatgcttcttctcgtcgtgtctccaaggaaactgcagctcttctacagaaaaacccagagctggcttctttggagcaaattagggaatacaacacgcgtttgcaattgctcaatgctcaaaatcaactcaataataggacgtccgcggcaaacgcaaccttgaaccaacaacatactcaatatattccaaaatcggtgccttccttggaaagcaaacctgtcacttctacaaacgaattttctactcagctcaattgggttcaaggtcccgcaattttccatatgctaacttctccttacacgcaagaggaaatcatcaatcatgaaatgaatttcttgaaaggaaggctattagaattgcaggatattacaggtaagaagatctcagggataaatcttgatattaagcaagatccctcgccgcaagatccttcgcggcaaaatcaatcttcgctatcaagtcaagaccaagaagagttcttgaccattaagaaaaggaaattgagcgaagacgatactacagacggagaagataaaatggttgctaacgatgaaagaaaatttcatctcaacgagttcaaagatttggatcctcagtttttggatatgaataaggtatttaacgtatttaatactgtggttacgcgagacaatagtgaaaatttgtggctgttaccaaagaatattaacaaaaactccattttccaaatccagtacttgattgaacgcgatcctttcctattcaagtttttcagtgaattcaatacgttgattgaaaaacgattcaatgagtctttgcaagattctttagcaaaccataataacgcgaaggataacaacagtatatcgcggttgttaaaatttccttcacagtctgttacacagaacctcatcaataagtatttatcaacggttactgaaacgagttcgatattgccaatcttaaagccaaagcgactgctaccaataattgagcaaatatttccatcaaacgccatgagaaaggcaagttctaatgactttgaaacggtgtttcaaatcgtatgtttgaataatgaccagttaataaacttgggattcataaccctttgtctcttaattttatttgaatcattgaactccacggtgttgattcctctgagagatgatgggcatttgcaactcttcaatattttatttgattacttacctttgttgaaggcaaatttgacaatgcttagatttgaaattgataaaagatcaatgtgcaatatggacaccttacgatttatttccctatggaaatattaccaatcagtgataactacatcatcttcatcttccaacacgattgactatgatgaagatatgcatatggcatgtctactgtcattaaaccacgagactcagaatcaatcacatattttggtttggaatttcatattcaaaaattactgctggaggcatctatttttaggcgagttaccattgttaatatctgaaccatttacaaactccactccaattattgatccgttactgaataacgatttcgaattgattgatttcgaagtgaacttgatgaaatatttacaaagtaaagatcaacggctatctattgataagattgtacagcttataaaagttataaaaaccaagaatatcgaagttagccagagatgcttaacaacttcttcgataatcaataatattatggattctttaatttatagaaattcgatgttatatttgaatttttatcttttactacagtttgaaacgttaaagagctgtgagaaattcaacgaaattttagatgactttttggaattgttaagagagactctattcttcgttttctcaaacttagcaaatatcaaatttgccggtcatgaattcaccttcatcaataaatctattgcggttctgcaaactctggtcttgatgctgttagcgttataccaaagatcgtttgagtcttctgaagcggtgaacaatgaaaaggaaaactacacagatcaaacagacagtaaccacagtaacaacgacaataataagagaattaagaataagaacgttattcatttgattatcaacaaaattgcaatgttgttaaacgattacactaaaaactgtaaaaaacagaataggttgatcgaaaatctaataactaaaattgagataatttccaaatatatcaaaaaattagaagaaagcaagaccttgcctgtaactaattcaaacaactctaccaataacggattcagtaatatatctactgatcaactaattaagataaatcatgaattgaataaaatttctgagtctttgattaaaacagatttttacgagcaaagaaaaaataataaagtatttaatggaggtacaggtactacgaccactgttgataatgaggccaatttggagaatttcggtttaaccaaggaaaacttcagtgaaatttttgaagccattcgcagttaa

SEQ ID NO: 572 - DNA, 687 bp, Saccharomyces pastorianus
atgaagttccaattgttatccatcatcaccctgtttgcttgtttatttacgacaaccatctttgccaaagaagaaagttcggaccctgagatcacacataaggtgtatttcgacatcaaccacggcgatgaaaaaatcggtcgtatcgtcatgggtctatatggcctcaccacacctcaaactgtggaaaacttctaccaactcaccatttccagggatccaaagatgggttacctgcactctatcttccaccgtgttattccaaatttcatgattcaaggtggtgattttacccacagatctggaatcggaggcaagtctatctttgggaactccttcaaagacgagaattttgacgtcaaacacaacaagccaggtagattgtccatggccaaccgtggtaaggacaccaacggatcgcaattcttcatcaccactgtgccatgcccatggttagatggcaagcacgttgtctttggcgaagtattagagggcatggacgtagtgaactacatcgaaaacgtcaagaccgacagcagaaacatgcccgtgaaggaagtctctattatagaaagtggtgaactggaaaccgtcccgttaggcaacgaggacgccgccaagctgcaggaagaaatcaaagcggaagccgatgagcaagccagtgaagcagcccacgatgagctctaa

SEQ ID NO: 573 - DNA, 1434 bp, Saccharomyces pastorianus
atggtcaacaagtcacggccaaagaaaattaaggcaccctacaggaagtatgtggcgggcgagggcttttcctctacaagaaatgataataaagagaaagaggctactgccactgtaccacccgatgcagagctaattgagacaccacaggggtcttactactacgatgaggctaatgacactatagtgaagttgacgcgactgagcaatagtaaaaaagacagaaaaggacgtaggcgatcgtcatcgtcatcgtcatcatcgcatgccaaggaagataaagatgggcaaatgatagaaagtgaaaaaagcactcatttgttgtacctaagaatggttttgccctgggaagtacagcatagaataacgcactatcttgatattcctgaagaagaagaagttagtaataaggatactactgggaaaataatcactactggtataaccatgaactatctgctagtttgtagaaactggtatgacatgtgcttaccaaagctttatttttcaccagtattaacaagcaaaaacttcaattcatttgtcgatacaatcattttaaacaagaagaaacaactggggcattatgtctttgagttgaatttgtctacgattttacaaagtggaaggaactcatttgtttctaagctgttacgacgatgctgctctaacctaaccaaatttattgccccgcagacaagttttggttacgcgcccttgatttccttgaaatcgtgtcatgatttaaagtttctagacttaggtctagtatcagagacagttaagctaaaggagctattttccgccatcaaaaactttacgaaattgacgcacttgtcctttcccagatcgtcgattgactgccagggcttccaagatattgaatggccccagaatttgagatatttgaaattaagtgggggcataacgaatgaatttgtcattgacactaaatggccaaaaaccattaccactttagaattctcttactgtcctcaaatcacagagctgtctattttctcgttgttatcacagactggtgacaatctaaagcatttatttttctattatccgatgccatctttaacggaaaattccttggatcacgttttcacatattgtgctaatttaatctccctacaaatcatggttgactattgctccaagtggtgtttttctgaattcatgctgagtaagttgatggaatacgataggcctttgaaaacattatacctggaatgcagtgggtccttgggtttggcttctaagattcatcccgatgacctgaccatagccatattagaatcaaggctaccctgcttaaagaccatttgtgtttctcctaagttaggttgggacatgaaaagtgacgaggttgccgatttagtagtttctttggaggatcaagatggtagtttgtacctaaactattag

SEQ ID NO: 574 - DNA, 855 bp, Saccharomyces pastorianus
atggctatcaaggaagattgtataaacaatctcgctaggtggcagacagacgaagaagctcagagctgtttccaatgtaaggtaaacttttcatttttagtaagaagacatcattgtagatgctgtggaagaatattttgttcttcctgtaccgagaactttgtaaattataataaaaagaaggtccaagttttgcagaaaaagaatagcgatgcggaatcacctccatacagaacctgtaacgagtgctatgacaaccttctacatctaaatcttctggtatcttctgccaataaagacccaagactatcgcaagtcgcgaacacaaatacgcccgctgcactgaacgatgacgataacgaagatacagaaatcatggaagacgcgatagatcaagatgggccagaatgtggaagctctcgaaacgaagaagacaaattttgccccatttgtaatgccgatctagcgcagtttgctaatgatgaagaaacgagagaacacgtagaggattgcttacaaagagctgaaaatgctcaacaacatacagcgacatcagaagcgggaaatgagaccgcaaaagaaagtccgacattccaaaatagaatgctagtctataagataccgcccatcacagccaatgatgaaaaccatgtcgaaattaaggaatgtcccatctgttttgaagaaatggagcctggcgaaaaagttgggagactagagtgcctgtgcgttttccattataaatgtattaaaaactggtttcataagaaagcgcaaatgaccgcagctcaaaaggggaatagctcttcttttgttaaacgaaatttttgtcctttccatgacgctgtattttaa

SEQ ID NO: 575 - DNA, 2079 bp, Saccharomyces pastorianus
atggtcaaacgcttgctcgaattgggccaccatgatgaagctaaacagaaactgcggaaaaatcgacagcaagaggagttgttttgtgatgaagaagacgtaaatgattcatttcatgaattaagccaagatgaggaggaagtactgagcgatatcgattgggaagaaattcctttggatggaagtataactgtcactgtagctaacacacaccaaaataccgagacaatatgcaggcgcaagaggaagcataaaagaaaaatatttaattatcagcgacttaagtatgggttgcatcttgtaatgattccatttatgctatctttgttggaaactagaatgaaatggaccaccgacgagagattaaatagacgtctgaggagatcagtacccaagctgattaccaagaaatttaaagtttggggtgcaaaggatcaaacctccaaaactgcttccttgaggacgctattacttggactagtgctatggtttcgttccaactacaaaatcaatagcaacggtatcagacagaaccttaacaggttacattatctcatgaagtacgcggataatcaagaggctagtccgctctctaaatccacatacaaacacgtttttgataatcagcaagaattctatggtaacagaccattgctgaataatgacattgaggatattcgaaacatggctaagaagaagatggccaacagagatatactgactttgttcttcttaattatcttaaataatattttaccaggggccaagaatctttatttgtgctttgctttgccgttgcacgattacgatattaggtgtaataaagtcaaatggcaaattgaacacggaatcggcagagtacctaatatatttgatactgatctgatacaaccgtatttttggattgaattagaggtttcttccttaagcaaggatgagctatatatcatcgatcctatagcccacctggatgaaagcgaaattgttttaaaaactcgcaaaaatcagtttgttcctaattatcagcctccaatggacatgaagctcaatctgactcagaggttccactacgtggttcgcatggaatacaccaaaggaataatacaggatgtttctccgaggtatgtgccaaatgtttgctacagatacttcactttatctgattcttctcccatattgaaatcaaagcattatataagctaccaaaatatttctaggtggttgaaaatatggaaccgaaaaaaggccccctaccataacgatgcgttaatggctgatattgcgctatccaattttgtattgccaaaaagtgtcacagaaattaaaagaactgataattttataattccttcgatactaaagtctaatgaagtactagatttacacgcaaaaccagtttcctcgatacccgaaatgaacagtttgagagagcctgttttttggaaaaaagacgttatactattgaagagtaaacaacattgggcaatactaggccgttccattttacctggtgccagaccattaaaacgtaagaagtacctaccaatgaaagaacgaatgggcaataatctagacagatacgttataaaagaattattctcatgcgaacagacaatgaagacccctaaatactctaatacatatcatgaccacttcggttacgagcatgtggttgaagatgtgtcccattttaagaataaattcggcaacatcgaaatttattcaatagacaataaacctgacggattcgagttggttgcactcaacaaagatgacgatgtcaagggtctcataaagaaatacaacaaagcccaaaaacaagcccaaagaatcaagtacttggaagtggtgagtggttttgatttcagacagaaacagggccacgctattcccaaaatcgaaaacatcctagtcaaagaaagtgactacaaattgatccaagatttgaaaagtaaaaccaaattactaaaggggctctccctttgggatagtttattaacaaagctacgggtcaaggacagattaaatgctgactatggaaatcttgaaaaaaatgacgaagtttgcgatggccattga

SEQ ID NO: 576 - DNA, 1416 bp, Saccharomyces pastorianus
atggttgcatttccacgtccctctgtatgccttttatattggactcgacaaccgatatccaaaagcgtattcttgcaatctcaaagacggttgttatcctttacactttctagacataatgatagtcatctcaatgacgataaaaataggaaaaagctgaagaacgtgttccaaaccaatagtaataaagcagtacggaaacaaaaaaccaaagaagacctggcaagagaaaggttcgaagaacaattgaagtcgtccaatagatttgtcagatggggtgctattgcaagatctgaaaagttctcgaaagggatgactaagtacatgattggtgcctatgtcgtctttttaatttatggtcttttctttacaaagaagttatttgccagagataaagagctggaaagattgttgaagaagcaagaggagggaaatattaacgaatatgaaacgttaagaattaaagaattaaggggcaagctaagaagaagagatgaactgaagttagaagagtacgaaaagatgcgagaggaaggtgttgaaaactttgatgatgtgtatgtacagagttttgatcagaacaaattaaacgaacaaatattgccagctagagatacgacaaacttttatcaagggaaagctagtgaatatgataaagcaatcaatatggaagagaaggtaatatttcttggtaaaagaaggaaatggttaatgaaacattgccaaggtgacgttttagaagtgtcttgtgggactggcagaaacatcaagtatcttgatatgtctcacatcaactcgatcacctttttagactcatctgaaaatatgatggacatcacgcataagaagtttaggaacaagttcccgaaatacaaaaaggctgcctttgttgttgggaaagcggaaaatctcgtagatttagcaacgaaaggtaagtcccctcaagagaatgaaacctcaaagcaagtcaaatacgatacaattgtggaggccttcggcttgtgttcccacgaggatcctgtaaaggcgttgaataatttcagcaaattattgaaaccagatgggagggttattttactggagcacggtaggggccaatacgattttgtgaataaaatgttagacaatagagccgaaaaaaggttgaattcttggggctgtagatggaaccttgatttaggagaagtattggatgattctgatctagagttggtggaagaaaaacggacgcacttgggtaccacttggtgtattgttgctaaaagaaagggagatgtgaaaaagaaaagtgaacttgggtttgtggagaaatacctacagtcgagtataagaaagagaatggagtcatttgaaggggataatggcacagagtctaaacagcagcatgaaccggtttcttctattaataaaaactag

SEQ ID NO: 577 - DNA, 825 bp, Saccharomyces pastorianus
atgatacatcagctgtgttattggtcaaagaaagcgtacctagtttatcctattcaagtccttttaggcgcgataatatcaatattagtgtctgcagagacactgaattatcaaaaaaaaacgtataccctattaaaatcgtcgaatctcctcaatataatctttgcatataaggcgaacaaaatatggccgattttcttccttagtttgactctactgcaaatatacttccactatttagctagactggatgtactaccactgccgatatcgagttctgaaactggctctacatatttatcctatagtaatcgtcggcccctgctccaaaatagagtgattattactatggctgcccaatatgcatgcaaattcgtcttaaagaatctgctattatttttgagttttcaatttattgatcatgtttttatttggacgggaggagaatgtagttctggtagtggaacaacatcagctgaaaaatgtcgcttagagaaagggaaatggtacggtgggtttgatattagtggtcatttttgttttcttgtcaatattagtatgattctgtggatggaactacacttgtttagtagatttgttcaagttgaagacatgctttgggtagtcaataaatgggttcgagcttgccttgttattatcagtgttgtactattgatctggatctgcattctctgggttactgccatttactaccatacgattttggaaaaggtgttaggttgccttatggggtacatatgcccagttttcatataccacattttaccgagaatcgaattattacatgattatttgtatatatga

SEQ ID NO: 578 - DNA, 1983 bp, Saccharomyces pastorianus
atgtcagatccgtttgcacatctgttgacatcattgaagaacaaggattctggaactgaatccaagaaaacaacccctcagaccaaaactttcactgccacatctgcaactgtagttgcgagcgttgcgacaacacctaaaggtaataacaatggtctccattcactgtctgcttctcctatagtaccagtgtcgaatgtaagtttctctgcggctccgttagtaccaagtaatagcaattccaacgcaaatactgctggcaatagtccttcgccttcgccagccaatgttgaagatgactttgacgatctctttggtagtaacacaatagaaacatcggatgggcttcaagaggtagaccagctttactatggaaacaacgacggctcaaatggtggtgataacgtcttagtcgatgaagttaaggatatggaaatcgcaagattgatgtcattgggcttatcgatcgagaaggccactgatttttataatagcgatataacgtatgaaaggtatttggaaatttcgaaactaaaccaaaagaagcacaaggaccaaattgttagtcacagaccgactgatttaagttataagaacgcaagtttatttaacaatacaaattcaaataataataataacctattcagcatggctactgatttctttaacaagggaaaggaactggtagaccaatggacctcttttcctccagaggcaaacgacagactaagtaactatgcaaacgttgaagataaacttgaccactacgaattgcctttaaaaaatgattcacacgaagggtctctacctgaaaaaaaagagtatgagaaagacttgcttgggggaaatgatctggatgatgatcttttaaccgattttgaaacgaaggtagatatagcaaagaagaacacgaagggcacgactctatcgccttcaccatcccctggcatactagtcgaggatacactgagaaaagagacacctcgaacggaggataatcttttagatttctccacagacatcatcaatagcaccaacgatagcgcaatttttagtgaggatggtaacgcgaaccctgtagtgcctatctcagatatcgaattatccggttataacgaatttaaagcaaagggtaccagtctgtttaaaaatggtgattacgtgaattcgttacaggaatatgaaaagtccttgaattcattacctttgaaacatccattaagggtcattgctctatctaacatcatcgcatcgcaattaaagattggtgaatattccaagtccattaaaaactctgatacggcgttggcattatttccatcagccaaacctagatggaacgataagatttcaaagagtgatcctcaaagatcattcaacgacatctggccaaagatcatgattaggcgcgctgaatctttcgagcatttagaaagtttcaaaaatgcactagaaacatatcaagagttaattgaaaaaaatttcttcgatgataagattatgcagggaaaaaggagatgccaaagctttgttaatcctattcctgtaaggaaacccagtcctgtcaaaaagacaacaccaactccggcaccaatgaagaagccaacttcctctccttctccggatcccgttgacaacgcttcgagagtaaaggaacaggagttggaaaatgctaaattggcattatacgataatgtctctgatagaattggctgctggaagtgtggtaaagacgatgatatacgccatttgttagccaacctgtctagtctactaacatggtgcaattggaaagatgtatctgtgcaagatttagtgatgcccaaaaaggtcaaaatcacctacatgaaagctgtagccaagacgcaccctgacaagataccaaaatccttgtctttggaaaataaaatgattgcagaaaacgttttcactactttaagtatcgcttgggataagttcaaacagcaaaatgagatcaactaa

SEQ ID NO: 579 - DNA, 219 bp, Saccharomyces pastorianus
atggagaaccctcacgaacaagtgcaggccaatatactgtcgcgcataattggtaatgttaagaggctcaacgagagtgtggcgatcctgaaccaggagcttgtgaccatcaataatcggaacaagaatttggagattatgggtgcgatttgtgacaactaccacagcagcgttcagttcaacctggaggccaccaacaacaaaaaaccgcctttatag

SEQ ID NO: 580 - DNA, 291 bp, Saccharomyces pastorianus
atgtcgacggttaatgtcttgaggtactctgcgttgggtttgggactgttttttggttttagaaatgatatgattttgaagtgtaacgctaagaagaaagaggaacaagcacaatacgatgaaaaattgaagttagtagaggaagcaaagaaggaatacgccaagttgcagcctgcagcaactcttaaggacacacctgctactattgcggtcaatttggaagatcctaacattgatttcgaaaaagttattcttaacgccgttgattccttgaaagaaacttccacatga

SEQ ID NO: 581 - DNA, 597 bp, Saccharomyces pastorianus
atggtagcttctagtgttgttctcgtgagtggggagggtgaaagattcaccgtggacaaaaagatcgcagagaggtctctgttattgaagaactatttgaacgatatgcatgacagcaacttacagaacaactccgattcagactcggattcggactccgaggccaaccacaagagcaaagataatagcaacaataacaacaacgacgacgatgacgatgacggcgaagacgagatcgtgatgcccgtgcccaatgtccggtcttctgttttgcagaaggtcatcgagtgggcagaacaccacagggactccaatttccccgacgaagacgacgatgattccagaaagagcgcccccgtggactcatgggatagggagtttttgaaagtggaccaagagatgctttatgaaatcatcctggcggcaaactaccttaacatcaagccgttgctggacgcgggctgcaaagttgttgccgaaatgatcagaggcaggtcccccgaggaaataagaaggacgtttaatatcgtcaacgacttcaccccagaggaggaagccgccatcagacgtgagaatgaatgggccgaagaccgttag

SEQ ID NO: 582 - DNA, 1236 bp, Saccharomyces pastorianus
atgcttatagcgatgcgtctgccgctactacttctatatttactcgtattgcccttttcaggcgcaaataacacagatgaagctcacgaaacaatagcaacaaacacaaataactgggccgtactagtatcaacgtcacggttttggttcaattacaggcatatggccaatgttctcagtatgtacagaaccgtcaagagattaggtataccagattcacaaatcatactgatgctaagtgatgacgtagcctgcaattcaagaaacctattccctggtagtgtgtttaacaacaaggatcatgccattgacctttatggtgactctgtggaggttgactaccgaggctacgaagttacagtggagaacttcataagactcttaacggatagatggacggaagaccatcctaaatccaaacgactattgacggatgaaaattcaaacattttcatatacatgacaggtcatggtggtgacgatttcttgaaattccaagatgctgaagaaattgcctccgaagacattgccgatgctttccaacaaatgtacgaaaagaaaaggtacaaagagatttttttcatggtggatacttgccaggcgaataccatgtactcgaaattttactccccaaacattttggccgtgggttctagtgaaatggatgagagttcatactcacatcactctgacgtggaaatcggggtcgctgtcatcgatagattcacatattattgtctagatttcctggaaaatattgataaaaactccactttaactttacaagacctttttgactcatttacatttgaaaggatccattcgcatgtaggtgttaggactgatttatttcaaagagacccatcagaggtgctgattactgatttttttgccaatgtgcagaacgtaattcccgatgactcaaagcctctttcgttaagccattatcatcactataaagactacattggtactgcccaatatgagcaaaacaataatgtgttggatttggccctagaaaaaaatcatgaaaatttctcctcctcgaagtttgacagactcactaaacgctttaaatctaccaatgaattgaatgttgatataggttcgaatgaatattctttagccttttccaagcaatcagttacattaggattaatgttcgtagtaatgattgtattgtttatactgagcggaaacactacgaaggcaaattataacctgtacaataattaa

SEQ ID NO: 583 - DNA, 3675 bp, Saccharomyces pastorianus
atggattctgcaggcgcttcccaaatagttagcgcattagatgtcatttactctccgaaatctaacaactctcagcgacaagaagctcagaaatttctagatgaagtgaaattgtgttcggaatctcccttctggggctacgaaattgcactgcaaaaccccactaattctatactgaaatactttgggctagggttattagaccacgctgtgaagaaaaactggagcgactatgacgaggaaaaaagagtggccttgagaaaatgggttatggagctcaatttcggggtgcaagatcatgacaccagatatattaaggagaaactggctactctatgggtagaagtggcgaaaagaacatggggtgaagcccttaaacaaacaaaccccacggaagagcagttgctcgcatcgtgggtagatatggacaataacctttatgaactttggaacgttaaccagtcgtcaagagaactagcattaataatcttcagaattctttttgaagacgttttcttgttggatgatttaatcgtcttgaagaggatgaccgtaatccagcctttgtgtgtaatgatcgtttgtcccattgaagtcttcgccataaaatacaaattcagtgataaatggaccaagtttaaagcaaacaaagaaggctggttttctgtttggattcccgaattaaacaacgcattacaacagaataattccgaatatattataagacttttagaaactttgaaaacctgtttaaattggccattgaccgaggttattgtaggaaatgatgtgttgacctgcttattgaactgtctttccagtaacatcccaaaggcacaatcaatggcactagactcaatacatattctgctgacccgcccatatagtaacgaaagccactatcaaatgaccatagatagagtgtttgataacatggacctgttggatagagtatatgacagtttattgtttgatccttctgatgatatagatgaaacgaaatatcctataattaaaaaattcgtggatatgattagttgtctttatgtttgtgttccgaagataaaggagactaacgaccaaattcaaaaatactttaagcttgtattaaggacaacatataatccgagtttaatcgtaagtgggttgacgttagacctatggtgtacatgtcttcgaaacgatgaatatctacccaaccttgagaaacatatcattcctgatttactacagtttgctgcagacgctttggtgtactatgaacaaattgatggccatgtttctaaaaaattcgctgaaattgactttcaatccaagtccgaattccaaactttttgttccacttataggaaaagaataagagatatcattaggttgatttcgtgtgtggagttagatcttacttatgactggctgaacaacagactaaatagctatttcagttcaccattcggccaacaagtcctaagttccacgtttttagaccataaatcagaaccttatttaggtgcgctgtctcaatacatgattgtggaatgtttcattaacggttgtataagatggaagatttggtatccagcaggggacgattatgacgaaaaattagattccatattacaaaagctagagatcttatcaaaccaattgatcgcattaaatctgagagaaccactactactgaagaagcaaatccaaaactttgcacttttcttgacaatgttgaaagataatgtacttttcacactgttggaaaaaattattacaagtgccacgatggattatccagaaattaatctggaggaaagaggccccgaatccgacgcagttcgagacctaaggtatgcttgcggtatcgaattgaacagaatggctttgctaatgcccgaatcactaaaaaaaatatacccagatctggaaaatgtaattgccaaaattatgccaaatttgtcttaccatgaaaagatttcgttcaagtcctttttattgatcattgtactaaaatcttcgctagatatgaaagaagaaagatttgccgctattgtggacccagaactattagcctggtccgataagacaacggtagttggcctttctgatttgcattggtttatggaacgtttaggtattgttcagattgcagaatattttcaaagacataacattaacgaaaatagtgatcttttatctattccaatagacgatgaaggtaaagaattaaagtcagagttgaccaaacgttggcaaagtctgttccctgttcgagcaacaagaatgttcattcattattcgatgcaaagtattaagactgatgaagaatttaaaatgttacaagatctatggagacctagaatcgtcccaattttaccttatatcacaaggttgttgtaccaattacaatcttaccatgatccagataattggaagggtctgcctatagttgtacagtcctttgtcaaatattccactattgaaagattttgggaagcaggagcctccaataaatcaaaagatgaattcatcgatgaacatatgaaggcaatgcaaactttaagagacttcgcagactctgtagggcacattataagatacacaagagaatatactctacttgtcttgagcgctatatcatcgcttggtagtgtcttttactttttggatgaatcgccggatttactattaaactctattgctatattcaaaccaggcactaatgagataagtcctggtgtttcaacgcatggttggaaacacataatgaatatagctattcgtcctattctgaaaggttgtccgaaagactgtttggacaagtttatgccggcttttttgccaaaattgtttgaaatcttagatgtgctactttgccagaaatggtctttgcatatgagtgatatggacatgaatccggttccatctgatgatgatcaaatgactgaagaaattttggaagaaaatttattgagacagttaactacagttgttgttcgaatagtgattgattgtattggacaaggaaatgccaatccaaacagtgccaaaagcaggctgaacaaccaccaaattgagttgagaaagattatattcaatgatttgaatattcttgccccatttttgaaacttttaaatcatttgatttcattcaaagatacaaagtgttcgtttaattctatcctagtgattaaatgttgtctgacttcagttctcaatcaaaacaataccgttgatgaatatttcacttttgaagtgatgaaaaatttattgttgaatgtattgtgtaatagcgcatttaaggattcttttcatgaagccctgtatgtcttcaccgttatattcttaacgctatgcaaagaatatccatcggctagagcatttttatttgagttagccaacggttacaatattgatgaattatacaagaatctaagaagtgtagacgaatataagggccagagagcactcatgattgattttatagattgggtgaagtcctcaaatgggaaggaagatggtagtgtagaccatgcaggtgatgagagaaaaatgcaggagaagagagaagctattctcaaaaaggcaaatgaaagactgatcaagaagaataaggagagtggagacatgttagatgatccgaatattgaagacggcgctgtaggtaatctctttgatgacaactga

SEQ ID NO: 584 - DNA, 966 bp, Saccharomyces pastorianus
atgcggcaagtccacaaaaggtatgtgcatcattcgaccgcatttatacaaagcatcgttgtcaatacaaaaacgagaacagcaggtacacaagaattattagaaagatataaaataaaacaatcaaaggctgtttccagaaagagagttgatagttggccaaaaaaagaggttccggcttggccaagactaaatgacgactttaatacttgctacggaaagccatccgattctgatctgaataaaaccaatcatttcttcaataaggcaaaagtgaaatttgaatggagtgctgctagtttcgatgacatacctagccagaaattaaaaaatcttacaacgtttagggaacccgattgtaacacaccaaagaaacaaggacgtgatactagcatcccgcctgcgtggctcaatactttgccagaagtgatctttctcggaggaactaacgtaggaaaatcatctatcttgaacagcataaccacctcaatcctaagcaaagaagtgggaagtttagcaagagtttcgaaaacaacaggttttacaaaaactcttaatagttataatgtggggaataaactcaggatgattgactcgcccggttatgggtttaatagtagtaagggacagggaagtgtcactctacaatacctcctagaaagagaagagcttgttaggtgttttctgttacttgccggtgataaggatataaacgatacagataacatgatgattcaatacatgcatgaacatggcgttcctttcgaggttgtttttacgaagatggacaaggtgaaagatttaaatagcttcaagaggaagattgagtcttcaggcttgactgaaatgccaacacttcccagaattatactgactaactcgcttacatctagtacgtctcccagacggttcggtatagacttattaaggtatacgatatttcaaagctgcggcttgattttatag

SEQ ID NO: 585 - DNA, 861 bp, Saccharomyces pastorianus
atgtcaatcattgcaaaaaaagctattttgaacctaagaatcacattgtgttctctgaatattggccaaaggtcgttcacatcctcttcgatcaattatagtgctaaagctgtgaaattcttaaaggcccaaagacgaaagcagaaaaatgaggcaaagcaggctactttaaaggcatcgacagataaggttgacccggttttggggcgcacggataccccatttataacacgtattatggccgagctaaaagaaccgcttgttctttcaaaaggctataacatcgaagaagtagacaagtttcttgtagctattgaatctgctaaacgtgaaagggcagaattgtcggggttgaacacagaagttgtgggacttgaagatgtacagtcattagaagcaagacgtgaggctattttgagaatattgagtatgagaaactctgagaataagaacgctattaaactagccgtagatttggcacgtaaggaatttgaaagattcccgggcgacacaggctccagtgaagttcaagcagcctgtatgactgttcgtatccagaatatggcaaatcacataaaagagcatcgtaaagattttgcaaatacgagaaatttgagaatactagttcaacaaagacaagctatactaagatatttgaaaagagataatcctgaaaaatattactggaccattcaaaaaatagggttaaacgatgctgctataacggatgaatttaatatggacagacgttatatgcaagattatgaattttttggtgataaaatattgataaaggactctaagaaagtggcagatcaaaaacgtaaagaaataaggagacagaaaagaactaccttttag

SEQ ID NO: 586 - DNA, 2088 bp, Saccharomyces pastorianus
atggctgggattctgtctaaaactctctcagaagtacatccttcgttccgaacgaatggtatgggtattggtaacactcataggaggatttcgttaggttttcttcctcccaacaagaaaaatcctctagtgcgtaagtttcgtgcaaaaacaagaaacactgatcaaagaagttttaggtctttgacagtcgatttcggaagtaacgtacatgaacccagcccctacttgggaaatatcgaagaagaacctgatttatattaccacgacgaggaggatggcgagcttagtagaaccatttctttaccttcaagagtgtcagagactcctgaactttctccacaagacgttgactggatactacatgaacatgaacgacgatactcgtcagtgtataactctgataatgaggaggagtgtcaaagcaacatacccgatagaacacaaggatatcccggaagagaactggaatatgacgaatttatgaacaggcttcaagcccagaaacagaaacaaaaccaaaatgcaacaatggatgcaaaaggtatctcacatcgtagaaggccatcattcgtatctgtaaacagtcgaggttcggtgcccacgatatatcaagacctagatgagaatgatccagaagcactagctgcattggctcatagtaatgtgaccttcaaatcagaagcaaaagtattagcatcttactctttccctttaatttttacatttttactggaacaaattttccctatggtttgttcattaaccgtgggccatctaggtaagaatgagctagctgctgtatcgttagcttctatgacttccaatatcacattagccatatttgaaggtattgccactagtctcgatactctttgtcctcaagcatacggttctggaaggttctacagtgtcggggttcattttcaacgttgtattgctttttcgatggtcatatatgttccgtttgcgttcttgtggtggtattctgagcctcttctttcttatatcattcctgaaaaagaattaatcaatttaacgtcaagatttttaagagttttaatactaggggcgccagcatacatttttttcgaaaacctgaaacggttcctacaagcccaaggtatctttgatgcgggcatttacgttctaacaatatgtgctcctttgaacgttttcgtcagttatactcttgtttggaataagtacatcggagttggcttcattggggctgcaattgctgtagtaattaacttctggctaatgtttttcttactgttgctttatgcattacatgttgaaggaagaaaatgctggggcggattctcgaaaaaggctttcacccattggaacgatttgggacatctggccttctcaggtattgttatgttagaagccgaagaactatcatatgaactactaacattgtttagtgcatattatggtgttagttatttggctgcccaatctgcagtatccactatggcagcattactttatatggtcccttttgcgatcggtatatctgcctctacgagaattgccaacttcattggcgcaaagagaactgatttcgctcacatttcttcccaagttggactatcattctcatttattgccggatttgttaactgttgtatactcgtatttggacgtaacgtaattgccaatgtttattcaaaagatcccgaagttgttaaactgatcgcgcaagtattgcccttggtaggcattatccaaaatttcgattcacttaatgctgttgcgggatcatgtctcagaggtcaaggtatgcaatccttaggaagtatagtaaatctcttagcatactacctatttgggattccattagcactaatcttaagttggttctttgacatgaagttgtacggtctctggattggtattggatgtgctatgcttttgattggcttggtcgaatcctactatgtattgtttcctgattgggacaaaatcatgaactatgctgatatcttgaaggaaacagaagacgatgaagtagatagtgacgaatacttaacagactcggatgacccagatggaaacacacatcttttaggggcttaa

SEQ ID NO: 587 - DNA, 570 bp, Saccharomyces pastorianus
atgggtaaggctaagaaaacaagaaagttcgggttagtgaaaagaacattaaacaccaagaaagatcaaaggttgaaggcaaaccaggaaagcattaaagataaagaagaccctgagttaaccagaaacataccacaagtgtcgagtgctcttttcttccaatataatgaagctataaagccaccttaccaagtgctgatagataccaatttcataaatttttccatccaaaagaaagtggatattgttagaggcatgatggactgccttctcgcaaagtgtaatccgttaatcacagactgtgtaatggcggaattggaaaagttgggacctaaataccgtattgctttgaaactggctcgcgatccaaggataaagagactaagctgctcgcacaagggtacatatgcagatgattgtttagtgcatagagttttacaacataaatgttacattgtggctacgaacgatgctggtttgaaacaaagaatcagaaaaattcccggcattccattaatgagtgtagggggccacgcatacgtcatcgaaaaattaccagacgtcttttaa

SEQ ID NO: 588 - DNA, 1824 bp, Saccharomyces pastorianus
atggttagcacagaaaacatgatttctcagctaaaaaagctatctattgcagaacctgctgttgctgaaggctctcatcctgacgtcaatgttgtggatttgatgagaaactacatttctcaagaactgagcaaaatatccggcgtagacacttctctcatttttccagccttggaatggacaaacactatggatagaggtgatttgttaattcctgttccaagattgagaattaaaggtgctaatccaaaagatttagccgttgaatggtctgaaaaatttccatgtggcgatttcttggaaaaagttgaagcaaatggcccattcatccaattctttttcaaccctcaatttttagccaaacttgttattccagatgttttgacaagaaaggaagaatatggttcatgcaaattagttgaaaacaagaaggtcataatcgaattttcttctccaaatattgcaaagccattccacgctggtcatttaagatccactattatcggtgggttcttagctaacctttatgaaaaattaggctgggaagttatcagaatgaactacttgggtgactggggtaagcaatttggtcttttggctgttggtttcgaaagatatggcagtgaagaagctttagccaaggatccaattcaccatttatttgatgtttatgtccatattaacaaggatatcgaggaggaaggtgatacgattccattagaagaatccactaacggaaaagcccgtgaatatttcaagagaatggaagacggcgatgaagaagctttaaagatttggaagagattccgtgagttctctattgaaaaatacatcgacacttatgctcgtttgaacatcaaatacgatgtttattctggggaatctcaagtttccaaagaatccatgcttaaagccattgacctatttaacaagaacggtttgacacatgaagataaaggtgcggttttgatcgatctaaccaaatttaacaaaaagttgggaaaagctattgtccaaaagtcagatggtactacattatacttaactagggatgttggtgctgccatggaccgttatgaaaaatatcactttgataaaatgatatacgttattgcttctcaacaagatttgcatgccgctcaattcttcgaaattttgaaacaaatgggtttcgaatgggctaacaaattacaacatgtcaattttggtatggttcaaggtatgtcaactagaaagggaactgtcgtattcttagacaacattttagaggaaactaaagaaaaaatgcatgacgttatgaaaaagaatgaaaacaaatacgcccaaattgaacatccagaagaagttgctgatttagttggtatctctgccgttatgattcaagatatgcaaggtaagcgtatcaataactatgaatttaaatgggagagaatgctttcattcgaaggtgacactggcccatacttacaatacgctcattcgagattaagatcagttgaaagaaatgcttctggaattaccgaagacaaatggataaatgctgacttctcattgttaagcgaacctgctgctatattgctaatcagattattgggtcaatatcccgatgttttgagaaatgccatcaagactcatgaaccaacgactgtggtaacatacttatttaaattgactcatcaagtttcttcttgttatgacgtcttatgggttgctggtcaaactgaagaattggcaactgcccgtttggctctatatggcgctgctagacaagtcttgtacaatggtatgtgtttgttgggtttgactcctgtcgaaagaatgtaa

SEQ ID NO: 589 - DNA, 1704 bp, Saccharomyces pastorianus
atgaattcaactccagatttaatatctccacaaaaatcaagtgagaactctaatgctgagttgccttccagtagttcacaggtaatgaacatgcctgatgaaaaaggtgttcaagatgacttccaagctgaagccgaccaaatcctaagtaacccaaacacaggtaaaggtgcttatgttaccgtctccatctgttgtgttatggttgcctttggtggtttcgttttcggttgggatactggtaccatttccggtttcgttgctcaaactgattttttgagaagattcggtatgaagcatcatgatggtagttactacttatctaaggttagaactggtttaattgtcgctattttcaacattggttgtgccgttggtggtattgttttggccaagttaggtgatatgtacggtcgtaagctgggtttgattgtcgttgttgttatttatattatcggtattatcattcaaatcgcttctattgacaagtggtaccaatatttcattggtagaattatctctggtttgggtgttggtggtattgctgtcttatctccaatgttaatttctgaagttgctcctaaggatatgagaggtactttagtctcctgttaccaattgatgattactctaggtatcttcttgggttactgtactaatttcggtaccaagaactactccaactctgttcaatggagagttccattaggtttgtgtttcgcttgggccttgtttatgattggtggtatgactttcgttccagaatctccacgttacttggttgaagccggtaaaatcgatgaagccagatcttctctatctagagttaacaaggttgctccagaccatccattcattcaacaagaattggaaactattgaagctagtgtcgaagaggccagagctgctggttcagcctcatggggtgaattgttcactggtaagccagctatgttcaagcgtactatgatgggtatcatgattcaatctctacaacaattgacaggtgataactatttcttctactacggtactactgttttcaatgctgtcggtatgagtgattctttcgaaacttctattgttttcggtgtcgttaactttttctctacttgttgttcattgtacacagttgatcgttttggtcgtcgtaactgtttgctatacggtgccatcggtatggtctgctgttacgttgtctacgcttccgtcggtgttactaaattgtggcctaacggtgaaggtaacggttcctctaagggtgccggtaactgtatgatttgtttcgcctgtttctatattttctgtttcgctactacctgggctccaatcgcttatgttgttatctccgaaactttcccattgagagttaaatccaaggccatgtctattgctaccgctgctaactggttctggggtttcttgattggtttcttcactccatttatcaccggtgccattaacttctactacggttacgttttcatgggctgtatggttttcgcatacttctatgtcttcttctttgttccagaaacaaagggtctatcattagaagaagtcaacgatatgtatgccgaaggtgttttgccatggaagtctgcttcctgggttcctgcctctaagagaggtaccgattataatgctaatgacctaatgcacgacgaccaaccattttacaagagtatgtttagtaggaaataa

SEQ ID NO: 590 - DNA, 1461 bp, Saccharomyces pastorianus
atgttaaagtggataaaaggtgggctttctgcagtcaccgggatggctgaacctgaatacgggaaggattatattcatagtgtttctgatagggtaaaaaataaacagccttacagagaaactacccgtgaagattttttctggcaagctcctgatcacaccaacgtcgaaacagttatttgttattttagtgatttgaaaaccggtatttttggttttgccgagattatacactcgaacatcatcggtttgcataccgcatcgcaatttatcttcagaatttttgactcgaagaacccagaggatctaaatatttggacatcgaccaaattggataatttctacatcaaagatgcgaattattacgctgacaatctttcttttgaattgagtgaagatggagagggttatcacattcaatccagtgtctgtgaccaatctgttgttgacttgcatataaaaagattgactcctggtgctaagatgggtgatgaccctgccacttattacggtaacaacttggatgaaccttggggtagcatgagacacgttttctggccaagaaatgcttgtcacggtaccatcaaagttaagaaggaaatcgttccaggatcagacggccaggaaagctctggtgatgaagaagaagaaggtgatgaagaagaagaaggtgatgaagatgatgacgaagaagaatctggagattctgaagaggattctgacagtgaagaagaaagtgacggagaagaacctgaggtcgcctatgaagatcggactataatattcaaagaggaagatcctgtgatgtctacgttaataatggcttttcaaggtatgaaacctcatcacgcggctaaagcatggaatttcttgtatttccactcagaaaaatattctgctctgttgatggaattcactacaccaaaatcctacgccaacactaagatttctgccggtattgttactgacgagaaagaagtcttggccttaacaactaacaataatgtggagcatttggactcggaagtcgattccgttggctggaaagttccaaagtctatcaaaattactttaaatggtattcaagctaaagtaaaggatgaagaattggaggctgaaaacaacgctgaaggagacgaaaaatcggcaaagaaagatgatggagaagaagaagaagaatataagaacgttgcacaagaaaataagttcaatgctgtcattgaaggtccattgaataacatggtcgaaagaattgatgtcatgggtgaagttccaaattttgtcaagaatatcgtctctggtgttgctggtactaaaccatacatttaccaatatgctaatccaaaggacttcactttacaaataaacggcggtgaaaaaatccacggtgtagcttggacagaagtaacatttatttccgaatcggacgatgtaagtgaagagtcttacaacgaagcataa

SEQ ID NO: 591 - DNA, 966 bp, Saccharomyces pastorianus
atgcttcgcttcgccggtggtcgcactatgagaaggtactctacaaggcatgcactcgagcatttgaaagagggcgctcccctgaaagggctgttctctgttgatggattacagaaggtctggtttgatagggtgaagcacctcgacatgaagttgaacaacagtacggacgaagcgcaacaaaaacccttggaatccctcatacaagagaactcgaaatcagcttccaagaaacacatcgtaaactacgcatcgtcgttatacaacttgagattcagcatgtcctcactgcaaggatgcgccagaccccccccagaggaatgccccaggatgggtccagaagcgttacttcaaaccccagactttaatagagcgattagcaacgagccattgactaccgggaacgaacgcttgcaagaggcccttgtctcctcatttggttctctaatggagttcagagcactactactgaactcgaatctggccatatcaggagacgggtttacatggttagtcgcaagacgacaacttgataaacgcaccaaccacaacgatatgttgaatggggacattgaatatgataaactatttattctgaacacttataatgccgggaccccctttaacgtttctacttctggcataatgaatgaactcaacaaccaatacacgaacttagaaaaacatcgagccaaagaggaggggaaacttaatgatgctgaagcggcgtctaaacacgccaagaccaagttcatttatgaaactcagcagaagggattttctggaaaggaggtttcatacatcccgttgttagccattgatgcgtcgcctaaagcgtggttgcctgattatggtgtattcggtaaacgggaatatcttgaaagggtatgggactctttagaatggagaattgtagaatcaaggttacctcaacgtactaaaatccaagcattcagcactttgtga

SEQ ID NO: 592 - DNA, 1521 bp, Saccharomyces pastorianus
atggataacagaaatagcggtggctctaatagaccattttcggtcaataacccattcagaaatgccacaattgattcaagtattactcaatataaaaatgatgctcagtttcaagagtgggcaaggaaccagtctcgtacaaattcatttgatagaccacaattgaatacaagaacatcttcgcagttatcatttccaagtattccagaagatgagcagcaacgaagggcagaccaacagggtgtttactctggcctggaaagcttcagtactggtagtctatcaccgccgtccagagccatttcctctaaaaatccttttctggatgacgtaagtatgacagataattttgataataggaatgtgagatctcctccccctcctcctcctccttcaaagagtaaaaatctcccaaccgctaaagaagaaaaggaccaattaaggcaaagatatttggaggagagtgatgtaaatgcaatgagtaatagacaaggaagttctgacatgcccccttcttatgaagagatcactatatctgatgggccgaggcgtggatatccaaaggagaagagttctcgttcttcttctcatcgcgaacatagcaacagcgcctcttatgttccacacaaatcttcatcgcatcaccaccgcgaagcatcttcgtcttcgactccttccaagaatgggaaaagaaaaggtaaaggtgttatgcctaagaacgtggataccattgacaaattggatgtgactgggttgtttggtggttcatttcaccatgatggtcccttcgatgctgtcacacctcatagaaacaagaataacaaagccgctcctgttttagcatttccggtagatggtcccaacagtaccatcggtggtgcttcgtttaaaaagtctgccatggacgaagtttttggtagagatgatgtagatgactctgacatataccagtatagcccacatactctgaaaagaggtggtgacacacaagatgcaataaaatcaagtgtgggtaaaaatatccaacagatggatgctaaaaataaaacgcaattagttcatggacccgttacagcaggattaggctccagcacgtttttagatggggctcctgcctcctcggcggccatcagaagcgacataaaagcgcactccaaccataatcgtactggcggtctacagagaaacaaatcgctttcacagcggttaggccttggaggatctggtgacactaatgctcccatgaccggtgttagaagaaatttaagcttaagcagggagaaccacgacgtaagtaataatagcgaaggtgttagaaggtcgaagactgtaaacccgtcaagcagaactcacagatccaaatatcctacagactttgacgaccaaagtgacgaagatgaagatgaagacaatgtttacttaggtgtacgctataatgattctaacatgaaaaaaaagtctacaggtagtaagctactcaacagagttaaaagtctaaaagttggaagaaaaagtcagtag

SEQ ID NO: 593 - DNA, 1806 bp, Saccharomyces pastorianus
atgtcgcgcctaagcttattgtttctatggctcatttcaattattcggttcgcatccgcaacggctcttactactacaaaggcaataacagcagcaaaatccaaaagttcttcctcggcggttgctccatttcctgtgctagcggtaggcaaggatggtaggggaaactacttcgtgaatagcacattcggcacacctagtcagccccagcggttggcgatagatatcatccagccatacataaacctggtttctggaatgaatgaaagccgctgtggaatcgctgatgcatgtcgtaacgctccccattatttcatgaacgaatcgacatcttctactcctgtttctccgggtcaaatatacgagctatttttcgttgatggtagagtcctcaattgtactttggtaacagacaatatgaacttcacgaatgtttcagcagaaaacgcttctgcttcctcggtaaacaatttaaatgagaaacgagatagtgtgcaatttggttcaggaagtctatcgatttcaaacgtttcgttcttcaacatcgaatcgtcgaactttgggacggcaggtatgctaggtctgggggggaagatcgcaaacccaggtaccgagtatgatagctcacagtttacagagtcctcttttttcctatctcttttgaacaatgcaggcatcattgaatgcccgtcgtattcgttgtggttggctggggatacttccacatatcagtcatataaagagtctatacccgattgtgggaaattgcttctcgggggagtggacccatcgttgttcactggtacattggggaaattcgatttgataccatatgttgatccagcgagtaatgccgtaagtattgggtatccaattataccgttgggcccaatttatatcatatcgaacagtggacaaagtatgaatatgacttctaaggatttcttgagccctgtgttactggactccacctcttcagttagttatttgccaaccagtacaatcattcaaatcgctgttcaaatcgcagccacgtatgtggaatccctagacagatggttagtccagtgctctatggcggatatgggtgtaactttaggttttatgtttcgagcattgaaaatcgaaattcctctaagtgatttgttgtcatccacttacgacacaaccactaattcttcgatgtttttcagttcgggggaagaagcatgcttcttaacgctatatgccaatacaaacacgggagtaaacattctcggagaggctttcatgaagaacatttacatggcaatgaacttggatgacaacaccatagccattgcacaggcaaaaaagatagaaggtggtgctattactgatgaagcaagtgaaaccaacgcatcctctgcatactctgttatcaagaaaattaggtccggttacatcccttacgcaaagacgatgaatagtactaatacaaagaacatgactctttacccatcttacaaatccggctatatgtttacggtcccaggtcagttgacagcggcgtactcagatggtgtgattgcgggtgcaggtaggtcattttatgatacttcgagatcgactacaactactaaatcgtccagtagtctatttgacagtttttctgtttcagcctcagatgactgtgcactaaattcaagtaataaaaccagcaccttttcagggagggctgtccgcttgagtaacccctatatatcgaaacatgattcagtaggatttgtggctcgtgtggcttcattgatactactatcagtattctccgtactaatacttctatag

SEQ ID NO: 594 - DNA, 966 bp, Saccharomyces pastorianus
atgtcgtgttcaaatagcatatggcctactatatccaacctaagcggatcattatcctttttcacctctgtcgtttcgctgttcccgcagatcattgagacttatcgagataaaactgtcgatgggctgtcaccatattttctattggcgtggctatgtggggacattacctccttgatcggggccaagttaacggggcaattattatttcaaatagtcctagcgatctattttctggtgaacgattcgtttgtatgcggccagtactattattatggcgtgatacataaaaataaattagcgactattggccatgagcctaaaccccttcttcctgaattggcagaaaatggtcaacttctgagggatgaggaagatattattcgtagcggtagcgcgggaagtcgcagaagcagcagaaggagatctgccattacggccgccttggcaatagcccacacactaagcacagctagtgcatatcctctgaacatagcttctgatccatcctatgtgggaccacctggagatggtttccctgcgcacggcaaaaccagcgaactgggcacaatcctatcctggattggcgcctcgttctatgtgggtgcacgtatcccccaattaatcaagaactataatagaaaatctacagacggattgtccccgttcctgtttgctacaacattattctgcaacatcacgtataacgtgagtatttttacaagttgccagttctttactactccgaacaaaacacaatttatcataaacgagttaccatttattttcggaagcgctggaactattgcatttgacttgatatatttctaccaatactacgtgctttacgcgacagacatgcagctcagagaactagaaagagagatatacgaacctgaagaagacaacgtgagaccagaagctaccgagaatacatccttgttgtctggtgaaacccaaacgtag

SEQ ID NO: 595 - DNA, 960 bp, Saccharomyces pastorianus
atggttcacaacaaggtcactatcatcggctccggcccagctgcccacaccgccgccatctacttggccagagcagaaatcaagccaaccttgtacgaaggtatgatggccaacggtgttgctgccggtggccaactgaccaccaccaccgaaatcgaaaacttcccagggttcccagaaggattaacaggtagcgaactgatggacaagatgagactccaatccaccaaattcggtactgaaatcatcaccgagaccgtttccaaggttgatctatcttccaagccatttaagctatggaccgaattcaacgaagatgaagaacctgtgaccacagacgccataatccttgccaccggtgcttctgccaaaagaatgcacttgccaggcgaggaaacctactggcaaaagggtatctctgcctgtgccgtttgtgacggtgctgtcccaatctttagaaacaagccgttagccgttattggtggtggtgactccgcatgtgaagaagctcagtttttgaccaagtacggttcaaaagtgttcatgcttgtcagaaaagaccacttacgtgcttccactatcatgcaaagacgttctgaacaaaacgaaaagatcgagatcctttataacactgttgctctagaagctaagggtaatggcaagttattgaacgccttgagaattaagaatgttcaaagcaatgaggaaactgacttacctgtcaacgggttattctacgctattggccacactccagcaaccaagattgttgccgaccaagtgaacgtcgacgaagccggctacattaagaccgttccaggctcttccttaacttctgttccagggtttttcgctgctggtgatgtccaggattccaaatacagacaagcaatcacttctgctggctccggctgtatggcggctttagatgctgaaaaatacttgtctgccctagaatag

SEQ ID NO: 596 - DNA, 369 bp, Saccharomyces pastorianus
atgcaaaataattcaactcattctagagagtcagtttcggctggcgatgatcctcttggaattgataagctgacagttgattacgactacttactttataaaatcaaagattatgtacagagtatacaattggatacaactgagctttgcaagaagcaaaatgaactaatagtgagtggcattatcgaaaataccatagataaaaacatcgtcaaattcgaggagcttctcaagaaatgtgatgagttagaaaaccattttgagatgttaaaccaattagcaacgataactgatgctttcaaggagagaatagcagcagccgtgcacgattacaatgaattaaagaagggcattaataaaactaaatag

SEQ ID NO: 597 - DNA, 1374 bp, Saccharomyces pastorianus
atgactgctaactctaaagacagtagcatcgctttgagcaatattgatgccattaacacaagtatttccgatgatgatagcgacgacttctttatggataattcttttgatgaaaatgattacaatcagagtgacgatagtaatgaacgaaatgtcataattgattctaaagttacagattccccgccccttcatttatctctgtcagcatctgaagaggaagataaaaatgtaaaccagcaaagtctttccgatagcgagtcatctagtgaaagtgcgagttcagcaaacattataaaactcaaatcagacaagccatcaggtaggacaagaggaagatctatgataaaagaatctgtggttgaaatagaatcatctggatcaaggcaaaacaataacaaataccatcatagatcaagatcaaggtctaaatcgagtataagatctttatcgcctgaacaaaaatataaacgacagaaaaactcactattaaatgcttatgacgaaaatgatgatttctttaaagagctcgctaaggaggctaagaaaactactagcatgtcaaaagattcaacacccgatcagcccaaacgagtttataacataaagtttttttctaagctagaaggaactataaataaggccgttcaggtaaaagttttgggaaagtacgaattttcaaaaatactacctgctgcattggacgggctgatgaaatcttataaaattcctaaagtcatgaaggatatttacaaagtagagaatgtgactctttattggaacaatgcaaagttattaaattttatgacttgtaactctttgcatattccgcaagattttgaaaatgaaatatctgacatcgatattactatcgtctcgaaagagtatgaaaagaattttgaggcaactttagaatcaaaattgaaagaggaagaaacagcaatgtttgcaaaagaacgccaagaaatggaaatgaagttagaaaaaaagagaaacgagcgggaagaatctgaattccgtgaatttgaatttgaattaagaaatgtcaaagaaacagaagaattgaaagcaacagagacaattatgaatgaaccttctttacgagaagacaacttgataaaagaaaacaaaaatggcgataatgaaaaggttatgaaaattgcccttatggggcaagataataaaaagatttatgtgaatgttagaaactctacgccatttttcaaagtagctgaatattatagaattcaaaaacaactacctcaaaaggcgaaaatcaaactactgtttgatcatgacgaactaaatttgaatgaatgtatagcggatcaggatatggaggatgaagatatggtcgacgtcattgtcgagtag

SEQ ID NO: 598 - DNA, 1362 bp, Saccharomyces pastorianus
atgggtttagtagaaggctatggaaccagttctgattctgattctgacaccgtcgaaaatcaatccacatgtataagaggtgctaacttgcaaggtgatctgtatgaacgaactaaagcgagcattcataaaagaaagcaacatttaacaaaatcagaactcaaaagaaggcggaagatacgtaagggaagtgggccatggggtagctggtcaagtagcgacgacgaaggtttagaaaacaatgaaaatctggtaggacaacaagataccttcattgacgtgatagatgaggacgatcgagattcagatgcagtacagaccgaagaaatttccaatttctatggtaaattggaaaaggactatcaaggtcgaggatatttacatccaccaaatgacattgacgttgatcttcataaggaaagaatgtcctttcggtgttatttaccgaaaaacgttatacgtaaatatgcagggcattccagtggtaccactgccctgaaatttttaccaaaaacagggcacctgttcctttcaggtggtaatgatcatactataaaactttgggatttttaccacgaacgtgaatgccttcgagactttcaaggtcataccaaacccatcaaggcgttacgtttcgctgatgattgtttatctttcctcagttcctcttttgatagaaacgtcaaaatttgggacactgaaactggtaaagtgaaaaccaggttacatcttaaatcaaccccagcagatgtcgaatctcgacccacaaacccacatgagttcatcgtgggtttatcaaactccaagatattgcactatgatgaccgtgtttttgagaaacagggccttgttcagacatatgatcaccacttaagtagtattttggctcttaagtactttcctgatggttctaagtttatttcttcctctgaagacaagactgtaagaatttgggaaaatcaaattaatgtgcccataaagcaaataagtgatacagctcaacattccatgccatttttaaatgtgcacccgtctcacaactatttttgtgcacaaagcatggataatagaatatattcattcagtttgaaacccaaatataagagacacttcaaaaagatattcaaagggcactcttcagcaggctacggtataggcttgtcattttctggcgacggtcgttacatatcttcgggcgattcaaaaagtagactcttcacatgggattggaacacatcacgtatgttgaatagcttaaaaattccaggcaataagccgataactcaagttgactggcatcctcaagaaacaagtaaagttatatgcagtggagctgcaggaaaaatatatgtgtgcgactaa

SEQ ID NO: 599 - DNA, 1890 bp, Saccharomyces pastorianus
atggctgtagataaactggagaaagaaagtgtagatgctagattcgctgggatctacaatgatcctaagtttaagaacacgagaactagagatcacaaaataaaattagactctagatttagcaaaaaagatctggaagtgcaacacaagtcaaaggttgacaagtatggtagaaaaattaaggatgctcacaacaccaaggaaatggaagatttcgataaatatttcgaaaaggaagctgaggatgatgaagatgcagaggctgatgtgaaggctactgttgaccgtgctcgtggtgaagttcctaatgattatgttagctctggtgatgagtttacctcatcggactctgaatcttctggagaaagtgaagttgaaagcgaagaagaaagtgaagtcgaagctgaaaatgctaagcctgaatctggggatgcctccaaaactttggccgtagtgaatttggattgggatcatgttaaatctgaagatttgatgatcacattttccggcttcgttccaaaaggtggtaagattgaaagaatatctgtttatccaagtgaattcggtaaagaaagaatgcaacgtgaagaagttgagggccccccaaaagagctttttcaaagaaaaaaacaagacaaagcttctaagaagaaaactaccgatgattccgactctgatatagatattggcattaaagacctatatgaagaaggcgacgctgacaaagacgtggattcaagagctctccgtcaatatcagctggatagattgagatattattacgcagtagtctattgtagtgatattagcacagctagggctatttatgaaaactgtgatggtactgaatacgaatcaactgctaatatgttcgatttaaggtacgtccctgatggtatgactttcgacgacactgcaagggacgagtgtagtgcgctacctaaaaactatagaccacatcaattcagtacagatgctttacaacactcgaacgttaaattgacttgggacgagactcctgttgatagagtggaagttgccaagagggccttcactcaaaaagaaattgatgatatggattttaaagcttatttggcatccgatagtgatgaatcggatgaagaagtcaacgaagacgcaaaaagtaaactaaaatccttggtcggtggtcttggcttcaattctaaaaaggaaaatgccaacgacagtgaagaagaagaagttgatatggaaattacatttactccagccctagaaggaggagatgaaaaaccagttgaaggccaagaagaaacatcaatagaaaaaataagaagaaaggaaaaggagcgtcgtaaggctagaaagcaaaaagtaaaggaattgaaacaacaatccgaaaaggaaaaaagaggtaagtccaaatctaccaacaaaaaacatgtggcagatgaagaagaattgaagaacaacgcaaaatcaaaggctgaactagagcttctaatggacgatgatggcgacgctgaagcagaaagttcaataaatagtaaagcacatttcaatatgaacgaaattttgagatctgaaaaggaaaaacataagaaaagtagataccaaaagaaagaaagaattgttgaagatactttcacacctgatgtggaagatcctagattcaaggaagtttttgaagatcacgattttgcgattgatccaactcaacctgaatataaaggtacacaggccatgaataaaattttgaaggaacgtggtaagcgtgttcatgacagaaaaagaaagcacggtaacaatgaaaacgatgtgactaaagatggaaacgctaacaagaatattggaaacttggtcaacaaattgaaaaagaaaagtaaatcatccaagaaaataaaggtttga

SEQ ID NO: 600 - DNA, 939 bp, Saccharomyces pastorianus
atgcctgctacattaaagaattcttctgcaacattgaaattaaacactggtgcttctattccagttttagggtttggtacctggcgttccgttgacaatagcggttatcattccgtcattgccgctttaaaggctggctacagacacattgatgccgctgccatttatttgaatgaagaagaggtcggtaaagctatcaaagattccggtgttcctcgtgaagaaattttcatcactaccaaactttggggtactgaacaacgtgacccagaagctgctttaaacaaatcattaaagagacttggtctagattatgtcgatctatatttaatgcactggcctgtacctctgaaaactgacacaatcactgatggcgacgttttgtgcattccaactttagaagatggcactgtcgacgttgacaccgaggattggaactttgttaagacttgggatttgatgcaaaagttaccaaagaccggtaaaactaaagcggtcggtgtctctaatttctctgtcaataacattaaggaattattgaagtctccgagcaacaaattggtcccagctaccaaccaaattgaaattcacccattattgccacaagatgaattgatcgctttttgtaaggaaaagggtatcgttgtagaagcttattcaccatttgggagtgccaatgccccattattgaaagagcaagcaattattgacatggctaaaaagcacggtgttgaaccggcacaacttatcatcagttggagcattcaaagaggctacgttgtcttagccaaatctgtcaaccctgaaagagttgtttccaattttaaaatttttactttgcctgaggacgatttcaagactatcaataacttatctaaggttcatggtgaaaagagagtcgttgacatgaaatggagttctttcccaatttttgaataa

SEQ ID NO: 601 - DNA, 2577 bp, Saccharomyces pastorianus
atgtgggtgatacgataccagaatatattggaagatggttctatcaactctatatcatgttgtcttcaagcatctaaaagttacagcataggtagatcgagcaaaaatgaactggtaatcaaaaatgacaaaagcatttccagacagcatgtcagtttcaaatgggaaattgatgacatccctaatccaaaaagccataagctttctttaatcaaccaaggtaaactgacttcgataaataaaaagtttatgaaagtgggtgaaacgtctattatcaatgttacggaagtttcgaaccatatggagattgaactgggcacagctcctattcgcataaaagctgaatggatcggtcaaatttggaacattccctcccaattggcacaatttcaaactacactttctttgtttggtattgcaacaaaaacatccattgatgatgatccagccaatatagtgatcagcgattttccaagtaacgatgatgacggaatacgagaattgtatgcgcttgttaatactataccattgaaaaagtcacagttgctggttgagctgtgtaatactcttctatcgtcatctgtaatgaatttaaagttcgatgaaacttggaatagtatggtaaataaatcagccttcaatgtcttcgattatgatccgagtgttttgttttctaagtttatgaagctggacaacgttattatattgaccgccgttggtaataggtcagacctatcaaataccctgcgaagaattaatgttagactctcccatttcgactccttaaacagtttatataagaatgttgatcttctgaagtcaccggaaaaatacctgattttagctttaacaaatatgaaagaaaatgggcaaaaattatgcactgttcagcaattaataacgtcaataatagatgatacgttatttaacataataaatactaaagcagcagaggttaaccagaacagtatgtttggaaaagtttctgaagaacatactgctatctcaaagacagcccatagtcctgaaactgaagctactcccacagttttgaaaaaacgaaggttgaataggcgtagggtgcaaccgcttgatagtttaaattttttcgcgggaggtttgagtgctaatccttcttcaagacacaaggactttgatgatgtgaaagagcccaatttgggcttaaactcgaagactaccgtctcaagccccatcatcgaaggaatggatgaaaagcattactcgacaatacagagcaaacaagaaataagtagagatacttggaaagaaaatggctacactaatactggtgtcgtaaacgtgggtagccccgagagtaatggttcggtacgacctacggatgaagagcctgtaagtgagtcaccacggccgccaccaactgtcacacggcctagctcgcaaagcatcacagctaatgctgtaaccaccacaactgaaaatcatatggaaggttgtagaattactgagagttacaaaataagtgatgacttaactcaaaatgaaaatcaaactctcaaagataatcgggagttttctgtactctcacaaaatacaccgtctcgtctacaggccgaccataattcacctctgagggagctgtcactaaaagaaaaatctaacacaccgcattcatttgttgaagctatacagcaaacaaaaaatagagaagttaaaagagtcaagtcgaccattgttgaactggaagatgatgaactgagcgaagaagctatcagtcagctgaataacttggctcttgtggagccaagtaatgaactgctaagagacccccgcagtttgggatcaaatacgacaagaaatagtgcccgaggaagtgagaagagtataattagacaagaatggcccaagcgcaagaatttcaagaccttttctaaagtacggccaaagtccaagacaccgaaagaggggaacaaaggcaataatcaaaactcagattttatacggagtgctgccttcttaatcacgagaaactatgtgccactgaaaaaatactctaaaaaggatagggtttctaatagggatagggacaacaacgaggatgtgctcgctctgacagagatgaaagacttaggacctgatacacatatgcctgaaaatacaaatgcaagcgtgatgcaagaaagattttatgcccaagattcggatatgaaagagaataattcagacgacataaaggaaagatctttttctttttcgcgtcgctcagatactacaagtattgtccaaccagtaaaaaataagctatttgtggctgaagatgatgataatgatgacgaaaacgatgttgtaaacgatagtgaggacggctttgaattggtcacaataacaaaatcaaatttacaaccagacgcggcagaggaatcttccaaaaggaatagacgtggtagaaatggagcgagcagaccagtagggtcttatggaggtaaaaatgacaatgacaatgccaatgacaatgacaatggcgacaacgacgacgacgacgacgaagacgacggcgatgagggcccaaagttcaaatttaaaagaaaaaaaggataa

SEQ ID NO: 602 - DNA, 1041 bp, Saccharomyces pastorianus
atgtctactttacagcgtcgtagagtcaatagggcagattctggagacacgtcatccatgcaatcgacctcaaacaaccacaatgccagcggtggcaagaccactagcggtcctgttgatggtgatgatagcggaattaataaaaagattgcatatgacccagaagaatctaaattgagagataatattaagatccctactttgactttgatggaggaggttttgctgatgggtttgagagatagagaagggtatttgtcgttttggaatgatagcatttcgtatgcgttacgtggttgtataattattgaattagcattaagaggtaaaatcagaatcttggatgattctgccagaaaaagatttgatctttccgaaagattgattgaagtcattgacggttccaaaaccggggaagttttactggatgaaactttacaattgatgaaaaacgatgaacctttaacgatctcgaactggatcgaccttttaagtggcgaaacttggaaccttttgaaaattaattatcaattgaaacaggtcagagaaaggttagccaaagggttggttgataaaggtgtactaagaactgagatgaaaaatttctttctatttgacatggccactcacccaattgcagatgcaagctgtaaagaagctattaagcgtagggtactttctgtacttgtatctagaaacatggaactgagctacaatgaatactttcccgaaacaacctcttttaaaattattaggactttggctttgatatgtggatcatatggggcaaatgtattagaaaatgtcttaactacgttggaatatgagaagagagacaaggcaattagtagggctgaagagttaatggcacaattttcgcaatatccgttcgacttagagaaagatactgagcttggcgtctcagttaatttgaataaagaagttaaagaggaaggagaaagcaaccccggtcatgatttacaattggaggttgtcgctggtgtgtttgaagtcttctcaagaatggacatgctgttatga

SEQ ID NO: 603 - DNA, 573 bp, Saccharomyces pastorianus
atgggagttaagacatcgaagctttccaaagatgacctaacaagtttaaaacagtccacgtatttcgatcgcagggagatccaacaatggcataaggggttcttgagagattgccccagtggtcaacttaccagagaagacttcgtcaaaatatataaacaattcttcccttttggatctcctgaggatttcgctaatcatctttttacagttttcgataaggataacaatggattcatacattttgaagaattcatcactgttttgagcacgacatctagggggaccatggaggaaaagctgtgttgggcttttgagctttatgacttgaatcacgatggatacattaccttcgacgaaatgttaactattgtgacgagtgtttataaaatgatggggtccatggtcacactaaatgaagacgaagctacaccggaatcaagggtcaagaaaatttttaaattgatggataaaaacgaggatggatatattacgctggacgaattcagggaaggttctaaagtggatccttccattattggtgctttaaacttgtatgacgggctaatttga

SEQ ID NO: 604 - DNA, 927 bp, Saccharomyces pastorianus
atgaatcaaatttggtctacggggccctcaaatttttactataattcggaatggaaagaaaacagaaagtccaacagaacaattgaagactctttaaaggagctggatgggttgattcattctttggagaggactcacatagaagtacagacgaatccaaaggtaaagaaaagcgcaatagtcgcaaatgacgttgatacaaaagaaaataatgcagaaatttccaatagaaactacacgtatcagaatattggcaccccactggcaagaccaaacctgaaccagtccttttcttcttctggggcggttgatcaatctggtaagagtaaaatgaatgagaactactatacagagtatttgtctaaaccaaggtcttttcagcaaataaccaaggagcaagcttataatgagtttaacaaaagaaagagttctgccattgttcccccttggttgaatattccggaaaactcaaaattctttgttataaagtcctcatctttgaaacatgttaagagatcattctacaacggaatttggtcgtctacccatttcggtaacaaacggttatctgaagcgtacaagacattgaaatctggagccaagatctttttgtttttttcgatcaatacatcgggaagattttgtggtgttgctgaaatgatatcagacttgagaatggacttggataccagcatttgggaggatgaacaaaagtatggtaaggcattcaaagttagatgggtaattgtacgtgatgttaataacagatcgttaaagaggtttttgataccatcaaacgagatgaaaccaataactcattccagagatacccaagaaattccacattcgattggtatttcgatgattaacttatttaaaatgcaagattcagatattttttccttcttggacgaaacgtatgaatag

SEQ ID NO: 605 - DNA, 1482 bp, Saccharomyces pastorianus
atgaaatcagcccaaataaggtacctttcttcgcagataaaccgcaagactgtatccattatcggatcgggtccttctggcttttacacggcatatcatttacttaaaaagtcgccaattccgctggatgttacaatctgggaaaaactgcctgttccttttgggttaagtagatatggtgtagcacctgatcatccagaggtcaaaaattgtgaagagacatttacgacatgcgcagaagagtattctatacccactaacaaaaagcataagctttcctttgttggtggtgtgaccgttgggaaagaagtaacattagaaaccttgttaaataatcaagatgctgttgttttaagttatggttgtacaggtgataagaagctaaatatcccaggtgaacaggggacaaagggggtcttcagtagcagagaatttgttaattggtataacggtcatcctgacttcgcaaaagacaagaggtttaccgattttgattggagtagagtctcgaaagttggaattataggaaacggtaatgttgcccttgatatcacgcgtgtgctgatcagtaataagattgacgaaatatggcaaaatacggatatatcacctattgcattaaatttggtaaaaaaggcacctgtaaagaacattaaactaattgcaagaagagatttcgtgcattctagatttaccaataaagaattaagagaattatgggaactggaaaggtatggtgtccgcggttgcattgattctaaatttttccaaaaggatatgttcgattcatttaaatccgatcgtgcgttcaatagacgagtggaaatgtgtagcgaatatctcaaaccgtttggtgaacgttcgaagaaaaattacaagaaagcacctcccccaactagtgggtgtaacaaattctgggagctggattatctgaagactcccttggagataaaccaggacgaaagtgatgtaatcaagtcgttaaccctgtgtaacaaccagttaaaggaagataacagtttaaaacctttgaaggattcaaacaatatattgacgtatgatatggatttactaatcacatcgctagggtacgctggtgtcccaatgcccgaattttccaagctgtctatccgctttgatagagaccatgtggctaataaacagggtcgtgttttaaccgttgctggcgaaatcttcccgcatttgtacgcgtctggttggattcgcaaagggagccagggtgttattgcctcgacgatgcaagacgcttttgaggtcggtgacagagtgatacaagacttatctgtcagtggggtgttatcctctgagaaatccattggtctctctaacatcaagcatactacatgggcagactgggaaagaattaacaagaaggagttgactcggggccaaaaggaacacaagcctcgatccaagtttctaacactcgaagaactatggcataatgtagaagaagtttag

SEQ ID NO: 606 - DNA, 306 bp, Saccharomyces pastorianus
atgatttttaaacgtgcagtatctacactaattcccccaaaagtggtgtcatccaagaacatcggttcagcaccaaatgctaggcgtattgccaatgttgtgcacttttacaagtccttacctcaaggttcagcaccagcaatcaaggccgactctagattgggtagatataaggctaagtattttaatggggataacgctagcggtaaaccattgtggcactttgctctgggaatcattgcctttggttactcgatggaatactacttccatttgagacatcacaaaggtggtgaagagcattga

SEQ ID NO: 607 - DNA, 3030 bp, Saccharomyces pastorianus
atgtcagcagactctaccattaatcaatcggcttcctgtgttaggtgcgacaaatcaattgcatctagccaagtgtacgaattagaaaacaagaaatggcatgaccgatgttttacctgttataaatgcgataaacaactaaatgcagactcggactttttagttttggatacaggcactttaatatgctatgattgttctgataaatgtacaagctgtggcaacaaaattgacgatacggcaattatattgccctcatccaatgaaccctattgtgcaaattgttttaagtgctgtaaatgtgacaaacatataaagaatctaaaatacgcaaagaccaagcgaggattatgttgtatggattgtcacgacaagttgataagaaagaaaaacctattgttgggaaagcaaacaagagattcttttagagacaatattccaatagcacttccgcaaaggtctgcaaacagacctttatcaccgacgagagacaatgataaaccgtctattagtgccaatgactttgtggttcatgaaaatactacaggctcgaatgagggaaaacaagtcactccacaagttttagtttcacaggaaacagacgatactttctcctcctccaacgataatgataatgacgatagtaatgacaagcaagaaaagtcatctcatgcaagaacaatttcaatagacgatatactgaattcgactttggaacatgacagtaacagtattgaggaacagagtttgacggataatgaggattacattagcagaattgcggggaatgtgagttatagattattgcagcctcacaaacctaataaggattctataatagtcaaggaacccaagactccaaattcaaattccaacgcgaacagatttgtttcaatttatgataaggaggaagttgatagagatggcacagataataaagagaatgatgttgtaatcagtacacccaggaatagcaatgagaaaataacgagtcctttgaatagccccatggctgtgcaagcggaggaagaccttgatcagtttcatgggttagcattgagtttaccgaatgtttataaagaaagcaacaggtcatttcaaaatacgcaaacttccaaacctacgaaccaagtttcctcgcttgcgaggtcgagtacattagaaataaagccatccgcatcttcatcgacactgcgtgtatctaatagtggaaatttcagcaggcctcaaacaacagacaattcacagtctcacaacaagatagccccccctgcaaacaagaaactatcaagatctttttctttaaaatcaaaaacttttgttcacaacctgaaaagtaaaacatcggaaatattggatccaaagcatcctcacaataccactccagtacaggaatcagacacacattcgggttggggtgtctcttctgcccatactactagtgcaagaaaatcgaaaataaagaaaatccctgtgtcacggggtcaaagtgatagtacagtatacaaatcagtagcacaaaatgagaaacctattgcatcagattccagccataaaaaggcgcaaagtagtcttggtggtatacccaaaaaacaagttcctaacgatttagtggctaacagacgtataaatggctcataccccagcgcaagttcggggcatcatatagcaatgtttcgcactccacctctggaatcaacaccgttgttcaataggccatcgatatcttctgattccgcacatcacagatcttctagtttacagacgtctcgatctacgaacacgttgttggaagatgactccacaaacgtggatgctaccgatgaacaaaccactagtttggaaagggattattacgtgaccgagttaactctaagaaagttgaaatcagatgtgagggagttagaagggacaaaaaaaaaattattacaagatgtggaaagcttaaaacagatgaaagaaagactgtcaaatgatgttgtttacttaacaagggaaaaggataagcagtcagtatcatctaaggagtccctggaacaaaagtcaaacaatggaacaacgataattgtaaaatcgccaagcgcaaatatagacaggaagggaagcatatccaatgctagcccgaaaccacgattctggaaactcttttccagtggtagcaaagaccaccaatcagaagaattagaccctcagcattcaccaaattcatctttcagtggagggacaagcattgcacagaaagaaatatcaacgcccagactgattcgagcacatgacgggttacaatcaccaagcaaactatcaccgtcaccaagcccgaagaaatcggacatagtatatgatggatcgcatttatatgggtcaacattggtagccagatgtgcatttgagaaatgtaccgttccaatgatcatcaaatgctgcataaaatacatcgaagcagacgatgtaggactaaatatggagggtttatacaggaaatccgggtcacaaactctaattgaggatattgagaaggaatttgcccagaatactccattgcatactgataaggtgagttccaaattgaataatttactgcatcaagacgtacacgcggtggctagcgtattaaaacggtacttgagaaaattaccagatcctgttctacccttttccatatatgattctttggtagatttggtaagaagtaatcaactcgtcgaaagactaccattgagcaagaatgggcccgccgaatcttcacagaaatcgtcgatatatgacacagttgttaggaacctaaacgaaattctgaagagtttacccctggaacattatgaggtgttgaaggtactggcaacacatatcaacaaagttcaaaggtacagcgagtggaacttgatgaatttacataatttgtcgttggtctttgcaccaagtctaatccacgaccttgacggcgaaaaagatatcgttgatatgaaggagagaaattatattgtggaatttatactaggaaactatagagacatatttacattggcatga

SEQ ID NO: 608 - DNA, 240 bp, Saccharomyces pastorianus
atgcctaagagactgagcgggttgcagaaagaagttttacatctctatagagtttctataaggacggcgcatacgaagccaaaggaaaatcaaataaatttcatgaattatattcatgaagagtttggcaagtatagagatctaccaagaaaggacttcaccactattgaacacttgttaagggttggaaataagaaagtagccacgttttcgcatcctgaactaacaaacatgcattga

SEQ ID NO: 609 - DNA, 1908 bp, Saccharomyces pastorianus
atggcacctgttacgattgacacgtttatggaccaagacgagccacatgttgttttcaatcaatcagcaacaattcctttcggtgagtacatatttagaaggctattttccatcggtacgaaatccgtttttggcgttcctggtgatttcaacctatctttattagaatacctctatgccccctccgttgaagaagacggtttgaaatgggtcggtacctgcaacgaattaaatgctgcctatgccgctgacgggtactcccgctattctaataagattggctgtttaatcaccacgtatggtgtaggcgaattaagcgcgctgaatggtatagccggttcgtttgctgaaaacgtcaaagtcttacatatcgtcggtgtagccaagtcgacggattcgcgttccgataattttagggaacgtaatctgcatcatttggtcccacgattacatgattcgaacttcaaagggcctaatcataaagtgtatcatgacatggttcaggataacgttgcctgttcggtagcttacttggaagatattgaaactgcatgcgatcaagtcgatgctgtgatccgtgacatctatcgatattctaaacctggttatgtttttgtccctgcagattttccggatatgtcagtaaggcttgataatttgattagtgttccacatatatctcaacaagattgtataaccatcccatcagaaactcatttgttcagcatcatcgacatgattactacttggatgtactccagtaaaacacctgcaatccttggagacgtgttaaccgatagatatggagtgagtgatatcctaaataagcttatttacgccagtaaaatctggaatttttccaccgttatgggaaaatccgtaattgatgagacaaacccatcgtatatggggcagtacaacggtaaggaaggtttgaagcaagtttatgaacatttcgagtcctgtgacttgatcttgcactttggtgttgacattaatgaaattaataatggacactattcttttacttataaacccaatgcaaaaatcattcaattccatcccaactatattcggtttgttgacactagatatggcgaagaacagatattagaaggcgtcaattttgcacctgtattacaggagctatatcaacatattgatgtttccaaactttctttgcaatatgaccctagtgtaatcccatatacaaatgaaactatgaaactagaagacccaactagtgatcaatcaactgacatcacacaagtccacttacaaaaagtcattcctaaatttttaaacccaggtgatgttgttgtttgtgagactggttcatttcaattttctgttcgagattttgcctttcctactcagttaaaatacatatcgcaggggtttttcctttccatcggtatggctttacctgcggcgctaggtgtggggattgccatgcaagaccatccaaacgcacacataaacggcggtaacataaatgagggatataaaccaagactgatattgtttgaaggtgacggcgctgcacaaatgacaattcaggagttgagtactattttgaaattccacattccaattgaaattgtcatttggaacaataatggctacactattgaaagagctatcatgggtcctaccaggtcttataacgacattatgtcttggaaatggacaaaactatttgaagcctttggagacttcgacggaaaatacactaacaacacgattattgaatccacctccaagttagcactgaaattgaaggatttaaagaactcaagcgcaagagaccggatagaactcctagaagtcaaactgggcgtcttagacttcccagaacaactaaagtgcatggttgaagcggctgcacttaaaagaaacaagaaataa

SEQ ID NO: 610 - DNA, 336 bp, Saccharomyces pastorianus
atgaaatacttagctgcttacttattattggttcaaggtggtaacgctgccccatccgccgctgacatcaaatccgtcgtcgaatctgtcggtgctgaagtcgatgaagccagaatcaacgaattgttgtcctctttggaaggtaagggttctttggaagaaatcatcgctgaaggtcaaaagaagttcgcttctgtcccagctggtggtgcttctgctggtgccgctgccggtgcttccggtgccgctgccggtggtgatgctgctgaagaagaaaaggaagaagaagctaaggaagaatctgatgatgacatgggtttcggtttattcgattaa

SEQ ID NO: 611 - DNA, 831 bp, Saccharomyces pastorianus
atgacatcgattgcttcctcaccacaagatttagaaaagggtgtaaacaccatcgagaacatcgaaacgctgccccagcagggctccatcgcaggcgtctcgcagggcctgcccaacatccaagaaatttactccgatagggacttcatcacactgggatcgtccacgtatagacgtagggaccttttgaacgccctggacagagatgatgtttcagaggagcgctgcgcgagacaggcgcctcctcatcagtttgccaacccagttcctctcggtctggcctccttctctctgtccgctttggttttatctttgatcaatgccaacgtccgcggtgtcaccgacggcaagtgggcgcttagtctgtttttgttctttggtggtgccattgaactgtttgccgggttattgtgttttgtcattggagacacgtacgcaatgacagtgttcagttctttcggcgggttctggatttgctacggttacggactaacggacacggacaacctggtaagcggctacacggatcccgcgatgctgaacaacgtcatcgggttcttccttgcgggctggaccgtgttcacctttttgatgctgatgtgcactttgaaaagtacttgggggttgttcttgctgctgacctttttggacataaccttcctgctactgtgcatcggcacctttatcgataacaacaacctcaagatggccggcggttatttcggcatcttgagtagttgctgtggttggtactcgttatactgttccgtggtgagcccatccaactcgtatctggccttcaaggcacacacaatgcccaacgctccttaa

SEQ ID NO: 612 - DNA, 2529 bp, Saccharomyces pastorianus
atggttgctttcactgttgaccaaatgcgttctttaatggacaaagttaccaatgtgcgtaacatgtccgttattgctcacgtcgatcatggtaagtccactttgaccgattccttggtccaaagagccggtatcatttccgctgctaaggccggtgaagctcgtttcaccgataccagaaaggatgaacaagaaagaggtatcactatcaagtccactgccatctccttatactctgaaatgtccgacgaagatgtcaaggaaatcaagcaaaagaccgacggtaactccttcttgatcaacttgatcgattccccaggtcacgtcgatttctcctctgaagtcactgccgctttgcgtgtcaccgatggtgctttggttgtcgtcgacaccatcgaaggtgtctgtgttcaaaccgaaaccgttttgagacaagccttgggtgaaagaattaagcctgttgttgttatcaacaaggttgacagagctttgttggaattgcaagtttccaaggaagatttataccaaacttttgccagaactgttgaatccgttaacgtcatcgtctccacctacgccgatgaaattttgggtgacgtccaagtctacccagccaagggtaccgttgccttcggttccggtttgcacggttgggctttcaccatccgtcaattcgccaccagatacgccaagaagttcggtgtcgatcaatccaagatgatggaaagattgtggggtgactctttcttcaacccaaagaccaagaagtggaccaacaaggacactgatgccgatggtaagccattggaaagagctttcaacatgttcatcttggacccaatcttcagattattcactgccatcatgaacttcaagaaggaagaaattccagtcttgctagaaaagttggaaatcatcttgaagggtgacgaaaaggacttggaaggtaaggccttattgaaggttgttatgagaaagtttttgccagctgctgacgctttgttggaaatgatcatcttacacttgccatctccagtcactgctcaagcttacagagccgaacaattatacgaaggtccagctgacgatgccagttgtattgccatcaagaactgtgatccaaaggctgacttgatgttgtacgtctccaagatggtgccaacctctgataagggtagattctacgctttcggtagagtttttgccggtactgttaagtccggtcaaaaggtcagaatccaaggtccaaactacgttccaggtaagaaggacgatttgttcatcaaggccatccaaagagttgttttgatgatgggtagattcgtcgaaccaatcgatgactgtccagccggtaacattatcggtttagtcggtatcgatcaatttttgttgaagaccggtactttgaccaccaacgaaacctctcacaacatgaaggtcatgaaattctccgtctctccagttgtgcaagtcgctgtcgaagttaagaacgccaacgacttgccaaaattggtcgaaggtttgaagagattgtccaagtccgatccatgtgtcttgacttacatgtccgaatccggtgaacatatcgttgctggtaccggtgaattacatttggaaatttgtttgcaagatttggaacaagaccacgccggtgttccattgaagatttctccaccagtcgtcgcttacagagaaactgtcgaaaccgaatcttcccaaaccgctttgtccaagtctccaaacaagcataacagaatttacttgaaggctgaaccaatcgaagaagaagtttctttggctatcgaaaacggtgtcatcaacccaagagatgatttcaaggccagagctagagtcatggctgatgaattcggctgggacgtcactgacgccagaaagatctggtgtttcggtccagacggtaacggtccaaatttggttgtcgaccaaactaaggctgtccaatacttgcacgaaatcaaggattccgttgttgctgctttccaatgggctaccaaggaaggtccaattttcggtgaagaaatgagatccgtcagagttaacatcttggacgtcaccttacatgccgatgctatccacagaggtggtggtcaaatcatcccaaccatgagaagagctacctacgccggtttcttgttggctgaaccaaagattcaagaaccagttttcttggtcgaaattcaatgtccagaacaagctgtcggtggtatctactccgtcttaaacaagaagagaggtcaagtcgtctctgaagaacaaagaccaggtactccattgtttaccgtcaaggcttacttgccagtcaacgaatctttcggtttcactggtgaattgagacaagccactggtggtcaagctttcccacaaatggtcttcgaccattgggccactttgggttccgacccattggacccaacctccaaggctggtgaaattgttcttgctgctcgtaagagacacggtatgaaggaagaagttccaggctggcaagaatattacgacaaattgtaa

SEQ ID NO: 613 - DNA, 1899 bp, Saccharomyces pastorianus
atggagctcccatcaaacttaaaggatctgtatgttgagtggttacaggagctggtcgatggagtaagccctaaacaagaacagctgaaaatagcttatgacaaagcaaggagaaatctccaagataccgaaggtacattttataatcccatggatctcaagaaagtgaaggggattggcaatacaatcattaagagattggattccaagttgcgagaatactgtaaggcacagggaatccctcctctggagctgcaggcctcgacgaaaatggctactactagaccatctaagagaactacaacagtcttacgcagtatagaaaatttgagcgaaaacaacaaggatgaagataatgaagaggggggtgctaagaagaaaagagtcagaaaatacatacccaaaaagagatctggaggctacgctattcttctttccctgcttgagctaaaggccataagtcgaggtgttagtaaagagcaaatcgtcgagcttgcgggaaagtatagcgaacactgcatgacccctaacttttctacaaaggaattttatggtgcttggtcatccatcagctctctcaaaaaacattctttagttctcgaagaaggtaggccgaaaaagtattcactcacagaagaaggtatacaattaacaaagagcttaaagatagcagatagaatctcgtttttaaaagaaagttgtgagaccgatgagcattctgcaattagaaacgaaaccagcgaattcacggcaaatttgagtgacctccgtggtgaaaatagtaaggaagaagagatcaatcacatgaatgacacctcatccatgttagacattactttccaagatctaagcacgccgcaaaggccacagaaaggtttgcttaaaaaccaaaggctgcgtactcaatccgatttatcccctcatgtatcaaaagaggtcttcggtaaccagccaatttccagcactctgttgaaacgtaaaaataaaaatgtcaggagaagatataatcaagtgagttatgagttgtggaataacggtgattttgaaattttcccaattattgaccatagagaaataaaatcgcaatctgatcgtgagttcttttcaagagcgtttgaacgaaaagggatgaagtcggagataaggcagctggccttaggtgatattatatgggttgccaagaataagaataccggattgcaatgtgtgcttgatacgatagttgaaaggaaaaggctagacgacttagccctaagtataagggataacagatttatggaacaaaaaaataggttagaaaaatctggttgcaatcacaagtattaccttattgaagaaaccatgagtggaaacattgggaacatgaatgaagcactgaaaaccgctctttggctcattttagtatactacaaattttccatgataagaacttgcaattctgacgaaactgtggaaaaaatacatgcattgcatactgtcatatctcatcactattctcaaaaagatctcgtggtgatatttccaaacgacctaaacagccaagatgattataaaagaattttgttacaatttcgcgaagaatttgaaaggaagggtagcattgaatgttgccacaatcttgaatgctttcaagaaatgatggggaagggagatttgaagactgtcggtgagttaactattaatgttttgatgcttgttaaaggcatatctttagagaaagcggtagccattcaagaaatatttcctacgctgaataaaattctgatggcttataaaacatgcgcttcggaagaagaggcaagattactaatgttcaataacctaggagatgcaccaggcgcaaagaaaataactaaaggcctttcagaaaaaatatacgacacctttggtaaaatgtaa

SEQ ID NO: 614 - DNA, 1014 bp, Saccharomyces pastorianus
atgatggacaagcacaagtatcgcgtggagatccagcagatgatgtttgtctccggagaaatcaacgatccgcctgtggagaccacttccctgatagaagatatagtaagaggccaggtgatagaaattctcctgcagtcaaacaaaacagcacatctcaggggtagcaggagcattctgcccgaagacgtcatttttttgattagacacgacaaggcaaaggttaaccgtttgaggacgtatttgtcgtggaaggatctacgtaagaatgccaaagaccaagacgccagtgccagcgtagcagctgggtctgggaatcctggagccgggggtgaagacgacttgaaaaaggcaggtggtgtggaaaaggaagacaaggatggcgggaatatgatgaaagtcaagaaatctcagatcaagctaccatgggaattgcagttcatgttcaacgagcatcccttggagaacaacgacgacaacgacgacatggatgaagacgaacgagaggccaatataattactttgaaaaggctgaaaatggctgatgacagaactcggaacatgaccaaagaagagtatgtgcactggtctgattgtcggcaggcaagttttacatttagaaagaacaaaagattcaaggactggtccggaatatcccaacttactgaggggaaacctcatgacgatgttattgatatcttggggttcttgacttttgagattgtttgcgctctgacggaaacggcactaaagatcaagctaagagaacaggtcttgcaaacacaaaaggacaagtcccaacagtctaaccaggaaaactccaattttgaattcacctcgtccacagttcataggaaaaaaagattattcgatgggcctgaaaatgttgtcaacccgctcaaaccaaaacacattgaagaggcctggagagtactgcagacgattgatatgaggcatagagctttgacgaatttcaaaggggggagactaagttctaaaccaattatcatgtaa

SEQ ID NO: 615 - DNA, 1287 bp, Saccharomyces pastorianus
atggaggaactaggtattgtgacatccgctgaaaagactgtggaagagaagccaaccatcaaatcatatggatcgttgttggctcaacttaatggcacagccaataataacaatgccctatctaatgtgaattctgatatatattttaagttgaagaaactagagaaggagtatgaattgctgactttgcaggaagactatattaaggatgaacagcgccacttgaaacgtgaattgaaaagagcccaagaagaggtaaagagaattcagtccgttcctctagttattgggcaatttttggaacctattgatcaaaatacaggtatcgtttccagtaccacaggaatgagttatgtcgtaagaatactgtccactttagaccgtgaactattaaagccttccatgtctgtggcattacaccgtcattcaaacgcgttggtcgacattctgcctccagactcagattccagtatatctgttatgggtgaaagtgaaaaaccagatgtcagttatgcagatgttggtgggttagatatgcaaaagcaagaaatcagagaagctgtagaactgccattagttcaagcagatttatatgaacaaatcggtattgaccctccaagaggtgttctattgtatggtccaccaggtaccggtaagacgatgcttgttaaagccgtcgccaatagtacaaaagctgcattcattagggtcaatggctccgaattcgttcataaatatcttggtgagggtccgagaatggttcgtgatgtttttagactcgccagggagaatgccccatccattatattcatagatgaagtggattccattgccacaaaacgttttgatgctcaaaccggttctgatcgtgaagtacagcgtattttgattgaactattgacacaaatggatgggttcgaccaatccacaaacgttaaagttatcatggccacaaacagagcagacacactagatccagctttgctgagaccaggtagattagatagaaagattgaatttccctcgcttcgtgatagacgtgaacgtcgtttaattttcggtactattgccagtaagatgtcacttgccccagaagcggacctagactcgctaattattcgtaatgactctctatcaggtgctgtcattgcagccatcatgcaagaagctggtttgagagccgtcaggaaaaatagatacgtcattctacaaagcgatttggaagaagcttacgccacccaagtcaagactgataataccgtggacaagttcgacttctacaaatga

SEQ ID NO: 616 - DNA, 2835 bp, Saccharomyces pastorianus
atgttacaagaacaggaaattttgagctgcattgagcagactatggttgctgacgccaaggtcatcaagcaagccgaacagcagctatttgagttccaaaaacaacctggtttcacctcctttttgctgaatatcgtgtccgatgagagttttgcattaaacgttcgtctatcttctgctatctacttgaagaataagatttacagatcatgggatactaagagagaagacggcattaaacctgacgagaagctttctataaaggaaaacttgattcagactttagtcaagaactgtgaaaacaatcacattagacccgtcttgactgaaactataaatgggattcttgttggtcaagaagactgggatctggcacctattattaaaaatctgttatcgagtggggatgcattatacatctaccctgggttattgcttttatttcaggtttgtaaagctcatagatgggatatggttggatcaagagagtatatagactccgttatcgaagaacttttccccgttgtggaagggatagcctctactttttgtagtcaaacagattacagatctaacgaaatattatacttgattttgaaatcattcaaatatgcctgtttgaataacttaccgcaatacttcagtcaacctgaaagaattatgtcatgggtgcaattacatttgtatttgtgttccaaaccattcccggcagaagtaatggaactagatcccgcagacaggtccctagacaagagagtcaaagtcaacaaatgggggttcggtaatttgaacagattcctgcagaggtacaacaaagtcacaaaggcaattaccaaggaattcgttgactacatctttgacacaattgttcctacgatccttcgagaatatttcaaagacattgaagcttggggtagcaattccttatggttatcagattcttcattatacttcttgatttcatttttggaaaaatgtgttacaattgatcagctttaccctttgatcgagcctcacttacaaattatttttgaaaacgttatcttcccatgtttgtgtgctaatgaacaatccatcgaattattagaagatgaccaagaagaatataccagacgttatttcgatattaacagagaaggctctacaccagatgctgcttcagcagatttcatattcctaattggttctaaacgccctgagaagttgaatagtatcctaccgtttatcaatgacgttttcaccagattcagtgccaataatgacgatttgaccatggccttcaaagaagagggtgctttgagagcattgtctaacttgttttcgtttattgacgaacctactattttggaaaatatttttaaccacttcattatcccattgttatcccaggataaatacatgtttttagtcgcgagaagtttggaaactatagcactatactcagaggaattcaaagacatgagcgtcttgtctcaattgtttgaactaacatatactaatttcctaaacagtaatgtcttaccagttcaaattgaagctgcggacgctattaagtgtttgattgtatctaatccccaaattcacccagccgtctctgcacatgttccgggaatgatggaaaagttactgaaattgtccaaaatctttgaaatcgatatcttatctgaagtcatggaggcattggtggaaagattttctgatgaactgtccccatttgctaaggatttagcatccaatttagtagaacaatttctacgtattgcccaagctttggtcgaaaactcatcagagacatacagcgcaagcgatcaagaacaagaaattcaggctagtgggctattacaaacaatgactactatggtcatgtcgatgaacaaggtttcactaatcgaacctttggcacctgtggttaaatttgttgtccttcatgcacaaatttcttttattactgaagccgtcgatttactagacgccttgacaatttcatctcacttactttataaccaaatctcaccttcaatatgggaattgatgcacgacatattggattctttccaaacttacgctatggactactttgaagcatacagtatattcttcggaaccattgttatgacgggtttcccacaagatcaaacttatgtacaacctttgttggaaattttatccgttaaaatggaaagtgaagttgattacgatattgaacatgttatgcaaatcttaatgtattttgcattatctatgagagatatcccactattcagtaaagctatcaaagtatccaccaacgatgagcttggattggattctaaatgcattgttaaattgggtctggccaatttgtttgccaaaccaatagaaaccttacaaatcatggaaaccgaagggttcacgataaattttttcagcaactggtttaacgagaacttttacagtgtcttcactattaaattacaggtcttggtaattttgacccttttgaagttacctgaaattccaaatagcgtcagcccgctcttaagtaatttgacaaacaagttggttgacctgacactatcattacctaaggccataagaaatcgtgatgctgtcaccgagggcaagtccttggaaggcgatttgactccggaggaggaagaagaatacttcattgaatgtgatgacgatatgaaggagaccgtattggaccaaatcaatgttttccaggaagtacatgcattttttaagaatctacaaaatgaggacgccagtaaatatgaaaaaactataaactacctggacgaatctaagagagactcgctggaggtaatcttagagtttgtttctcagaactaa

SEQ ID NO: 617 - DNA, 1932 bp, Saccharomyces pastorianus
atggactcccctattgtacattccgcttacgacccgtccggtcaatatctgtgctatgtcactgtagctttggataagcaacgtgttggtgtgcagcccactcaaagagctacttcctccggaatcgacactgtatggaacgaaaacttcctgtatttggacgactctaatttgaaagttacgtgcttgaagtgggtgactttggcctcttcagacactgtggctattatactgggtatgaataacggtgaaatctggctgtattccgtattggcgaacgaggtcacttataaattcactacgggaaactcgtatgagattaaagatctagatttgatgggcgaccagctgtggtgcattgactccaacgacatggtttaccagttcgatcttttacaattcaaattattacagcattttaaaataaacgactgtgtccaattgagtagattggccattgttcccgcagccaattcagctacgcaactcttggtggcatctcattccatttccttgattgatatcaaagagaaaaaagtggtaacgacattcccaggtcatgtatccccagtttccatattgaggaatataaccagtgattatttcatatctggtgcagaaaacgacagatttttgaatgtatacgacatccactctggtatgaccaaatgtgttctggtggctgaagcagatatcagagaagtatcccattctggtcaagcagactctattgtagtcaccactgaagatggtaatctagagatctttgtcgatccattaatttcaaattcaacaaagaaaagaggtaacaagtctaagaaatctaccaagaaggtccagatcgctagtaaagatagcaaaaaggttccgatttataatgccttcataaataaagacctattgaacgtttcgtggttacaaaacgctacaatgccatttttcaaaaacttgcaatggaaagagctgcctaatgaatacaccgttgagataactttaggtttgaatatcaaaaataagtccgccgaccgtgatttacatggcaaagatctcgctgcagccacaaactatgtggaaggtaatgcaagagtcacttcaggtgataactttaagcacgttaatgatgctattaagagttgggaaagagaaatgacgtctttggaacaagaccaatccaaatccccagggacaaacgaactactaaccgaatcttttggtgataagctggaatcgggcaccattgcaaggctcaacgggaaaaagaacaactcgaaaacttccaatctcaagaccgcgactacaacaggtacagtcacggtcatcctgtcacaagcattacagtcaaacgatcattcgctcttggagaccgtactcaataaccgtgacgaaagagtcattagggatacgatttttcgactacaaccagccctggctgtcattctattggaaaggttagccgagagaattgcaagacaaactcaccgtcaaggaccactgaatgtttgggtcaaatggtgtttgatcatacacggtggctatttggtttccattccaaaccttatgtctactctgtcttcgttgcattccacattgaaaaggcgttccgatttgttaccaagactgctagcactggatgccagactggattgcactgtaaataaattcaagagtttgagttacgaaacgagcgatgtctactcgtcagaaacagttgttgatgacgatgaaagtgacgttgaatacaatgaagaactcgacgatgccggccttatagaggatggcgaagaatcttatggaagtgaagacgaagaaagtgatagcgacgataacgaagaggagaaaaacgtctctccaaaacaagatggacgcgtagaagaagagcaggtcgaccacgaagaagaggaagccggttatagtgatgttgaaatggaatag

SEQ ID NO: 618 - DNA, 1611 bp, Saccharomyces pastorianus
atgacattaaacgacaaaattcctcaaggccctgagcagacagactcaccacctacgtcttcttattcctcttcgcctgaaatattgaaagatattatcattccccacaatgggcccgatttatccacgtatagtaagtttctagctctctattgtagaagtgataagaacgatgacttctactctttagaagagaaacaaaactgtaagttcggagagcaatggtctactttcgttgataccattaccggtttggattgttctggctctaaagtaagcggtaggataacggagagaattttgccatcttcattagctaacaagtttactaataatttaggagtggcaatcaaggtttctgaatatacccgcgatgatgaatgccaaatccgtggttgtgttactacaattgagaatgagaacatgtttaataactggttcatatatcatattttggaccaatcccggctatccttaagtgagcatccaattgtagccaaagaagtcaaatatcatgaattatttgctgacttctttgcaaaaaatttaaaaaacacaatcgttaatgaccaatggaactttggtggtcgtgattactttgttgaacgagcaagatacttcaccgatcgatatttgagaattgaatgtattttgccagctttcccatgcaagtcgtccaacgaacaaaaggtgtatggctcggttcctgataaaggtgaagaacttgctttgaaaagacttatcaaagctacagaagaccttgctgacatatatccaccaggtatgaagatttggattgttagcgatggccatgtgttttcagactgtattggggttgatgatgatgtcgttaccacgtatactactaaattgcacgaactatataaaagagttgccattccaggcgttgacgctattggattttgtgggttaaatgagttgttctttagcggtgcagctggtgacatttttaatccggattgggtttctgatactgaagtggcacattatactggaactcaaatttgttcaaagtctgatctgtcaagacaaattttgatgaaaggctgtgacacagacgcaggtcgtttgaaaaagcagattgccatacaagatcatccaagattgcatctgtatagaggcttttcacggtttatgatggaggacttgtctttattgacgcattttcagaccttttcaagaaagaaatttaagaaaactatttcgaaaattgcgtttaacatgattaaaagaaatgacgcttattcgaatttggtagaattgatattcccacaccatttaagaatttctattcatgcgcatactaatagcggaccaaaattcggtatcaaagtgatttccaacgatcagtgttctattgtcagctcattggaagacctagaagaacctgaatttgaagatttcttacatattccaacgccttggcataattgtgtcgtcaaggtggaagatgaaaaggagaaatattttttgacgaaatcgaaagtcatcaaggatgcccttgagaagggaatgtatgacggtgaatggaaagacacccgtttcgacaatggagaaggggggcatttcgtcatcaagaaaatctcttaa

SEQ ID NO: 619 - DNA, 516 bp, Saccharomyces pastorianus
atgtttttcattaaagacctttcgcttaatatcacgcttcatccgtccttttttggccctcgaatgaagcagtatctaaagacaaaactactagaagaagttgaaggctcatgtacaggtaaattcggttacatcctttgtgtactagactacgataacatagacatccaacgtgggagaatattgcccaccgatgggtcagcagagttcaatgtgaaatatagagccgtcgttttcaaaccattcaaaggggaagtggtggacggcacagtagtatcatgttctcaacacgggttcgaagtacaagtaggtccgatgaaagtattcgtaaccaagcatttgatgcctcaagacttgacattcaatgcaggctcaaatcctccgtcgtaccaaagttcggaagatgtcattacaataaaaagtagaattagagtcaaaattgaaggttgtattagtcaagttagttccatccacgcaatcggtagtatcaaagaagattacttgggtgctatttaa

SEQ ID NO: 620 - DNA, 645 bp, Saccharomyces pastorianus
atggccaggattgtcgttttgatatcgggctccggttccaacttgcaggccctaatcgatgcccagaagcaaggccgattggacgacgatgcccacattgtctctgtcatatcttccagtaagaatgcatacgggttgacgagggcggcagacaatggcatccccactagggtccactcgctgtatccatacacgaaagccatcccgaaggaggacaaagctgcaagagccaatgcgagaactcggtttgagaacgatcttgcgcggttggtccttgagaacaagcccgatgtaatcatttgtgcaggctggctgttgattctcgggtccacctttctgagccaactacaatccgtgccgatattgaatctgcatccagctctaccgggctgtttcgacggcaccacgcacgccatcgagatggcgtggcagaaatgccaagatgaaaacaagcccttgatggccggatgcatggtacactacgttatcgaggaggtcgacaagggcgagccattggtggtgaaacagctcgaaatcaccccgggcaaggagacgctggagcagtatgagcagagggtgcatgctgctgagcacgtcgccatcgtggacgctactcagaaggtcttgcagcagctccgcaagtga

SEQ ID NO: 621 - DNA, 708 bp, Saccharomyces pastorianus
atggctgttcacactaatagacagatccttacgaggggaaagaactatgctacaaagcaatcaaagaaatttggtaccgatgaggtaacgtttgacaaggattcccgtcttgattatttgaccgggttccacaaaagaaaagtgcaaaggcagaagaaggcacaagaattcaacaaggagcaggacaggctcaggagaattgaagaaagacagaaagttcgtcaggaacgtaaagagataatggaagagcagttaaagacgtttaaagaaagtttgaacttggaggccgagatagaagatgcaaaaaagggtgatgttgacggtgccaaggtagagtctgacgattcctggcacgggtttgattccgatgaagaagaagtcgatggcgacaaagaaggcaacgacgtgaagcccattttgaagaagggcgccgttactgaaatatacgatgactcaactacagtagaagtggaatccttggagcccaacgataactttgaatatttggccaacttgaacaatgtcaagttggaaaaggcagaaaaagtgctcacccaaagcataaacagagctaccaaatacgccaaatttttaggtgtggatgacaagcagaagaagaagccaaaggtaaagaagtttagatatttgaccaagaatgaaagaagagtaaaccaaaggaaggctaacgacaataagcgcaggagatga

SEQ ID NO: 622 - DNA, 1089 bp, Saccharomyces pastorianus
atggagaaaagtgacatcgcatctaaaggactgtacttctcaactgtattcaaagttccagctccacagcgtttcattgtacttttggtacttgcactttggatctggacatggatattaagatttttctcgcataacagtttggacatatctcaagttatactcaccagagtaccgcatgacatacgtccaggctatactttaccgcaattgcatagaacagcaaggaattttgctctcaaaataacacggctcattatacctttccatttcatcactgtgcttcttttcgaatacaagaatgttgcagaagcgccagccaataacattgttttagttgttttttttttacccttactccagtctatgatcatattttggtttttactaagagattgtcaaataataaattattgtgtcaggagatgtctgcttattgaaccgtcaccgcgctccttaagaaacacctatatcttgctctctgatacgttaacatcatttgcgaaaccattgatagacttcacattattcagctcattgatattcaaagaacccttcacgcattttgacttatccgttgctcttttccctgtattggtcagattactacaatgtttaagagaataccgcttactgcgcgataaaacattactatttaatgcattgaaatacagctgtaacctccccattcttttttgcatttggcaatcaagggtgtatgagggctcaatcaattcagaaaggctgctccacgcgcaaagatggttcatgctactcaattcttcgtataccttgttttgggacataagaatggactggtcgctggattcgttgtcaaatttaaggtccaaatctaagagtgtagttacattgaaaaaaaacatgtatcattttgcgattgttatcgattttgttcttaggttttggtggttatgggtctacttgttccagggtttggaattcgtagctcctaatacagattgcctttttttccagggcgaaatgcaatatttggaagtgattagaagaggtatatgggttattttcaaactagacgcggagtattataccaaatgtgtaagcaaatga

SEQ ID NO: 623 - DNA, 1128 bp, Saccharomyces pastorianus
atgaagataaaatctctcttagctttggttggaggtattgtaacaacagtgtggtccctcccatccgagcctttaagggtgttacaattgagtgaaaatgaaatgatagaagttcctgaatcagaaaaactgaacctccgtagaagaggtgtcaagttttttgatgtgaccaagcatgtttcttctttatctttttttaacaaagaacaggagccggaagtcccagtatatgcatatcccactgatatatcaaataaaggaatcgtggatgacttaatttccaatattgacaaggattccatgtacaagaacttggcaaagttcacgagtttttatactcgttattacaaatccgaatatgggtttgaatcagccaattggttagctaccactatcgttaacattacggagggtgtttcacaggatatcttaactatcgatcattttgaccatgttgagtggaagcaatattccattatcgttcggattttgggactcacaaatccagaagatgtcatagtggtcggttctcatcaagattcgatcaatttattattaccatctataatggcagctcctggcgcagatgacaatgggtcaggtacgataaccaacttagaggccttgaggttatatgtagaaaaatatttgaaggtgggccacagacctaataatactgttgagttccatttctattctgctgaagagggtgggttactgggttctcttgatgttttcaccgaatacgccaagcagggaaaacaagtgagagcaatgctacaacaagacatgacaggatatgtgtctaatccaaaagatgaacatgtgggcatcgtgaccgattacactacccccgcgttgaccgattttataaaattaatcattgattcttacctgtccattccttacagggacacagaatgtggttatgcttgtagtgaccatggcagtgccaccaggaatgggtttccaggctcctttgtaattgaaagtgaattcaaaaaaaccaacaaatatatccatagtactatggatactttagatagattaagtttcgatcatatggccgagcacacaaaaattgttttgggaaccatcattgagctcgggttttggtctacctggtaa

SEQ ID NO: 624 - DNA, 498 bp, Saccharomyces pastorianus
atgcctccaaagtttgatccaaatgaagttaagtacttgtacctgagagctgtcggtggtgaagtcggtgcttccgctgctttggctccaaagatcggtccattgggtttgtccccaaagaaggtcggtgaagatatcgccaaggccaccaaggaattcaaaggtatcaaggttaccgtccaattgaaaatccaaaacagacaagctgctgcttctgttgtcccatctgcttcttctttggtcattactgccttgaaggaaccaccaagagacagaaagaaggataagaacgtcaagcacagtggtaacattcaattggatgacatcattgaaattgccagacaaatgaaagacaaatctttcggtagaactttggcttccgtcaccaaggaaattttgggtactgctcaatctgttggttgtcgtgttgatttcaagaaccctcatgacatcattgaaggtattaacgctggtgaaattgaaattccagaaaactaa

SEQ ID NO: 625 - DNA, 1893 bp, Saccharomyces pastorianus
atggatcgcaacatatttgacgggcttcaggagcaacacagcagcgcctcagagatggacctctcagaggaagacaacaacccgttcgtgggaacccatcacctgtatgcctctggtatcgggactggtatcggtggagcccgtcccacaaacacaaacacaaactctccgccctcttcgtcgtcttttccgacgagtccagtgcattcttcatctgctggctcttccagagcatccaccgcctcttctacatcttcgcatgccgttgtggaggctgaggctgaggctgagactgagccgtttgtttccttgtcaatgtctactactactaccacccccaagaatattcctcataatgtgaatggaccagaacatatccagattatcgatgctggcgatttcaaagacccctgggggaaacacgctattggctatgtaattttatatgaaaacaacaagattattagaagatactcggagtttcattcgttgaggcaatccctggctagactgctgcctacgataattattccacctatcccatccaagcactctctcctcaaatatatatggaatcccataaatgccacgaatgactccaaggtcatcaccaccagaaagaaaatgcttaattcatttctgtgcaactgtttgaacatcgaagagataaatgatgacatcgtttttcaaaaatttctgaaccctgagttcaattggaaagacgttttaagctcatcgccgataataatcctaccattgaataatcttttagctccacctctaagcccaacaaaaccaagtcctttgcattctatactacccattccgtccaactcttctctgaaaaattataacttgatatggcaacaacatatcacaatgaaaagtcacaacgaagtctctaatctaccaatagaggttattcaaaatgagccacaatttacacatattgaaaatctatttcaaaactacaaaagaataatagctctcctgctgaaaaatataagatcaaataagtctcatttccactcgttatccacgtattttgccgaattgggtgcttattataatgcctttagtttggaaaacgataccgccatgcctaatggtgacgacaaacatagaagaaatttaaacaatccaatgttagaaatcatcggtcacatcgaaaagataggccattcattcgatattatatacatatcttcagaaattctaattgaaaaatacaattctatgctggaggaccccattaacgaattgtcacaatttctaaatgaatcattcaaagttctaaattttaaaaaattgaagtttttgcaatataaaatcttggagaaattaattatcgaaaaggagaccaaattaaccaaccttaccgaaatcgaaaaccaactgcaaaaaattaatgataacctggcaaactccgctatgttggcagacgataataatatgacggatacgaggggcaatgagccaaacgctgttaaaaaggacacaaggtcgctatcgaagtcaagtacaaactccagttccagcggtcaccaaaatgaaattcgtataggaacaagcaaactaaactacaaaacatctacacccacaatgaatttgaacaaacttgaaatcaaacaactaacagaacaagagagatctaaacagattaaacaactgacacaggatttaactaagttgaaggattgtctgtccatatgcgtatcggatatgctagaaataaacacttcatcgtacaagagtttgatgtatgcatataatcacatccacttgaccatcgccaagatcttaaaatttttcacaaccaatttcaaagcatggatcagagaatgtctagagaattggaaactagccaagtcgcaaatcgaccaatcattataa

SEQ ID NO: 626 - DNA, 786 bp, Saccharomyces pastorianus
atgtcaaataccgtaagagccatttcaccagatataacactattcaacaagacattgacattccaagaaatctcacaaaacactagagaggctgtcatatacattcatggaggtgcatggaacgatcctgagaatacgcccaatgattttaatcaattagccaataccatcaaatcaatggatactgagtcaacggtttgtcaatactctatagaatacaggttatcaccagagatcacaaatccaagaaacttatatgatgctgtgtcaaatataacaaggcttgttaaagaaaagggattaacgaacattaatatggtgggacattccgttggagctacctttatttggcagatattagctgcactcaaagatcctcaagaaaaaatgagtgaagcgcaattgcaaatgttgggacttttgcagatcgtgaagagagtatttctattggatggtatatactcattaaaggaactgttggtagaatacccagagtatgattgttttacaagacttgccttccctgatggtattcaaatgtacgaggaagagccctcgagagtaatgccttacgtgaagaaagccctttctcgcttcagtattgatatgcacctagtgcattcttatagcgacgagttattaacgttaagacaaactaattgtttaatttcttgtcttcaggattatcagttaagtttcaagttgtatttggacgatttgggtttgcataatgatgtttataagaatggtaaagttgcgaagtatatttttgacaatatttgttga

SEQ ID NO: 627 - DNA, 825 bp, Saccharomyces pastorianus
atgagtgaagttgcgccagaggagattatagaaaacccagatggatccagatccatcatttcatacaagatcgaagatggtgttgaatacaagattactcagaaagtaaaggatgttaaagtactggaaaaagttcacaaatctgttgcagaaagaaaaaactggaataaatatggttccgaaaaggggtcaccagcaggtccaagtgctgttactgcaagattgggtgaagaagtcgatctaagattgacaaggaactggaagcaagctgaagaagaaagaatacagaaagaaaagggaagtctcacaaagaccggtttacaatgtagattatgtggtaacgaccatatgacaatgaattgtccattcaagaccattttgagtgaactttccgcattagaagacccagcagttagtgaaggcggagctgaagctgtcagtgaagataagggtggccaagctggcggagctggcgccatcccaggccaatatgttccaccttctcgtcgtgctggtgctagagatccttcctccgatgcttacagagattctagagaacgtgatgatatgtgtactttgaagattatgcaagttaatgaaaatgctgatgaaaatagtttgagagaagaggtattgttcccattcgcacccattccaagagtttctgtcgttagaaacaaagtaacaggtaaatcaagaggtctcgcctttgttaccttttcgagcgaagaagttgccgaacaagctttacgtttcttggatggtaggggttatatgaatttaattttacgtgttgaatggtccaaacctaaggttaaggaatag

SEQ ID NO: 628 - DNA, 987 bp, Saccharomyces pastorianus
atggagagaatcattcagcaaacagactatgatgcgctgtcgtgcaagctagcagctatctcggctggataccttccttcgagtgccctacagagattgccagcggatctggctaagaagtacacacagtggcaccgcgagtatttgctcactctcaagaaatttagcaggcgggcctttgggaaagtggatcagactatgcgatcttccttcccagtgatgaactacggaacttacttgcgtactgtggggatagatgtggccatattggattttctggatgcgaatgaaaaagttcaagttgtcaacctgggttgcggttcagatttacgaatgttgcccttgttgatgatgtttcctcatgtgaggtgtgtagacattgactatagtgactcagtgcagctgaaaaataaaatactgcgtgagaatggaactttgcgtaatgaccttgacttgtcagaagatagtgccgactcatcaccggttttggtagatcaggaaaggtataaactcattgcgtgcgatttaaacgacatcttaaaaacaactcgcctgttgaatacgtgtaccagcggcgacattcccactatcataatatccgaatgcttactgtgctacatgcatgaaaaggagtctcaactgctcatacacgcggtctcagcgaagtatgcccatggactatggatatcgtacgaccccattggcggttctcagcccaatgatcggtttggcaccattatgcagtccaatctaagggaatcgagaaatttggaaatgcccactttgatgacttataattccaaggagaaatacgcttcaagatggcccgaaactctgaacgttatcatcaatgatatgtgggaagttttaaatacacagattcccgaaattgagaggaaaagattaagatctttacaattcttggatgaattagaggaactaaaagtcatgcaaacccattatatcctcatgaaagccgaatggtga

SEQ ID NO: 629 - DNA, 423 bp, Saccharomyces pastorianus
atgtatacaaaagagtactactggttttcccagtatatgataataacaagtaccttggtgctcaccataatatggtcaatcctaccatcgtccttcggtgaggctaccccacagcagttcgtcaacacgatactagacatctttccgcagaggagatggatcatcactctggaaggcataatgcttatgggcatgctgtgtatctacaccggtcttctgatgtacaatgaagactcgttaaccccaccactggattccttgtccacagtgacggatgcgggcggccagctcgtaatactggaagacacagtcgagtttgtcaagaaatgggcatttaaggaaacaagtgggatttacgatctgcccctgatggatgcctgccaactcttgtacctgtacgataacgaagatgccaacacatag

SEQ ID NO: 630 - DNA, 1050 bp, Saccharomyces pastorianus
atgacaactttgttgcagcttttgtcaaactattataaagctaaactagaatcggaacgaatatataatgagtatgttcaatcgcagtacgagtttgcctcttcggacaacttgaacaataacaaagataaccagttttcgaagaaggttgttgatgaaactttattcttacagcgacagattgctcaattaaataagcagttacagctttcatttcaacagaatgagaaattactaaatgtacagaagaatcaaaaggcactataccaaagtaaattatccaacaaagacacacttatcgatgacctaaaactcaagctaaaagttgagaagatacccataaatagagaaaggacaccctctatcacttctgatgagcaacgagacaatttaaaatcgccgcataaacccacgattcatcttctttcgccaattgttaaccgtgataaaatcaaaaatcaaactaaagaccaaaacaacaacgaacctgactcacctatatcaaagagaaaatcaaaagggttgagatctttattgagttcggggaaaaatacaatctttgattcaatatccaagaatctcgacgatgagattaatgaaaatggacctatgagacaggataatgaatcttctaagacggcagataaatcagtatcaatatcaccattgctttcaaaacccgcagaatcgcataaggaaaagaaaaatagtatactgaaagaatacatatttccttcgaaggatgaccatttggcggatcatgatatactgccacctagaaaactagataatattgagctgtcgagtatcggtgattcgaccacgatgacatctaggagctcaactgccaatacaaacgacacattgaggaacgaagaaaatcgtcatggaatagacaatctaaaaagaatcaacaccttggtcagttccccagtcaagggcgtatccgatacaaaaaagaaaagaaaactaacgaggcaacggatcaccacattgcccaattcagatgaggaactgaataacgatttaaatatagatgagtttgtgtaa

SEQ ID NO: 631 - DNA, 546 bp, Saccharomyces pastorianus
atgtccgcttctgaattctacgcaaaggagattaagagtgcatttaagcaatttactgacttccccatagagggagagcaatttgaagattttttgcccattattggaaacccaaagctattccagaagttgatcaacgctttcgcaacacatttacaggaaaaatttgttaccagaaagatcgattttattgcgggtgtagaagctagaggtcttttgtttgggccgtccgtagcattagcactgggcgttggattcgtaccaataagaagagccgggaaactaccaggtgagtgtgctacagtaacgtttacgaagctggaccatgaggaaactttcgaaatgcaagtggaagccattccctttgattctaatgttgtcatcatggatgatgttcttgccaccggcggatccgcaatggctgcaggtaatctcatcaaacaagtgggtgcccatattttggaatatgacttcgtactaacgttggatagtttgcatggtgaagaaaaactagctactcctatcttttccctattacattcctaa

SEQ ID NO: 632 - DNA, 915 bp, Saccharomyces pastorianus
atgactgtcataaaaaccgagccttcaaacgaggttgcgttgtattccccaacagcaaatgaatctttgaataaaaatgaaaccgtaaaaaagagagaaaacaataaacaatctccttcttccaatataaatagccgctcaagtataacgaagcataaagttgctgccaaggcgccggaaaaaaagtcaaaggattcagaaaagcaagatctttctgcttttttgttaaatccttcgctgattgtaaaaccttcagaggggaaaaggaaagaaaatgctgtggcagttagcgacacaccaaatgttaagaccgagcccacaggatttcagttgctgaccccaatttcaaagaaaagggctttaaaagaaaaaccaacatctggtaaatacgataatattgatttttcgaaggaggagagagcttacaaccaaaaaaagccaaaaatactttctcctgctacagagacttccccctctgaatataagttctcgtcaattgtagaaaatgtatcatctccggctaaacaaaaatcacaggaactaactgaaaatcctggtgagtaccagaaaatacaaaactatctgttcgacaaaccaaatcttttagatacgtgtctccaagactactctagtatgttacctgctgacatagcagaggaggatcaagaattttttattagtgtagccgattcgacattggaagagtggacaaacaagggccaggaaatccttgatcagcaattccaactctaccaagaaataataaagaaacgaatagaattgagctacaaattcaaagggattatatcagtcatcaatgatagggcagacgccttggaggaacaaggccagcaattagagggaaaaatcaagaaagtcaagagtttagccaatgaaattctcgacattatataa

SEQ ID NO: 633 - DNA, 1074 bp, Saccharomyces pastorianus
atggaaagcagaaatatggtgcttccttctctaccggccattcttacaagtaattctagctcgccttttcagatgcatgttctaccaaacacaaactttcccagtgatgaacagggtgttatcaggctcccacccttggctacgtctgtgcaccttccaagaccggttgtaagcacttgtaaaagcccatgcgatgaggcaaggtcgaacagtaatagcccgcaacctctgagcttcctatcgcaacgcttggctacttccaggacacctttatccaaatccaagaagccgagttctcattccccttcaccctttaccccaacaatcaagaaccctaccaaaggacagccagctcagggtacgcattcttatagaaaagttaacattctcacacctttatctgcagctaaagccatcctgacgccacgagcaaagggtgacaaaaaaagatcatttgcattcattacacattcacaagaaacgtttcccaaaaaggaaccgaagatcgataacgctcggttggctcgtcgaaaaagaagaagaacgtcgtcgcatgagttaggaattttgcagactgcgttcgatgaatgtcccactcctagtaagaccaagagaacggagttgtccgaacagtgtaacatgtccgaaaaatctgttcaaatatggttccagaacaaaaggcaagctgctaagaagcacaaaaacaacaatggtaatgcaagccgttgcaagattcactccagtgattcgatttctatgatatcatattcagatgctactttagagattacttccaccccaacatgctctagcaagaccattactgcggagttattaaagacctcacctccaaacatctctgcatcgattttcaaagacgatcatattaccccttgtaaaccgggtagacaattgaagttccatggcaaacctgtggttgctagaagaacactaacaagtaccagtcataacgaaccaatcgacagtcttgaaaaaaaagaaaatcatttaaaattcaatgcatatgaaagagtacctctaggagagattgaaatgaactcttttgaaaactaa

SEQ ID NO: 634 - DNA, 2052 bp, Saccharomyces pastorianus
atggttgtagtgggtaagagtagagtgcacgatgtaagcatgagtaggccgcacaagagatcgttgattgccattttttctacctgcgttttggtgtttctcgtgttgataattgatgctaaatttgaatatataacctttttccccaaatctttgagtggtggaggtaaagacaggtctattgaatcgttgagggataaggaatttacaagactaggcttgacacccagagaaccgataattgtaagggatgtaagatctgggaaggataagaaattacatggtaggttccttcatatcactgacatgcaccctgactcttactatgtagaaggaacttccatagatgccgtgtgccattcaggtaaacctgacaaaaagaatgatgttgccccaaagtttggaaaagccatgtctggatgcgattctcctgttttattggtggaagaaactttgagatgggttaaagaaaacttgagagataagattgattttgttatttggactggtgataatgtccgccatgataatgaccggaggaatccaagaacagaggcgcagatttttgatatgaatgatattgtcgctacaaaaatgactgaaatattcagtgctgggaatgaagaagatccaagagatttcgatgtatctgtaattccaagtcttggtaacaacgatgttttcccgcataacatgtttgcattgggacctactcttcaaaccagggagtattataggctttggaagaatttcgttccgcaacaacagcaaaggatatttgatagaagtgcttcgtatttgacggaagtcattccggggaggctcgctgttttgtcaattaatacactatatctatttcaggctaatcccttagttgacaattgtaattcgaagaaggagccgggctaccaactcttactctggttaggctatgtcttagaagaactaagacatagaggaatgaaagtatggcttagtggacacgtgcctccaattgcaaaaaatttcgatcaatcttgttatgacaagtttaccctatggactcatgagtacagagacataattgttggaggattatatggacatatgaatgtcgatcacttcattccagcagatggcaaaaaggcaagaaaatctcttctcaaaaatttggagccgtatagtcgtgttcgagaaggagaagagattgcagaggaggaggaggatgatgatgatgatgatgatgaaactaatctaaatagaattctgggtcatgcaatgactgcaaaagaagcctatttgatgggtgctaagccatctaacaaagaagcatacatggacaccgttcgtgatacacactaccgtaaagtatggaataagctgcaaagagttgaatcggaagataccgtggagagtgaaaacaagaacaaaaagaagaagaacaaaaagaagaagaagaagaagaagccaatcactagacaagagcttattgagcgttattctattgtaaatataggtggttctgtcattccaactttcaatcctgcctttagaatatgggaatataacattagcgatatagcagatgaatccgacttcggtatctcgaaggataaaccttgggatgagttttttgaatcactagacaagattatggaagaatccttactggaagacgaaccggacagcaaaaacattgactcccgaattagcagcgagggctctgacaaaaagaaaaagcgaaagagtgatgataaaacggttccagttgaaatgccagaaggatacggactaggtcccgcgtatgtaccgcaactgtttactccaacacgttttgttcaattttatgccgatttggagaagattaataaagaatattatagctcattggatgagtcgaaggatgttttcaagtatgaagtagagtacacctcggatgagaagccgtactcgatggacacgttaacagtaggaagctatttggatttggcaggtaggttgtatgaagacaaccctgcatgggaacaatatgttgaatggtcatttgcatcttctggctacaaagatgattga

SEQ ID NO: 635 - DNA, 1914 bp, Saccharomyces pastorianus
atgttatctaaggtgttgctaaatatagcattcaaggtgctgctgaccaccgctaagagggccgttgattctgatgacgatgatgaacttcttccttcccctgatctaccggatgtcgatgatcccataacaggtgatcccgatgttgatataagccctgttactgaagaaatgttctcttcatgggccttatgcatcatgttgttcttattaatctctgcattatggtcaggttattacttgactcaaaaacgtataagagcggtacatgaaactgtgctttcaatcttctatggtatggttatcgggctgataataagaatgtctcccgggcattatattcaagatactgtcacgttcaattccacctatttctttaatgtcctgttgccacctatcattttaaatagcgggtatgagctgaatcaagcgaattttttcaataatatggtatccatcctaatttttgccataccggggacttttatatctgctgtcgtaataggtatcatactctatatctggactttcctaggattggagagtatcgacatttcatttgcagatgcattgtctgtcggtgccactttatcagctactgaccctgttactatcctttccatattcaatgcctataaagttgatcctaaattatacacaattatttttggcgaatctttgttaaatgatgcaatttctattgtcatgtttgagacttgccaaaaatttcatggtcagcctgcgacattttcttcggtttttgaaggggcaggcctctttttaatgaccttctctgtttcattattgatcggtgttctcataggaattcttgttgcccttttattgaagcacactcttataagacgctatcctcaaattgagagttgtctaatcctgttaattgcctatgagtcctatttcttttccaacggttgccacatgtctggtatcgtttccctgttattctgcggtatcactttgaaacattacgcttattataacatgtcaagaagatcacaaatcaccatcaagtatatctttcaactgctggcaagattatcggagaattttatcttcatttatctaggcctggagcttttcactgaggtggaattagtttacaagccacttttaatcattgtcgctgctatttctatatgtgtagcacgttggtgtgccgtatttccactatctcgattcattaattggatttatagaatgaagacaatcagatccatgagcggagtcactggcgagaatatctctattcctgatgaaataccttacaattatcaaatgatgacattctgggccggactgcgtggtgctgtgggtgttgctttagccttgggtattcaaggtgagtataaatttactttattggcgacggttcttgttgtcgtagttttaactgttatcatctttggaggtactacggcaggaatgttggaagttttaaatatcaaaactggttgtataagtgaagaagatgtatctgatgacgaatttgatattgaagctccaaggacaatcaattttatgagtggtagccccatgccgacaggtttagggccatattctgataacaattcacctgatgtttcaatagatcaactaacagtcaacaacaacaacaacaacaacaacaagagtgttcctgatcatccatcaatgggtgacaattccttcggagagttggacgagaccgaaaacaccagccctaacttgggaagatcatcaatcgataagcgtaatttaagagataagctaggcacgatcttcaacgccgactcacaatggttccagaattttgatgagcaagtattgaagcccgtgttcttggataacatgtcgccgtccatacaagactcagccactcagtctccttccgaattcacttcccaaaaccactag

SEQ ID NO: 636 - DNA, 9801 bp, Saccharomyces pastorianus
atggtgctttttactcggtgtgaaaaagcaagaaaggagaaacttgctgctagctataaggcattagttgactacttggtcgattgtgatgttcccaccttcttagcaagaattgagactatacaagaatgggaccggtcaagagatgacctttacgtttggatccccattctagatcgaatggatgaactcctgtcgaaagtggcagaaaaatataattacaagcaagattctaaaaaggaatccgaagttaaactattagaaatggaagagcatgacgttatttactgtttgaagatgctacaatttactcgtcgattacttatgaacacagaaaacagatttgtttactcctctggggatgttttaatacatctgctaaattgtccaaacttcacaataaaattagcagttatgaggattttggctattttaggcgaaagatttgtcatagcgagagaaaagatagttgcgcataatatttttggtgatcatgatctaaggaaaaatgctcttaaattagctttatccttgtcgtcttctgtcatggatgaagatggagaacatttttcactcgtagatttgtactttgataagaagaaagttcctcaaaaatggagaaagttaagatttacgcactatacttcaaatggcttcaaaaaatcaaacctgtcgaaaaataacggtaatgaggtaacttccattaagaaggtgaccatgacaagtcaagaattatgcaatcactctttgcaggaaatcttcaataaaggtatggaacttttaccatcagaaagttggtttgacttttcggtaaaagcctcggtggcaaaagccttcagtgatgattctaacgaaaataaggatttgaggaacttaatcattgaaacaaaattgaacgctattgcattcgtgaacaccattttctcacctcctcaagtgagttccaagttattcgaattggatccttatgcttttaacagtttaactgacttaatttcgttatctgaaaccaaaataccaaaggaattaagaacagatgctcttttcacattggaatgtatttctttgaagcacgtctggtgttcagacatcattagaaaccttggtggtaacatatcgcacggcctattgttccagattctgcgttacattgccaagacattgagagaagcgacagatgaggttgacgaagaatataatgtgaggtttttctacttgatatcgaacctagccgacgttaaacctttgcatgaatctctgtttgctgccggtttgattcctacattattggagattgtatctataagaaactgttcgtataagcgtacgctagcttcggcaacacatcttttggagacatttatagataacagtgaaactgctactgaattcatcgaaaacgacggttttactatgttaatcacttctgtggccaatgaaatcgactttacacttgaacatccagaaacatggcaacctccgaaatattctgtggtctattactcaatctccttcagagagttggcatatatcagaagtttgctgaagctcgttctcaaattattaagtacagactcaggagacaggattagaaatttgatagattcaccaatactcgtttcactaaagaaaatcctggagaataaatttgtatttggtttaaatttaataacttacactctcgatgtagttcaaaaagtaataaatagtgagcctactatttatcctgttctcgttgaagcaggtctgattccatatatcgttgacaatttcccaaagctattagggccttctgcggaattattgagtttacttcctgacgtcatttccgcaatatgcctgaattcagaggggctaaaccaagttaaagaaaaaggtcttataaaccatctatttgattttttgctcgatgctgaccacgcacgtatattaactgggggcgatcgctctaccgaatacggtactgacatcgatgaattggcaagacattatccggatttgaaggcaaacattgtagaggctctatgtgatgtaattagaaaaatgccaagtgcatataaagatgaaagagaattccttttcacttcgccgaaagatgagaaatatttctttcatgaaaaaaatgaggaagtgctggttgataaagaggagcatgagcccgcttattgggagttattagataagggaactatgttggacacgttcactagtgttttgtttggtatgtcattgggaaatggctctttttcgcaggttccacaacatttagaagcaaaagattttttggcaattctattcatggaaaatccgccttatgaatactttacttcagtagcaatatcaaatgtcaccgaggtccttcagtatttggatgaaaaatatgaagattatgcattcatggatgtaatgaaagcattgaatgaccaattagaaaatttgagtgaatttttaaatagtcctaatgacattagtttctttttggcaatggatggcgacacttcgatacgtaaatgtcattcaaagctttgtcgactcgccgctattttaaacattgttacaaacgtttacgttgatcttacaaccctatcgtgtaagagaatcatgcaaatttacagttatttcaataaaagcggcttttctctaattaaaaacttaaaactactactccaaaagtgtgcattagaggaaatgtatttacgccaacatatgccagattctattattacggaaactatgccattacccatagtagatgtttcaggagatgggccgccgcttcaaatatatatccatgatccaaaaaagggtgaccaaaagggaaaagttactagcataaaaacaagaaatactctccaagtgcgaacgacattgtataccttacaatccaatactgcagttttattccgttgtttcctaagattaagccactccagaagtatggacttagaacataaagatctaacaactgagattcacatcttcgaaaacgttgttgaaaatgttctcgaaatgttaaaagtcactgaacttgaaggtcatttaccgtactttcttgttctactaaacttcaatacctttgtgtttacgattccaaaagcttctccaaactcaactgaaattttacaaacaatacctgcttatattttctatcaaaagggaggttatttactttatttgcaaattataagagatctttttacaagaatgacaaaaataaaagatctttcttcccttgacaacttaaattacatcgacgaatcgaacggtattttaaccttaagctgcttaataaatgccctaacttttatcaacaagtctatgcaaactgaaaccatggaaaatgttcaaagtataggtaagtactacgtttcagtagatgaagattacaatatcatgaaagcccttacggttcctattaaagtaatggctctagcaatgattttagatttggataaatcagatggactgttcaagacacagtctcgtaatgtgccttattctgtattcaagcaactcttgagtatgctgaagaatgtattcaccactgttaacattcataccaaagaactgtacgaattgcactgggacttggttttcccaccaattagaaaaataaacttatttgaacaggttgatattcccggcgatgttgcggcgaattacttaactgaaaccggggacgaccttcctacagataatagtattggtcttttctcacctgaacaatgggaaaagtatgtaaaattagctggagaagataagtcaatatactacccacaaccaatacaaccacaatactacaaaggatgtacgtccaaggagctagatgaactaagggatactttcttcaatgatggactgccctctaggatttttacagtactgcccttctatcccaaacttgtcaatgcttttgcaaagactctactacgaatctttacaaaatacgatgaacccaatgaagtatttgctggcaaaatattggataggatcctggagacgagattggatgatcccgccactttgtcctcattgattcatttattcggtatattcttaaatgagaaatatatttatcaaaaggcttcgcacttgatgcagaagtttattgaatatcttgaaaagtctttgaagccagaacatgttaatacaccttggttttcgaaagctctttacgtttatgaaatcataatagcaaaatcagaattgccccagtttgaagagctgtctaaggatgttctcttgagatatcctttactttccatggccaaagtcttccgcataccagaatctataaaacagaaattgttcgatatactaatcagagtttctgatatttccaatttttattccgcgctggcaacatcgcgtatattaattttttattctagggacgagttctacgctaacaacatagcaagatcaggtattttgtcaagattactaaaagtgataggaagtttccaaaaattggacaaaattaactttctagagtcatcttttcttttattgacaagaaggtgttttgaaacaactgaaaacgttgacaatttgatacgtgcagaagttgatagaagctttactgctagaccgttaggcgatggagatgatgctgtgcgtgaattaacaactattttagaagagaaagcacacgtagttatgcgaagtccctctcaatttattgacattctttgtgaaacggctcgattccaagaatttgatgaacaaggtgctttgattgattactcgttgaaaagatttttggataagaaaaaggaagatactcgagtaattctagacaaggctgatatatatgagcggacaggtattatgcatttattattatcacagcttatggctgcttctgaaaaagactggttatctgaaccggctaattcctcagacttgccggagaacaagaaaaatcaactggacccatcaagaaatcccgtttgtgcttacatggtatttctgttgaagcttttggtagagctagttagtagttacaatcagtgtaaatttgaatttctaacgttcagcagaagaaacacatatgcagaacgcccaagaccaagaactaccgctatcaacttttttctttatagattattggacaaacctgttggaaatgaccatgataagcacgaagctaaaagaagagaagttgttggaatgttagcgcgctccgttattatcggtttcttagctactgttcaagatgacaaaacgatcaaaagtgatgtcaagattgttgatcctcatatgaattttattagaaaatttgcaattgaagcgatcatgaaagcaattcgaaatgcaacttcttcttccaaacttttggaaggcaatcatttaaaattagatatgtggttcagaattattacgtcaatggtttatgtccaggcgccacatcttcgccaacttcttgatccgaataaagttgaggctgaccaataccaattgtgcaagctcgttatagatctgggacttccatcagttattacggaagctatggccagtatagatttaaactatccgttttcaaagaaaatattcaacgtagctgttgaagccctaaataccatcagttcaacgaggaataatttttcggaacacttcaagattgaagaccatgacgaagttgacgacgaggttgatgaatctgataaagaagagattccggacatgttcaaaaactcagcactcgggatgtatgatgtagaagatattgaggaagatgacgatgatgatgacgatacttcgttaattggagatggtgatgctatggcatttgttgatagtgataatggattcgaagtagtgttcagtgatgaagatgacgatatgggagaagaaggtgaagaagatgttcattcaaggtcagaggaaaacgacttatcctcagaaatgaattcaagcacaacaggcggttcagatgttgactatgaagttgatgacgcagaaggactggttatcaatattgagcaacaatcaggagatgatgaagatatggctgactacgatattgatcatagccattcttcccgtactggtgatgaagatgaaggttctatggatgtcatagaagtttacgatgacgagctaagctctgaatacgatgtcgatttgagcgattatgacgtggatgagtctgattgggattcaggattatccagtttatccatttcagatgaagaaggcgaaagtagcgaaaacgagccgattaactccaccagaatgggagattcaagaagaaggtggttgatagccgaaggtgttgagctttcagatgactcacaaggggaaagtgaagacgacgggagggatgttttccgtgatatcgaacacatcttttcaaatgaaaatgaacctttgtttagggttcacgatgaaatgcgtcatagaaatcatcgtcgctcgattaatcgtactcatttccattctgctatgagtgcaccctctttaagtttgctgaatcgcggaagaagaaatcaaagtaatttaattaatcctttagggcctactggattagaacaaattgagaacgatatttctgaccaagtgactgttgctggttcaggttctcgcccgagatcccatcatttacatttttcagaagttcttttgtcaggtggtgtgtttgatgaacctgttttggatggcatcattttaaagtctacggtatcaagatggaaggatatatttgatatgttttatgactccaaaacatatgccaattgtatcatacccactgttatcaacagaatatacagggttagcttagatttacaagaaaactctgaaaaacacaaacaaggaaaatcaaaggataagcaccctattttctctgagccaagagtggaaagtatcagtagtacagacgccatatcagcagaggaagatagcgtgcaagcaagcaacgtttcccatgatgaccatgaacctgtctttgttactattcaaggatctgaagtagatataggtggcacggatatcgatcctgagttcatgaatgctttaccagacgacataagagctgatgtatttgcacaacatgttagagaaagaagagctgaagccagacttgattcagagcacaatgcacactccagggaaatcgattccgatttcctagaagcaattcctgaagatattagagaaggaattttggacaccgaagcggaagagcagaggatgtttgttagaataggttcctctgcgaacgtgctaagagccgacgacggtgctatcgataacgatgaggaagctgaaaatttggatcatgaaaacagtgatgatcgtaacattgccgaacctgaaaagaaaaagccggcaagaatatactttgctccattaattgatcgtgctggtattgcttcgctaatgaaatctgtgtttatctctaaaccttacattcaacgtgaaatataccacgaactgttttatcgcttatgctctagtaagcaaaacaggaacgatttaatgaatacatttctattcattttgagtgaaggtatcatagatcagcactctttagaaaaagtttataacataatttctagcagagcgatggggcacgcgaaagctacgaccgtcaggcaattacctccagactgtacgccgcttacagtggctaatcaaactattgaaatcttacaaaacctgattgatgcagattctagattgaaatactttctcatcgcagaacacgataacctgatagtaaacaaagcaaataataagtccaggaaagaagtgctcactgataaaaaattgagatggcctctgtggcatttattctcacttctagatagaaagctcatcacagatgaaagcgtattaatggatttattgacaaggatattacaagtctgtacaaaaacgttggctgttctttccgtcagttcgagtggtaaagaaaatttgaataaaaagtttcatttaccagatttcgatgaggatgacctcatgaaaattttatctatcattacactcgatagttgtaccacaagggtatttcagcaaacattgaatataatttacaatctctgtaaaataaaagggtgtatggcgatttttacacaacacctggtatctttggctatagagataatgggcaaattaaaggatgctctggatggcctatctcgtgaggtgagtacgataacgaatgggatggagatcaactcagaattgctacagaaatttacccttccaagttctgatcaagcaaagttactgaaaattctcacgacagttgatttcctctatactcataaaagaaaggaggaggagcgtaatattaaagacctgcaatctttgtacgatcaaatgaatagcggctccgtgtggtcctcattgagcgaatgtttgacccagtttgaaaaaagtcaagctatcaatacttcagcaaccatcttgcttccattgattgaatcgctcatggtggtatgcagacgaagcgacttaagccaaaatagaaatacggcaaataaatatgaagatgctaaattacttgatttttcgaaaacgcgtgttgaaaacttattcttcccatttacagatgctcacaagaaattgttgaatcagatgattcggtcaaatccgaagttgatgagtggccctttcgcacttttagtcaagaatccaaaagttttagattttgataataaaaggtacttcttcaatgccaaactgaagcccgataatcaagagcgccccaagttacccattactgttcgccgtgagcaagttttcttagactcttatcgagctttgtttttcaaaacgaatgatgagatcaagaattcaaggttagaaattacatttaaaggagaaagtggtgtcgatgctggtggtttaactagggaatggtatcaagttctttccagacaaatgtttaacccagattacgctcttttccttcctgtgccatcggataagaccaccttccatcccaaccgtacatcgggcatcaatcctgagcacctttctttcttcaagtttaccgggatggttataggaaaagcaataagggatcaatgttttttggattgccattttagccgtgaggtttacaaggatattttaggtagaccagtatcgttgaaggatatggaatctttggatccagattactataaatctttggtatggattctcgaaaatgatatcacagatatcatagatgaaacattttccgttgagactgatgattatggggaacataaagttatcgacttaactgaaggaggtaaagacataatggttaccgaactcaataaacaggattatgtaaagaaaatcgttgaatataagcttcaaacatccgtcaaggagcaaatggataactttttggttggcttctatgctctgatatctaaagacctcattaccatatttgatgagcaagaattggagttgctgattagtggtttacctgatattgatgtcgatgattggaaaaacaataccacctatgtcaattataccgcgacttgtaaagaagtcaattacttctggagggcggttagatcatttgatgcagaagaacgtgctaagctactgcaattcgttacaggtaccagtaaagtacctcttaacggattcaaggaattaagtggtgtgaacggtgtttgtaaattttccattcatcgtgattttggttcatcagaaagattgccatcatcgcatacttgcttcaatcagctgaatttgcctccttatgaatcgtatgaaacgttacgaggttctttattgttagcaattaatgaagggcatgaagggtttggccttgcttga

SEQ ID NO: 637 - DNA, 444 bp, Saccharomyces pastorianus
atgctgggacaaaccttcaagaagccatgcaggaccgtcgtggagcgggtgtccggaaccacagtgttcgtgagaaacaagaggacgaagagcaagagcgcaatgtcgcccctggcgcagagagtggtcacgcagctgagtgtgatttcagcgagcagaaaacagcccaagctgctgaaactctcgcgggaggatttgatcaagcaccaaactatcgagaagtgctggtcgatctaccagcagcagcagcgtgagcgcaggaacacacagctagagttgcagtacaagagcatgcagggtgccatgtccttgctgcaagagctcagccctcggctattcgaggctgccaacgcccccgagaagggcaagcgcttccccatggaaatgaaggtgcccaccgacttccctccggacacgccatggcactaccactttcgcaagtga

SEQ ID NO: 638 - DNA, 666 bp, Saccharomyces pastorianus
atgaataacagtgaagatccgtttcaacaagtcgtcaaggataccaaagagcaattggaccgcttgggaaactatataacccgtcacaacaccgccggtgatgatgatcaagagggggaaatacaggatattttaaaggatgttgaggaaacaatagtggatttagaccgaagtataatcatcatgaaaagggatgaaagcgaagatgtgtctgacagagagacacaagttaaggacataaaacaacaatttgatgccttgaaaacgcgtttcgatcaaaggatacaagaatctactcagacaactattccactagatgaaacagaggaaaatccgacggtttccaacactaataatgacggcggtatgtccaacccatttcaagaacaaatgataagggaacaggatgttcatttggacggtattcataagacaatgcagaatttgcatatccaagcccaaacaatgggggatgagttagaaaatcaaggacaattattggatgatatggatgaaggtatggacactgttgtcaataagttagcgaggggccgtagacagttagaatgggtttatgagaagaacaaagaaaaatatgatgactgttgtataggactactcatcgttgtcttgataatcttattaattttggcattcattgcttaa

SEQ ID NO: 639 - DNA, 1500 bp, Saccharomyces pastorianus
atgaataataatagtgccacggaggcttcctcaagggcccagatacggccttattacgatcctgattcatttaatgctggttatagtgccgtcttcaagccagaagaaggtgtagtcgatccacaggggtatacgattgcttcaaaattaaacgttatcaactcatctccgactacaaaaagaatggccaatgccttgtttagaagttccccaatgaagaaattgtcaaactcgatgaatgatgggctgtcgccagaagggagcagtggtgagataggtagtctgaataactttgagtgggcggaactggttaaccttcagaaatggcggaaaatatttgaacaactgctcgatatgtttttcagaaagtactttcaattgctcatccaacaaccctttgatgtagctagattactgactcaagtaggtgagttccaaataggcaaacctacaactgatgcaagtaaacctcaaccaccaatagtcttgcgggatgaggagcgaggcgttgtgggggatgacgaagaaggagaaaatgattacgatgaggaggagatcgattttttccccatagaaagaaagatagctgaggctaattccattgtacctagcaccgtcgacgaggatgacggtccacattctgggctcactgatagctctttgatcatcatgccacagtccctgcatacaatagatgtcattaattccctattcgaccaggaaggtattcgtgggctatggaaggctaacaacacaacttttatttacaatttcctttccctaagtattgacacatggttcactgggttactttcatcttttttgggtgttcctgacccttatttcatggaggttatcaactcatcagatatctctaaatcatttattttagccttgggtgcaggaatatttaccagtattatattgttacctgtggatttaataagaacaagactgatagtaacgtcattcaaaaggaaggcgaatgccaaaagtaagatcaccaacaccagaagtttgagacagctgattaggtgttggtcgtggcgtagaaacggtgtttccattcctttagatatgtggtctttaaccattttacaatctatcaataacagctttttcaacaaattatttgacttggtcatttacaatcaattccacatagaaaaatattcacaaactgtcatgtataacacgatgaaattcttttctaaatccttagaactgtttattaagttacctgtggaaaatttattacgtcgttgccagttaaactatctattaaatgaccaaagattattgtttaaagtcgattccactgaattaatagtgaaaccaaagaaatacaacgggatatggaatgtggttagaaacggttccaaaacaaatacaggccaattatggaatggctggaaggttggcgtgatcagtttaatttgcggatatgggctacagataatgaataaagttgacattaatatggaacaagagaagttttaa

SEQ ID NO: 640 - DNA, 1398 bp, Saccharomyces pastorianus
atgcctccacggaagaaatatgaaaatggtaattcgaaaccgcaatacaatccacgtaacgagccagattattcacaacgccaagaggctaataatgaaggaggtgaaatacaaggccgtggtttgcaaaccgaactccattccgcattgaagtcttccaatttaaacttaatcagaagaaattaccaaactggtgataatccatatctcagtgatctaaacaattcaggttcattaaggaagcttaacaaacgttatgaaagaggcctgaagttttacaagaaaggtgaaatcagcaaacaaattgcacttgaaagggagtcacaaaaaattctagacgagaaggaacttgagaggaaactaaaattggaagaggaggctaaagaaagagagaaattagttaaatcaggtgatttacccaacttaacattgcatgaagataacttcatactagatctgtcaaagttcgagacataccacaagaccaatcacggccacgaatggtgggatactgtgttcttagatgagaggggtgagatgatggaaaaatatatgattgaagacccagcgcttggtaaaggagaggaaagagatgatgacgatggcgatgacattgaacatccctcaataaaatacgtgtctcatccctcacctgagaagaccaatgaggcaaagacagtaatcaaggcatatttgacacagcatgaaaggaagaaactaagaagaaatagaagaaaaatggttagagaagcacaagaggtaaagattaaattaggactactaccaaagcctgaaccaaaagtcaagctaagtaatatgatgagcgtctacgaaaatgaccagaatatatcggatccaactgcctgggaaaaaacagttaagggccaagtagatttgaggaagaggaaacatttggaggaaaatgaaaccagacatgaacaagcggttaaaagaaggaaagaaactcctggtgtaactttcgtaaagccgtcggcgtaccactgcaaggtatttcaattcaagaacttacagaatccgaagataaggtataaattgaagatgaacagcaaagaactgtcattaaaaggcttgtgtcttcgtataaatgatgatggaccgggaattattatagtggtgggcgacgagaaatcgtgcagattttatgagaacctggtgatgagacggataaaatgggatgaagattttgaactacgtacaaacaatgagaatgtgaaaatgagcatgcaacataattcgattgcgaaaacatgggaaggttatttaaaagattgtaaatttaaaggttggtttatgaaggtgtgtaatgaccaagaaactctattacgtactttgagccaatttgattcagagcatttttattcaccgatccagacttaa

SEQ ID NO: 641 - DNA, 1905 bp, Saccharomyces pastorianus
atgagtaataataacaacaatggtaccggcgcagcacctactaacgctccccaccaccaccaccaccatcaccatcaccaccaccatcacggccatggcggaagtagttcagccctaaacaatccgaaatcttccttagcagacggtgcgcacataggtaactatcaaatcgtcaagacgttaggtgagggttccttcggtaaagttaaactagcttaccacactaccacagggcaaaaagtcgctctcaagatcatcaataagaaagttttggccaagagcgatatgcagggtagaatcgaaagagaaatctcttatttaagactgctaagacacccacatatcatcaaactgtacgatgtcatcaaatccaaggacgagattatcatggttatcgagtatgctggaaacgaattgttcgactacattgttcaaagagacaaaatgagcgaggatgaggcaagaagatttttccaacaaatcatcagtgccgtagaatactgccatagacataaaattgtgcatagagatctgaaaccagaaaatctgttacttgatgaacatttgaatgtcaagatcgccgatttcggtttgtcaaacatcatgactgatggtaatttcttaaagacttcttgtggttctcccaactacgccgctcctgaagttatcagtggtaagttgtacgcaggcccagaggttgacgtttggtcctgtggtgtcatcctctacgtcatgctttgtcgtcgtctaccgtttgacgatgaaagtatcccagttcttttcaaaaatattagcaacggtgtttacagtttgcccaagttcttatcgcccggtgctgctggcctcattaaaagaatgttgattgttaacccattgaatagaatcagtattcatgaaattatgcaagacgattggtttaaagtcgatttggcagaatatttacttccaccagacttgaaaccacatcctgaggaggacaatgaaaataaagaatcgaaaaaagagggaagtggtcctgaaaatgatgaaattgataccgacctagtcaacattctatcatccaccatgggttacgaaaaggacgagatttacgagtccttggaatcttctgaagatacccccgcattcaacgaaatcagagatgcttacatgctgatcaaagaaaacaagtctttaattaaagatatgaaggcaaataaatctgtcagcgacgacctagatacctttttgtcccagtcccccccaactttccaacagcaacaggtccagccacatcaacagcgagaaatagatacggaggctgctaagcagcatgcaaaaagaatggccagttccactactcagcaaagaacataccaccaatcacccttcatggaccagtataaagaggaagactccacaatctccattttacccacatctttaccacagatccatagggctaacatgttggcgcagggttcgccagccgcatccaagatatctccattaataacgaaaaaatctaagaccagatggcattttggtatacgatctcgctcttacccattagacgttatgggtgaaatttatatcgctttgaaaaacttgggcgccgagtgggcaaaaccttctgaagaagatttatggactatcaaactaagatggaaatacgatgtcggaaacaagaccaacagtaatgaaaaaattcctgatctaatgaaaatggtaattcagttgtttcaaatcgaaaccaacaactatttggtcgatttcaagtttgatggttgggaaagcagttacggagatgacaccaccgtttccaacatgtctgaagatgaaatgagcactttttcggcttatccatttttacatttaaccacaaagcttatcatggaattggccgttaacagtcaaagtaattaa

SEQ ID NO: 642 - DNA, 1380 bp, Saccharomyces pastorianus
atggctatctttctcagtaagagactgttgaggtacaccttctttgccggtgtagcccttattttgctgctaacgttgaactcccatagtagtacccaacaatacgtcgcttcatacttaccatctgcgtttgatttatcctcacatgactcctcctctgttgaagaacaattgcttagtgaaaaaagtgatgctgagaaactaaaagaacatgctttgaacccagaagtagataccacagccacgatggatgaggaatccaaggctctcaaagcttctgccgaagaggctgatgctccgttagacacgaaaaagggtagcaagggcaaggtagacggaactacatccacaggcttggaaaagaccactatggattatatcaccccgtcctttgctaaaaaaggtaccaaaccaaaagcttgctacgttactttagtaagaaactcagaactatatgatctgttaagctccattaagtacgtggaagataaaatcaacaagaatttcccttacccttgggttttcttaaatgacgaaccattcaccgaagagttcaaggaagcaatcactaaagctgtctcatccgaagttaaattcggtatcttgcccaaggaacactggtcgtatccagaatggatcaacgagacaaaggctgctgaagtccgtaaagaagcattcaaccagtatatctatggtgattcagaatcttatagacacatgtgtcgttatcaatccggtttcttctggagacatccattattggatgaatatgattggtactggcgtgtggaaccaaacatcaagctacactgtaatatcaactatgacgtttttaaatggatgcaagataatgaaaaagtttatggtttcaccgtctccatccatgaatatgcggccactattccttccttatgggaaacttcgatgaatttcataaaagagaatcctcagtacgttgacaagaacaatttgatgaaatttatttccgaagataagggtaaatcatataacatgtgccatttctggtcaaatttcgaagttgcaaacttgaatttctggagatctccagcatacatggaatactttgatgctttagatcatcaaggtgggttcttttacgaaaggtggggtgatgctcctgttcattccattgctgcttctttgtttttaccaaaggataaaattcactatttttcagacattggttactatcacgggccttataataactgtccgttggataaagatgtatttgaaaacaacaattgtgaatgtgaccaaggaaatgactttactttccaaagttactcttgcggtaaagaatattatgacgctcaaggtttggtaaagccacagaactggaaaagcttccgtgattag

SEQ ID NO: 643 - DNA, 1920 bp, Saccharomyces pastorianus
atggaagttctcagagatgtattatcacttgatcaagctaaaattgacgagttaaaggcaaccacacaggatgaagcagaaaacaacaatctgtttgaaaattatttgaaggattgcaaattcaaagcaccttcgaaccaagaccaatcaccactaaccaaactaaaatcattacaagaaactcattccaacaacgaagtggcaattaatgtggttataccccaactagttgactacttgacccaatttactgacagattatccaattacacacaggacttggactttattaaaagaaaatctaatgaattgcaatcgcttctcgaatacaactctaccaaacttgctaacatttcacccatggtcaatgatctaatgattcctcctgaactaattaatgatattgttaaaggaaagatcaatgaaagctggcaagataacatagcattcattactgacaaagagcaaatttatgataaatatagacacactgataatattgagcatcaagaagatacgaataggtcgactaccatagcaccaaaagattttgacaagctatgtcaactcttggatatcctcaaaaatgttatcctagaaagatccaaaagactcattatttcgaaaattaaaagtttaagaaatcatcacccaataccatcccaaaggctacaaacacagttgttaaaagttcaaaaaattttcccctttataagagataacattctttctttagcccttgagttaaggcaagcctactgctatacaatgaaatggtattataaagagtatttctcaagatacatcagatcgttgacgattttacaatttcaacaaatcggctctcaatttgcattagggaatggcctttccacaacttcagtgggtggatttagcaattcctcgtctctgtttttctcaaattacttaactacatctgccacaaacgctttttataataaagcatctgtcactgacgaggagattaacagatattttcagattaagaaaaggctaaccgttttgactcaagaagataatacagtcatggtttcacaaatcgccgaaaataacacaactaagaattatattgaaattggatttaaaaatttgaacttagccattctagacaattgtacagtagaatacctttttttaaaggagttttttgctataaatgatgataattctgaggaaattaatggactgttagaacaaatattccaaccaacttttgatgaagcaactgaatatacccaacaactgattcaatacaattacgatatttttggcgtactaatcagtatccgtgtggcaaatcaactgcagtttgaatccgaaagaagagatataccgtccatgtttgatagtttcttaaacggccagttgattcagttatggccccggtttcagcagttggtagatttccaatgtgaaagcttgcgtaaagtagcaatcactacaaacgtagcaaaatatggtagctcaaacgcaacaaacaatgacccattaacttcaccacatgaattagctgtacaatttggtaagtttttagtaagttttctgacattggcaataacacataaactggccattgatgaaagatctgagccattatacaattccatcattagattaagaaatgattttgaaactgtcatgacaaagtgtagcaaaaagactaaatctcccgaaaggtttttaacgacgaattacatgtatttatacaataatttacaacaattacatctacaattgaatatgactgactcgaatacgcaaaattacgatttcaattctacggagaatgttaatactgatgctatagatgagaatgaaggtaactctggggtaccgctaataatcagagagaccgagaaccacttcaaaactttagtggaggctttcactagaagttga

SEQ ID NO: 644 - DNA, 885 bp, Saccharomyces pastorianus
atggacattaatatagatgacatccttgcggagttggacaaagaaactaccgctgtagactccaccaatatcacgcagggctcttcttccactgcccacggagatgcacttacaatagtaaactcgtcactagactcaagtgtcaagactcatacatacgtttcgccccagcgggattttgccaacttaatgaagtgctggaggaacgaacggtgttcgccggagcttttggcgtatccgcatcagctaatgaaaagactgttgaaccgaatatccgcgcaatcacaattgattgagaacatatcaatggggttcctcgatatgcaaaacgcatccagtgcgaaccattccatgcccaacgactccaaactccctctgctttgcatggaaaccgaactagagagactgaagtttgttattagaagctacgtacgatgtaggctcggcaagatcgacaaattctcgctctacttacgacaactaaatgaagacgaaaactcgctgacctcccttaccgatttattgtccggtgacgaaatcaaataccacgactcgcattctcttatctggttgaaactcatcaatgattccatactgaagtacatgcctgaagagctgcaagcaattaacgacactgaagggagcgtaagcatgatagacgagccagactggaacaagttcgtcttcatacacgtgaatgggccgccagaaggccactggaacgaagacccccttctgcaggaaaacgagtttggcaagccgtgctacaccgtgacaatcccggacttgaacgaagaggtcgaactaaccattggcagtatttatgtcatgagatatgaggtgatcagggatttgttaagagacgataagatcgctcttatttga

SEQ ID NO: 645 - DNA, 2283 bp, Saccharomyces pastorianus
atgggaaataggtctttaacggaagcagaccacgcactgttgttcgagccatcgctgccgacagccgaggaccctacacaaacgcagcatcgtcttcatcctttcgtggatggcaatggatcagggttgaaggcttcaccgcaaggtcagtttggtgataaggcgttgaccagcacccaccggttcattccctcggcaaacgaggactcctcgccgcgtgatatgggccttgatccctccatgaggcgtagaagagacgagtgggcagaccgtggtgcggccaagatcatcaaagaagttgttgaccctacaacgggagagttgaccaaacatgtggtgaagatggggataaaggacttcaagttcggagagcaactgggcgatggctcgtactctagtgtcgttttggcaaccgcccgcgattcggggaagaagtacgcagtcaaagtgttaagtaaagagtacctaatacgtcaaaagaaagtcaagtacgtcaccgtggagaaactggcactgcagaagctgaatggcaccaagggcataatcaggctttttttcacctttcaggacgaggcaagcctgtattttcttctagaatacgccccccacagtgatttcttggctttgattaagaagtacgggtcgttaaacgagcaatgtgcgcgctattatgcttcgcagatcatcgatgccgttgactccttacatactatcggaatcatacacagggacatcaagcccgaaaacatattgcttgataaagacatgaaagtgaagctaacagattttggtacagccaaaattttaccggaggaaccatcgaacgacgcggacggtaagccttattttgatttgaatgcaagatcgaaatcgtttgtcggtactgccgagtatgtgtcccccgagctactaaatgatagctatacggattctcgttgtgatatttgggcttttggctgcatcctgttccaaatggtggcgggcaaaccgcctttcaaagcttctaacgagtatttgacgttccaaaaggtaatgaaggtccaatatgccttcactgcgggtttcccacaaataatcaaggacttggtcaagaagctattagtcaaagaacccaatgacagactgaccattgagcaaatcaaagcacatatatttttccagagcgtcaatttcgataacggttcagtatgggatgatgatccgccagagatacaaccatacaagataagtgcagaggcgctgaagccgctgccaaaagttcccgagccggatgccactgctaagctggccaaccagcaactcgcatataacagccacgcggaaactacaccacagacgtcagccgcgacttgtcaagatcgttctgcgatcagtatgaccgctgcaacggccgcgtttaataaagactgcacgggccaactgaagtctgggtataattccaatgcatttgttagatcttcgtccagtagcacggatcgtgaaaaggcccataagaaaaccacaaatatccatgcatctcgatcgtctccttcgattaccagtgtctccaaagggaaagagcccagaagtcggtccgctgataacttttggtcgtcctacttgaaaaatctcgacgaacacgttttgttggtgaaggatattgagctttctgtagaagccacggaaagctcagcggttgatcttgagacgcttgctccagactacaagagcccctgcgatatcgattctcctacagaaagcgccgacaaattctacaagaggatactggtgataacgaatttgggtagaggacttatttttgctaagaaaagccccaagatgcgaaaagagcgtgagttcgagctacagtttgaattgaaattaaaccaagtggaaaaaataaacctaataaatgaccaaatgttacaaatcgagggtccaaagacagttttcatggcgtgtaaagacagggcagttttgatagaggtatggaaactgatgaagagtgagatttgtgcaaagcccaaagtggcgtcctcgaaactggagcataagatgtttgataaattcatttctcaaaaagtcaaaaagacaaaagggaaaaaccaggttcctcatgtacctgaatcgagcaggttagtcaacggtcttcctggcagttgtatgacgaaggctcccgagggaggaggcagcaacttgaagcgacccgcttcgttgcagacgcgatcatcgtccaattattccaaattgcttgcaagatcaacggaaatgcggaagaacatgacacgaacaaacgaaaagtaa

SEQ ID NO: 646 - DNA, 1104 bp, Saccharomyces pastorianus
atgcgatcttccatgttcaggtgtgtgagccgtgcccactacagcacaaatgtcacagaagaattcataaacagcatcttggcaagggctcaagaagcaacggcaaaagcctcctctaatgctattaagatggatcagaagaaaggacatagagcatctaatatgaacaggagcaggaaccagaacaggaataacaggaacaacaatgaaggtaaagatatagaagggagacacggagagcgaaacatgagattaaacaaccgtgctcctaatggtgattctactcaaaacaccaacagacagaaatggaatagaagtaccacaacgtcattcatcaaggatccttccgatactacagtggtcgtacaaccacagttcaaaaaaatgcagaaccacagaaataattttaatgaaaattcaaaagtggaagatgatttacttgacgtttttaattcgtcgatggaccaaaagcaaagaccaaataatttcaataaaaacaccaaacctcaggcaaggtttcaaaagaaaagtcacattttgacggcatctaagagaagaaatgctccaaagcaacagcaagtgcaaagaccggttaagagacctgctagtactgaatatgttctgtatgagccaacgcctttatctttactagaatactcacctcaagtgtttccaactaaggaatcgaaattagtcaactatacattggatagcttgaagaagtccaattaccctgtttatagatctccaaatctaggaattcttaaaaagcatgattatactttgaatactccatattttggtaaatataccccaggatcgtcattaatttttgctaaagagcctcaattgcaaaatttgcctttgcaggaggattttgatggattggttaagcatgtaagaggcgaatatcagctcttgaagccatacgaaagaaaagattttgaaaaattaacaaaatctaaggaagttgttgataagctcgtacaaaatagccgaatcgcaaggctgtcattacaatctgttgccatagcctctgaagaaaaaaaattgatatatgatgtttgttctggaataaaaccaatttctgaattacaacaataa

SEQ ID NO: 647 - DNA, 1977 bp, Saccharomyces pastorianus
atggcaccagtaactaagaaaacaaacggaaaacgttccgctagaggagtcagtcaatcagataaaaaatcgaccaaaaagcctagaatttctatcgattcctccgatgaagaattggaactagccaaaaacgaagatgctgaactatcttcatcagatgaagatgacctagatgatctggacaagggtaaaccagaaggagagaaaaaggaggaagacaaagaggccgatgacctagatatctccgatgatgatgaagatgaagatgaagaaaaggaagggaaaagtaaaagtgaaggaggtgaaggtggtaaccatactgaacaaagaaaactgctaaaggaaagaaaaatgcaaagaagatctggtactcaagtgcaacaaattaaatctgtctgggaaagattgcgtgtgaaaactccacctttaccaaagcaaattcgtgagaaattgtccaacgaaatctgggaattatccaaggactgtatcagtgatcttgtcctaaagcatgatgcttctcgtattgttcaaaccttagtcaaatattcttccaaagaacgtcgtgagcaaatcgttgattctctaaagggtaagttctatgttctagccacatctgcatacggtaaatacttattggtcaaattactacattacggttccagaacctcaagacaagccatcataaacgagttgcatggttcactaagaaaattaatgagacatcgtgaaggtgcctatgtcgtggaagatttatttgttctttatgccacacacgaacagaaacaacaaatgatcaaagagttctggggctctgaatatgctgttttcagagaaactcacaaagacttgaccattcagaaagtttgtgaaagtagtgttgaaaagagaaatatcattgctagaaacttgataggtactattaccgcttcagttgacaaaggttctactggtttccaaattctacatgccgctatgagagaatacgtgaaaatcgctaacgaaaaagaaatttctgaaatgattgaactacttcatgaacagtttgctgaattggtccataccccagaaggttctgatgttgcctgtactttgatggctaaagctaatgccaaggaaagaaaattgattttaaagactttgaaaaaccatggtgaaaaactgattaaaaacgaacatggtaatattgttttcattacaattttaaattgtgtcgacgatactgttttagtattcaagagcttcagtcctactgttaaggataacttacaggaattcataatcgacaaattcggtagaagaccatggttgtacatactgttaggtttggacggtaaatatttctcccctattgttaagaatgaattattaagatacattgaattatccgaagccacttctaagaaagatcctttacaaagaagacacgaacttttatccaagttcgcccccatgtttttgagtaccatatcaaagaactatgctgagattttaacagagaacctgggctgtcaatttgttgcagaagttttgattaacgatgagttatacgcacaattgaatgaaaaggaccaacaaaaataccaaactgttttagacaacatcttaactacctttaagggtgacataactgaagaaacacacccaatacatagagctttctctactagattattgaaggctttaattcaaggcggtaaatggaataacaaggaaagaaaggttgaacctttgaagaatgttcaaggcttaggtgttccattcgcctacaaattatatgatgaaatcatcgattcctccaacttgttggaatggattaacaacgctgatagctcatttacaattgttgccctatacgaaactttgaaagatcaaaaggaaggaaaacaatttttgaaggacttgaaagaggttcaaagtaaaataacctctgatgaaaacaacaaaggctctcatcttttggttaaacttttgaaatag

SEQ ID NO: 648 - DNA, 1740 bp, Saccharomyces pastorianus
atgggaatccatataccgtatatcacgtccaaggcatcgccgtcgaatgacagtgatggcgacagtgtggtgctcagcaacgaccacgaatcgcctatgaagtcagttaaactgacgtccgagacgcatgaaatacaaagagcgcccgctggcgacgaggaagaccggatccagatcaagcctgtgaatgacgaggacgatacctcagtcatgattacgttcaaccagtccatttcaccctttattatcatactgacgtttgtcgcgtccatatccggatttctgttcggttacgacacaggttacatatccagtgctcttatctcgatcggcaccgatttggacaacaaggtgctgacttatggtgagaaagaaattatcaccgcggcaacatctttgggggctctaataacgagtatttttgccggtactgcggctgacatatatggtagaaagcgctgtctgatgggttctaatcttatgtttgtcatcggggcggtcgtacaagtctctgcacacactttttggcagatggccattggtagacttgtcatggggttcggtgttggtatcggctccttgatctcgccgcttttcatcagtgaaatcgctcccaagatgatcagggggagactgaccgttatcaactctttgtggttaaccggtggtcaactggtcgcttatggttgcggtgctggcttgaactacgtcaacaacggttggagaatacttgtcgggttgtctctggttcctactgccgtgcagtttacatgcctgtgctttttgccagacaccccaagatactacgtcatgaagggcgatttgaagaaagcctctgaggtcttacggagaagttacaccgatacttcggaagaaatcattgatcggaaagtggaggagctcgtcaaattgaaccattccattcctggtaaaaacgttccagaaagagtttggaatactatcaaggagttgcacacagtaccatctaaccttagagccctcgtcattggttgtgggctgcaggcaatccaacaatttactggttggaactcgctgatgtatttctccggtaccatttttgaaacggtcggtttcaaaaactcctccgcagtttccattattgtttccggtactaacttcattttcactttggttgcctttttctgcatcgataaaatcggccgtagaaccattctgctaatcggcctgccaggcatgacgatggctttggtcgtatgcgccattgcattccattacctaggtatcagtttcgatggcactagcgcagttgttgcctcaggattttcctcctggggtattgtaattattatcttcattattgtgtttgctgcattctatgcccttggtatcggtactgttccatggcaacaatcagaattgtttcctcaaaacgttagaggcgtcgggacttcgtatgcgaccgctacaaactgggctggttctctagttattgcgtctacgtttttaactatgttacagaacattactccagcaggttcctttgcctttttcgccggactttcatgcttatcagtagttttctgttatttctgttatccagaattatcaggcctggaactagaagaagtacaaactattctgaaagatgggttcaacatcaaagcatcgaaggcattggccaagaagagaaaacaacaagttgtcagagttcagcaattgaaatatgaaccaactgaagaagttatagaagatatataa

SEQ ID NO: 649 - DNA, 2241 bp, Saccharomyces pastorianus
atgaaagaaggagtctccgatgaattttcctcagatgatgatgatgacgacattctcttagaattaggcacaagacctccaagattcacccaagtgccgtcgtcatcaatagcactacaaacgcaactacctgtcattggggaaacaccaacaaccacatcgaataaaaagagcgataatgatcatgtgttggtaaatcaactaaataaagctcaaggtgaagcaagcatgcttcgtgataaaatcaactttttaaagaatgaaagagaaaaagagaaaaacactcaagttatcaaagtcaatgaattgcaagctaagcatctacaagagttggccaaactaaaacaagaattacagaaattagaagatgagaaaaagtttttacaaatggaagcaagagggaaacctaaaaaggactcctcagccttaaacgcaccaccaacgacatcgtctgcacctacaaacactatgacaccagattcatcatcagttacaatagaagcaaagaatcaatccccacagttaaaaagacgtaaaattaacgacattttacaaaaaaaatgcatagttcccctaaaccccaacaggatcatccccgatgaaacaagtttatttctagaatcactattgattcatcaaataataggtacaaacttgggaacaatagaaatactcaacagattaaaacttgaacagattgatcaatttgaatttaaaaattttgtcatctctaagggcgcacctatagggaaatcaatagtctctttgcttttacgatgtaaaaagactttgacactggacagatttatagatactttactagaagacatagccgtgctgatcaaggaaatatcatttcatccgagggagtcaaaattggctgtcccatttttagttacgctgatgcaccaaattatccaattccgtccgagtgctacacataatttggcgttaaaggatttgttcctttttatatgcgatctaataaagatctatcaacatgtattgaaaacaccatttcacgaatcgaacatgaatttgaatgtagagcctcaaatcttccagtatgagctaatagactttttgattatttcatattcctttgatctgttagagactactataagagtgttacaatcacaccctaaacaaacctatatggaatttttcgatgaaaacgtactaaattcattcgagtttgtctacaaattagcattaaccatttcatacaagccaatgataaatgtgatatttaatacagtggaagtacttaatattatttcaaatatcattttaaacatggaaaatccttcaaacctgaaatctttagtgagcagcgtttggtggagagattgtattacaaaattatattccctcttggaaagagaaattaagagcggcgatgtgtataatgaaaacgccgatactactattctccatatgtctaaatttcatgacttctttggattggttagaaatattggtggtaatgaattgggagggctaatatcaaatctgatctatgacgaccggttgcaaagtataccgagagtaatttctaaagaagacatagtgtctgataaagacaacctgaccgcgcccctaataaaatataagttagaaaaatggcttctaaaattaaaggacgaagtgttgaatatctttgagaatctattaatgatatatggagacgatacaagcataataaatggagaaatgctcatctgttcatctgagtttttatcgagggaacaagcactaatggtagaaaggtatgtaggacaagactcgcccaatttggatcttcggtgccaccttattgaacatgcattgacaataatttatacgctatggaaagaccattttgaacaactacgtgaagaacaaatcaagcaagtagaaagtcaactagtcatgtcattatggagatttctcgtatgccaaacggaaaatgtgacaacaaacgaaagagagatgaaagatcatcgacatcttgtagacagtttgcatgatctaaatataaaagaccaagtctcttattatgaagatgcttttgaagaacttccaggatatatcgaagaagagttgatgacggagttaaataagaggactgcaagaataatgcaagtgaaatacgatgaaaaatttcaagaaatggcaagaagtattctagaatcaaaatcattcgacttaactacactagaagaagccgattcattgtatatttcaatgggattgtga

SEQ ID NO: 650 - DNA, 1596 bp, Saccharomyces pastorianus
atgtcacatctgttcccaccatcatcgcctgttgccgataagccattacaaagcccccaaaaagagctaagtgtctttggaaaatcttcagtattaactcttggaagaaaacggttcaatcacccagactccgatgtagaagagtaccctactccagatccgtcttctagtattggaagattgtcgtcgccggtgaagaaccgaacttcaaatatagaggagtccaagtctacttgcactttgttatctccttcaaaaaaaatgaaccgtagtgcaaaatttatcaaggttgagttagatcccacagatccttctcgtttggcaattggtagaaagaaatcagtttgtaatgtcattttgccatgcaggaaaaatatatctaggcaacatgcgttcatttcatatgtcactggtagaaacgaaataaaattggagtgcaacggcactaatgggttatctgtccttttcccatgctccatggacttgcacttgctaaaaccctttccaacaaggaatttttacaaactaatgatggaagtgcctgcgaatttacagaattcaaatgaaacacttacaaagtctctccagaaaaacaacgacgtcagcagttttgccttagtgaaaggtgaagctgtgtcgttcccgtatatcgaaggaactctaataaactttactggcgctacagtctgtctatgcttgaaagaagtacaacattatcttgaaaattgcaacaacgattttaacgaggaaaattcaacagaaacggaagatgaactgtgtttattatcagcaaatagtgacgattttcctcggccagcaaagactccttcgatgaaactcatccccgttgcgcattcgccttgtacagaattgatctccaaaccgtcactttccgaatcaccagcctttatgaagaggtcccccataacccataaaacaacaccacagtcatctttcgttattcaacagccatgtaccccaaagaagctcaagcggaaactaacttctataaaaaacaatactgttcaggagacgccgcttcctaaagataaggttacggaaccaccaaattctcgtagtagcaatggaaatactaacgaaggcgcaaatcaccgtctttcagataattttgcggtcgaaacaagattcaccgagccactttcaaaaattactgacgaatctccttcatgtaaacgtcaaaagacattaataaataatcattccgaaatttttcaattgcttgcgaaaagaggaattcatagggacgactttgttcatatattatgcaatcatcttgctttttctaatctccaacaaactccgttatccgacttacagaacatcaattcaatcacttcgcagttgagcagaagtgaattaaaagaagtactggatactattggctgtattggtatcatcatacgtacagggaaagatgcctctggtaatgagttagaagatgagtattactatgacattgaaaatgatgataacgatgagagaaagatcttgtataattcattgaaaggcagtagtcgattaagaacatgcaggaagaagcataaacagtatttttggaaaaagccaacgaaatga

SEQ ID NO: 651 - DNA, 2448 bp, Saccharomyces pastorianus
atggacctcccaactatcaatagtacaacaagcatttccgacaatgtggatttgaaaaactactatgacgacttactgttcaaaaacaacagtggtaaatcgctatcagacttaccccgtaaactgaatggtaattccgataactcaagcaatggtgctgttgatccgctcgctggtttgaacaccttaagaaattcaataaagagtagtggaaatggtatggaaagtagaagaacttttgacgatattgattttatgaataggttttcctatccgcaacagcaaccacaccaacatcaacaacagccaccgttctctcacccaaacaggttcattcaagaacagccttccagcacactaacttcttttcaaatgtcttcttctaattcagagccaatgtcaacaccacctgtttcatccaataataatcacatgggtcctactcaaatgggcacctatcaagctcagcaacagatgtttccacaatttaacggaaatttatttcgtccaaatggaaatgaattactgaataaaggaaacctaaattttatttcaaacaacggcaacaactttgctgccccatctcatagtgccggtaacccatccgatgttaacaaccaacatcaatcacaattcaactggcagcaatcgtctcatccagaatctaccgttaggagatcatcctatatatcggatacactaataaatcatcaaatgcctgggcttcaacaaaagcaagcaccaccatcgcagcagcagcaatctcaaggttttaatccctttaatagcagatttggctatgataacttgaattctactcgtttgaatccaaaaggtgtgcccgattttggaaatggtgtaccaccccttttctcctacgataatgatgctaataccagcaacaacggcgctaacaatcacaacatgattccaagccaacaataccggcggaacacgcagcctgtggcaggcttcaatccagccccctttagctttcaacaacaatcaagaaagtcgaacttagctaaccctctaaatggggaacgcatagacgatattcaacttgttcagttacaaaggagcagttctggcccttcttcaacgaactcacataatcttgaaaacgataactccaacgaagaaaaggtttcattggacaatggcttagttttgattaagggtaaacatttaacctcttccaagactttacacgatttatatagtgactgtggtagtggttattttgctgcttctgcagtttttgaattcacggataatatgaagaaaatgttaaagttacacgattctaacgaaagtcacggcaacaaaaacatgagctcaatcgatgaagaaggtagtactcatgaatctatattgggctttttggacgttttaagaggttgtaacttgaattatatcaatgatccagaatcgaataatggtactgtttccaataacggtaaaaacagaagaaaggggtcttttacaacagatttgacatctagaaataataatagctctttcctaccatatacaccattagtgttggttgcattgaagaatgggaaactagagttactatcaactccacaagccaccaatttgctaatgaaaagaggtgatttagttatcattgatggtgatcgtgggagagatttagttttggttgttgagccatgtgtggatttgaatttggcgttgttcataaacttcctcaagaagaaaattcactttgactctctaattacaagtgaatctcaacactatcgtaacaaagagtttattcaaatgctgattgattcaaaaaggggccaaaagaaaaagttaaaccccaaattgtatgatgtggttgaattaactgaattgattattccttctaagcaagtcttacggtttgccactccgtgggaagtaactactaatctacacaataaatttgaagacgaattaaaggctctacatattgctcaaacaaaattacaagctttgaatgataattctaaatctcaaaatacaaatgatggcgctcctaacagttttccaaattccgcaaactactctaagccgaaattgaatattaagattctaaatgcagaatttcaatttgatagaaagaaattaacattctactatgtttgtgaagaaagaaatgatttcagggacttaataaaggagctattcaaatattataagacaagaatctggctatgtgctatcccaaacaatttatcgatcgattctaagtattacgataatcaacaaaaagaactgaagttgtatcaagacatagtaaaaaattataataccgaagatctaatgaatgtaaatgacttctctcaaattaggtcaaataatagaattaactttgcgcctccgcttaatgaaatccaactcgataattttcaagttgctgtttataaagaattggttcatgaattgtttcactag

SEQ ID NO: 652 - DNA, 3390 bp, Saccharomyces pastorianus
atggcagtcaatggtaacagcatccaggccataaaggacaacaccattggtccgtggaaactaggtgaaaccttgggtctaggaagcactggtaaagttcaactagctcgtaataaatctacgggccaagaggcggcagttaaagtgatatcaaaggcagtattcaattcaggtaatgtgagtggtacttccatcgttggttccactaccccagacgctttgccttacgggatagaacgtgaaataatcattatgaagttgctaaatcacccaaatgtgctgaggttgtatgatgtctgggaaacaaatacagatttgtatctcgtactcgaatacgcggaaaagggtgagttattcaacctattggtcgagagaggacctctgccagaaaatgaagctattcggttcttcaggcaaattattattggcgtttcatattgtcatgctctaggtatagtccatcgcgatttgaaaccggaaaatctattattagatcacaaatataacatcaagattgcagactttggtatggcagcactagagacagaagggaagctattagagacttcgtgcggatctcctcattatgctgcgcctgaaattgtatccggtataccatatcagggtttcgcaagtgatgtatggtcatgtggtgtgatcctattcgctcttcttaccggtaggttaccttttgatgaggaagacggaaacataagagcactgctgttgaaagttcaaaagggtgagttcgaattaccctctgacgatgagatttcccgcgaagctcaggatctgattagcaagatattaaccgttaaccctgaaagaagaatcaaagctagggatatactcaaacatccattactgcaaaaatatccaagtattagggactccaaaagtataagagacctaccaagagaagatacataccttacaccgttatcagaaagcaactcttctattgattctagcatcctacaaaacttagtaattttatggcacggaagagaccctgacggaattagggcaaaactacaagaacctggcgcgaatgccgaaaagacattatatgctctactgtatagatttaaatgcgatactcaaaaagaacttattaaacaacagcaaatcaaaaaaaggcaatcaatcagtagcgtatctatttctcctcctaagagaacatcaacgactccgcaacgcagaagaaatagagaatctataattagcgtgtcatcttctcgtaaaaagccaatttccttcaacaaattcactgcatccagtgcttcatctagcaatttgactactcctggctcttctaaacgtctttctaaaaacttttcctcaaagaagaaattatctacaattgtcaaccaatcttctccaactccctcatcacgtaataaaagggcctcaatagcaaacgttgataaaaatcaaaaaagggcttccattttttccactacaaagaagaataaaagagcatctaaatccacaaggagaatgtcactaataccaagcatgaaacgcgaatcagtgacaacaaaattaatgtcaacatacgccaagcttgcagaagatgacgattgggaatatattgaaaaagaaacaaagagaacaagttctaattttgcaactttgatagacgaaatttttgaatatgagaaatacgatcaaataagaaaggaaaaggaagagctagaacgtaaagtgaaagaagcgaaagcacgtgaagagctagaacgcagaaaacgtaaacaggaagagaaagaacgttcaagaaaaatgctagaaaaagaagaactgaaaagaaaacaggaggaattaaagaagcagattgaaattgatataagtgatttagaacatgagttgatcaaccacaaagaagaaaaatttgaagggaacatcagatcgatttctgctccgatggaaaatgaagaaaataacattaatcatttggaggctgatattgataacattcttcgtcgccgtaatttttctttacaaacacgtcctgtatcaagacttgatcctggtataatattctcgagtccaattgaacccgaggatccggtggaaccaaagaaagctgaaaatgaaagacttacaacagaaaagaaaattctcgaaactattaggagatcgaaattcctgggttcctcatttaatatcgataaagaattaaaactgtcccaaatggagtatccaaatacggctgcctcacaaagattatcggaagagaggatagtgtctgaccctgatggtaaatacgaacctttggttcttccgaaagatgcaaagggtgtagctcacttaaaggataataccgcgccaactacagcagaacttctgtctaatggtgaattgagaaaaatatccgatattagagtaccacagtttactagaaaatcaagacattttagcgagtctaacaaaaggctctctgttttgtcaatgtactccacaaaggaatcgtttacaaatttagttgatattctaaaaaacggtaacctcgatgttaacccacaacaaaatcaaagagtgccaacaccaagaagtgcagatgattcagaatttctttttgaaactgtcaatgaagaggctgaatgtaccggaaatagctcaaacgatgaaaggttatatgatatgggtgattcttgtgtcaaagacaagaacactttaaagctaaattttgccgatcgtttcaatggatccaacaatgaaaagggaaacaacaacttgcatcttccaaccctgcctccattaaacggggaagagggggcaaataagcagggggaggagaagaaggagaaggaagaacttcatgagcaagcgaaggttaagtcaatgatacctgaatcagattcttcgtcgcatgctgaaaaagaacaaaacgagaaagaagatcaacaaagagatggaaaagatttagaaccaccattgaataagaccgtacaaaagacaagagaaaagaacaatggtacacaggtcaaaaatcaatcgacggacctaaaaccaaacaagaatgcgagtggaagtggctcttttttcagaaaattttcaaaatcttctacttcggaaaaatcaatagagttatacgctaaagtttcagcaaaacaattattcattggtttagagaaattgctacgtggttggaatcaatatgggttgaagaatgtcaaatccaatccaaacaatttaacattaacaggcaaactatcaagcgaaaatatgttttctttacgttcgacactatttgaggttagtatttatccaaagggtaaggtgagtgttggggatttcaagaaaatttctggttcattcaaatctgttaaaaaattggtcaaggaagttgaaaacgtactaaataaagaaggcgtacttcaaaaatag

SEQ ID NO: 653 - DNA, 1998 bp, Saccharomyces pastorianus
atgacacttggtaacagacaccatgggcggaacaacgagggaagctcgaacactaatatgtacgggaacaactcagacggtgtttcgcattacgaaatgaaggaaatccaggcaaaggaacgagaaatcaattccacagcgccagaaaatgaggtcgagtattttgaaaacacaatggaaaagaccatggaaaatcttgaatacgagggcgaccgtaaggcgtcgcatctgcgcagatttattgactcatttagaagagccgagggctcgcacccaaactctccggactcgtctaactccattggcgatgggtctatccccatatcgacaaacgactccagttctcagttggacaacgagctgaatccaaagggttcttttgttaacgagaacgggatcaagcagccttcacaagaacaagaccaaaatcaagaaaacttgaaaaaaacgataaagcctcgtcacatcgtcatgatgtcattggggacaggtatcggtactggtttactggttggtaactccaaagttttgaacaacgcgggcccagcaggtctagttatcgggtatgccatcatgggtagttgtatttactgtatcatccaagcttgtggtgaattggccgtcatctacagtgacttgattggtggtttcaacacttacccttcatttctggtcgatcctgcgttgggattctccgtcgcttgggtttattgtttgcaatggctatgtgtttgccccttggaactggtcaccgcgtccatgaccattaagtactggaccgtgaaagtcgatccggatgtctttgttgttatcttttacgtcttgatcgttattatcaacgttttcggtgctaagggttatgcagaggcagatttcttcttcaactgttgtaagatcctgatgattatcggtttttttatccttgccattattatcgattgtggtggtgccggtacggatggttacattggcagtaaatactggcgtgatcccggtgccttccgtggtgataccggtatccagagattcaaaggtgtggtggccacatttgttaccgctgcatttgcctttggtatgagtgaacaattagccatgactgctagtgagcaatccaacccgagaaaggctatcccatcagcagctaaaaaaatgatttacagaattctgtttgtgtttttgggatctttggctctggtcggtttccttgtaccttacacttcagaccaactgttgggggcagaaggctcagccactaaggcgtctccttatgtgattgccgtagcttctcatggtgttcgtgtggtgcctcatttcatcaatgcggtcatcctattgtctgttctttccgtcgccaacggtgccttctactccagttctcgtattctgatgtctttggctaagcaaggaaatgcccccaagtgttttgattacattgatagagaaggtagaccagcagttgccatgcttgttagtgcactatttgctatcattgcattttgtgcctcttctccaaaggaggaagacgttttcacatggttgttagcaatttccggtttgtcccaacttttcacttggatcaccatttgtttgtctcatattagatttagaagaggtatgaaagcgcaaggcagatcccttggggaggtcggttacaaatctcaagttggtgtttgggggtctgcgtacgctataatcatgatggtattggctttgattgcacaattttgggttgccatttccccaatcggtggaggtggcaaattaagtgctcaatcatttttcgagaattacttggccatgccaatcttgattgctttatacttcttttacaaattttggaaaaaggattggactttgttcattcccgctgataaaatagacttggtaactgacagacaagttttcgatgaggaattattaaaacaagaagatgaagaatatcaagaaaaactaagaaatggtccatactggaaaagaattgttgatttctggtgttga

SEQ ID NO: 654 - DNA, 306 bp, Saccharomyces pastorianus
atgtcagacactgaagtcaatcaagaagccaagccagacgtcaagccagacgtcaagccggagactcacattaacctgaaggtgtctgatggctcttcagagattttcttcaagatcaagaaaaccactcccttgaggagactgatggaggctttcgccaagagacaaggtaaggaaatggactcgttaaggttcctttacgacggtatcagaatccaagccgaccagacccctgaagatctggacatggaggacaacgatatcatcgaggctcacagagaacagatcggcggtgctatctattag

SEQ ID NO: 655 - DNA, 1452 bp, Saccharomyces pastorianus
atgaatttttggacaaagtctatgaaagcatacgaagcaataggcaaaatggcttcacatagatttaactccaaagcagttcgcaattaccatcaaccacaagctttgaatagaagtttaacaacccgtaatgcagcaaaagtcagaggtatggttccttcaagaagggagggcattggatcatacaagagctcgagtaacaatttaaaaaataaactggggaaacacgtaacgtggataaatgaatttgagcattttaatgctttgcataaagtttcatattctcctaatgatttgttgagagatgaaattcaaaaatacttgaagatcttgaacacaaactaccagtcaatcagcaaaaaaagcacagaatccttaaacaagaaactggaagttgtgaacaaggaatgggttgagaaaaatggacatatacctgaagtatcgaaagatgacaaagagaaaggcttaagaaagcagtatttggcgcatgtaaataacgtcaaaaacgagcatataccgacgatggattgcaaacctggtagttctcaattcacatatctttccaatacgattgagctgttatcatccaacaaaacaatttgttttgccgttgatgtggaggctttcgagttcgatacaaatatcgttaccgagattggaatttccatatatgatccaagagaaaacaaacattctttgacaccgatcataagaagttatcatttagttgtagctgaggcattaccgctaagaaataagaaatttgtgtgtgatttcaaggactgctttttattgggagaaagtcttgttctaccattggaacagtgtgtggaatttatacaatcgttgatcaatttctacatgaaatgtgagacagatgaagatttgagttgggaaagagcttttgtaggtcacagtatatcgggggatattagatggttgaagaagattggcgttcacatacccgagttggataatgaattagacaaaccagatggttcggtggaggctagtgatctcaggaaacacataaagatgcttgatacagagaaaatctatagcatctgttacggtaaaaagggcagtagtttgggtaagctgctaagactatttcatatgccacatgccttcttacataatgcgggcaacgatgcatactacacactgctattgatgctgaagctgggagactttaattttagaaaacagattggagccgatgatttggaagcaatgggtcataggataagacaatggtttgatcgtgagaaggacgagcccaagattttacctatgtcgtatgtattaagcgtgatgaatgccaacaacgataagggaaaagcaaacgataatggaagaaagaaaataaaggacctggtcccccagacggaatttagcgggtcacaatggttccaaaacgcacgggcagcgttcaaaagtacgcttgtataa

SEQ ID NO: 656 - DNA, 1311 bp, Saccharomyces pastorianus
atgtccgctcaagggcctaatgataattcaaacgatttgcccttagtgcctgaagataagaagaaacaggcatcatctttaaagttggctccaataccaactacatcaccgtggaaatcatcttcaccaaatagcaccacgacacttcctgtggaagagttaagagacaaatcgaggctttcgaagtccaataacaacggctcaggatcgatcagattgagcagcgacacaaaatggactccaattacaccttctgttataatttcaggatctaaagaggcaaattccaattcaagacgaaaggctaaaagtgtcaaaaataatagaaagatgaaacaacatagcagcaacaacagtaatgctattaaaagagtttgcggtgatcaacccagtactgttgccgaaacgaatgatgaccccaattcagaacacaagtctaccgatgctgacttaagagcaaaagcaaatttagaccaagaagtacccattgccggtattggccagaaaacagaaaatggaaagaatacatctaatcccagacaacaaaaaaatcaccacaacaaaaatagtaaaacgaggtacaataaggcggctcatcataacaactcgttttcgaataaccattatcaatcaagatctgactatattccaaatttcggccacgattcggggcctggttacaaccaacaaacgcatttccattcacagcaatactataacaattacaactaccagcaacagttgcaaacaccatattataatctgatggaccctattctcaaatccatcgaaagcattaaaaatcaaattgaatactattttagtgcggagaacttgacaaacgataaatttttgaggtccaaattcagtaagaccaacgatgggtttatccccatgagtttaatagggaaattctatcgtatggtcaatttatctttaggtggggacccgaatctaattttggcatctatgagagaagttctgaataacggtgaaacaaaccatttggaaatagcctttggaaggaccgaaaacgcccaggtaaaaccggcatatgagttcaacccattagataactatttcatcagacctgagaattgggccgagttcacggaagaaaattccaatgaaactgatgaaactgagaagtataaaattgaaaagattttagaaataggcgatttggataatcattcatatatgggatatccgtctttttaccccagtaatgtaaatgaggaaaatagccaaactcaggatgaaaatacgatgaacagggagtttgagcaaaacttgcaaataaacaattaa

SEQ ID NO: 657 - DNA, 1503 bp, Saccharomyces pastorianus
atgtcgtttgaaaatttacacaaggtcaatgccgaggcattggaagaagccgtggtggagatctgctcctcactggacgtcgatgcagctaagctggacgaactgacagcctacttcatcgaatgcatggaaaaggggttgagcagcacttctgtgggcgaggagaagacagtggacaagggtctgcccatgattcccacgtacgtgaccagtttgcccaacgggacggagcgtggtgttctcttggctgccgatcttgggggcactcacttccgtgtgtgttctgtgaccctgaatggtgacgggacgttcgacatgcagcagttgaagtccaagatcccggaggagtacctgaacgacagggagattaccagcgaggagcttttcagctacttgggtcgccgtacaagggcgtttgtgaggaaacaccacccggagttgttgaagtccacgggggagaacatcaagcctttgaaaatggggttcaccttctcctatcccatcgaccaaacctctttgagctccggtacgttgatcagatggaccaagagtttcaagatcgaggacaccgtcggcaaggatgtggtgaggttgtatcaggagcaactggacatccaagggctctccatgatcaacgtggtggctttgactaacgacaccgtcggtactttcttgtcgcattgttacaccacagcagctcgtccttcaagcgctggtgaaatcagcgaacccgtcattggctgtatctttggtacgggtaccaatggttgttacatggaagacattgaaaacatcaagaaattaccagaagaactgagaacacggctacaacacgaggggaagacccagatgtgcattaacatcgaatgggggtctttcgacaacgagttgaagcatttatccgccaccaagtacgatatcgacatcgatcaaaaattctccccaaatccaggctaccatcttttcgaaaaaagaatttccggcatgtacttgggtgaactactgagaaacatcttagtggacttacacgcaaggggcttgatcctgggccagtaccgtacctacgaccaactgcctcatcgtttgaagaaccccttccaattatgcagtgaagttctatccagaattgaaatcgatgattccacaagcttgcgtgaaactgaattatcatttttgcaaagtttaagacttccgaccactttcgaagagcgtaaagccatccaaaacttggtccgttccattacaagaagatctgcgtacttggcgtctgtgccaattgccgctatcttaatcaaaacaaacgcattgaacaagagatatcacggtgaagtagaaatcgggttcgatggttacgtcattgaatactaccctgggttcagatccatgctaagacacgccctggcgctaagtccaattggtacagagggtgaacgtaagattcatttacgtttagctaaagatgggtctggtgtaggtgcagccttgtgtgctcttgtagcatga

SEQ ID NO: 658 - DNA, 1554 bp, Saccharomyces pastorianus
atgcaagtgaccacaagcttcatatttgctatagtctcattctgcctgtctgcctctttcacactggctcagaatgatgcaagagctacgccaggctccgatttgctcgttttgaatgaaaagaaattcaaatcgttcatcgactctcatcctttagtccttgcagaattctttgcgccatggtgcctgcattcccagatcttactgcctcatttggaagaggctgcctccatcttaaaggagcacaacgttccagtcgttcaagtcgactgtgaggctaacgacttgctttgctcgcaacaaaccataattacctatccaactttgaaaatctttaaaaatggtcacatttttgagggtcaaatctaccgtggtgccaagattactgacgacatcactcagcacatgatacaactgtacgaagcatccgtcatttatttgaattcagaagatgaaatccaaccattcttggacaattccactttacccgtggtcataagcagaggtttaacagccttgaatgaaacgtatcaagaagtgtcactggacttgaatgacgactacgttttcctatcccttttggactcaaacgataagtcgttgtcagtttacttaccaaacgccactgaacccatcctgtttgacgccgatgtgagttccttagttggaaatcctatcgccctgtctcaatggttgagggtggtcgttctaccttatttcgtcgatgtcacgcccgatcttttctccaaatacatctctagtagtttgcctttgggttactttttttatacttctaaggaagaactggatgattacactgaattttttaccgaactaggtaaggaaaatcgtggccacataaatttcattgctttggactctgctctgtatccaaatcatgtcaggttcttaaatatgaaggtgcagttccccttattcgctattcataacatgatcaacaatctgaaatatggattaccgcagctgcccgaagaagagtatttgaatctaaagaaaccacaaccattagataaagatgcgatcgttcaattggtcaaacaataccgtgaggggactgctgaaccagttgtcaagtcagaagaaattccaaaagaacaaaactccaatgtttacaaaatagtaggcgacacgcatgatgacattgttcatgatgataatagagacgttcttgtcaagtattacgcctcgtggtgtgttcacagtaagagattcgcgcccgtttacgaagagattgcagatgtttttgcctcagatgagtccattcgtgataaaatcttagtagccgaagtaaattccggcctaaacgatatcatcagctttcctgtcacgggatacccaactattgctctctaccctgcaggaaataactccaaacctgttgttttcaacaaaattagaaatttggaagacgtgtttgaattcgttaaggaagcaggtacccatcatattgacggtcaagcaatctataatgaacttcacaaagcagaagattccgaaaacgttaaagaagatacagtgcatgacgaactgtag

SEQ ID NO: 659 - DNA, 408 bp, Saccharomyces pastorianus
atgttatccaatatataccttttcttcactttttttgccgcagttttagctggctctttaacggatttggaaatcggtgtcactaaaagaatacccgtggaagaatgtcaaatcaaggcaatgccaggtgataaggttgaagttcattacactggttccttattggaatcaggtacagtatttgactcaagttacccaaggggttcccccattgcttttgaactaggtgttggcagagttattaaaggctgggatcaaggtgttgctggtatgtgcattggcgaaaaaagaaaactgcaaattccaagctctttggcttatggtgaaaggggtgttcctggtgccatccctccaagcgctgatttggtgttcgacgttgaattggtgagtgtgaaaccagccgcttaa

SEQ ID NO: 660 - DNA, 1437 bp, Saccharomyces pastorianus
atggatcattacagcactaataccaatcgaaatgtcgtgtccttgtccatcgaaggtatggcagcagcaacactagcaacaccgcatcactttttatggtacaacaacacgcaaaagctaactaatattcttcttaaatctctacgatgtaaactactaaagaaacgctacgagacggattggggttccgacgtgtgtcgtattatcgtaaaaagcatcgcttcattaataaccgcgaaagaaatattggtattgctacagttacctctttccttacctccaaaattcccacgtcatccagcccaactgtcattcacacacctctcatctggccttggtgggaatcagcagaaaaccacgcattctcatcatttttatcatcgtactcgtcgcgttcacagtgatggtaacagtaaaagtcgcatgccatcaaagactgagtcgtccaaacaacatactcagcacatttctttcaccaatacgggaccttccaacaaggatgagctattgacaatcgttcgcaatcttgataagtcaaatctgaaatgctgtgattgtaatagcactgcaaccgtggagtgggtttcaatcaatttattatgcatattatgtatcaaatgttcaggcgtgcatagatctttaggctctcacatctctaaagttagatccttaacactagacaatttcacctcgatagaactaatacatcttttacaaaacaatgtctctaatagtaacatcaatgccatttacgaaagcaatctccacaatctatcgacaaagaaaataacatccaactccacggacttggaaagatcgagatacattattaataaataccaatttaaaaaatttgttatcgatagcaaccaggacaaagaaacttccttaaagtctctgatcaaggctatccatttagatagcatcttcatgatgcaaagagctattgcgcaaagcaagcattctttaagagaattaacgacaagcgaaaaagagcagaacgacttgaaccatccatccattttccagtactctttaaaacattacgaaattattaacggaatcccgatattcttcattacagagtatttattatgcaacggcatttatatagatgaactacccaagatcactacaaattggtctccaaaagtattagaatattgggagaccaaactagaaatgtacggaaatttccaagccgccactgctcgcccacaatcaggtccacatttaaatactccttctagcacgccttgcacagctgctcataataagaaacaaaatttgaaagtgaatatacctgaacgtagtgcttccgcaagtaagagatggagtttgagttccattcctaaatcttctcaaaatttaatttccccgacaaatttactatcaatgcacaagtctttaaaattggccaaaaaggacaaaaaatag

SEQ ID NO: 661 - DNA, 204 bp, Saccharomyces pastorianus
atgcaattcaagaccatcgtcgctgccttcgctactgttgccgctgtccaagccgctaacgtttctaccaacggttctaccaacggttctaacggctccaactccaccagcaccaagatctccaccggtgctgctgcttccaacgctttgggtgctggtgtcttcggtgctgccgtcgctgccggtgtcgctttcttattctaa

SEQ ID NO: 662 - DNA, 243 bp, Saccharomyces pastorianus
atgcacgcccgcgattggttattggtcttcattgcaattttcgtccccccattagcagtctggctgaagagagggttcttctctaaggatctgctcattaatttcctgctgtttttgctgggattcttccctggtttgatccatgccatgtacgtgattagctgccacccatacgaggaaaacgaggcctctgggtactcgcacctatcttccactgacgataactatggtagtttagcatag

SEQ ID NO: 663 - DNA, 1317 bp, Saccharomyces pastorianus
atggatctattgggtgatatagtagaaaaagatactttaaacgtagtcgaaagcaacgacaatgatgctcctatggccagcaactccaagacgggattccctgaattgtacagaccccaaaaaatatcttcctggaaagaaagattaagagagaaaagagctcaaaggaaggactctggggctaaagaggctaaaaaacaacaagtggccactgctgctccgcgatccgaggcaaaatccattcatgaagaaaatatcaaagtcttgcaggagatgaccgatgagcaaataatgaacgaacgccaggacctgtatgattcgttggatcctaaattgattgccaatcttctgaaaaacataaacaagagagctaaagacgaaaccgatactccattatttgcggaaatagaaggtgcgtctggcacctgggtcggtggcaataagcaaggcattaataatctaccgcctttggaagacgaagacgtggatgctgctttagatatcagacctaaatctagtacgaacgcaaagcacgttgcatttgaagaagaggaagaagaagaggaagaagaagaagaagaaaacgataacgatgccgatgatgttgcgcctttggatttccaaatggcacaaagcattgaccacatgaaaaacgaagatcttttcaaagacgttcatttcataaaggaagagaagcaaaacgaaatagatttggagaaactagacatcaatgaccctgatttcaatgacaaactgcacgataagtacttcccggatctgcccaaagaggtcaataaactgaaatggatgcagcctatccgccaggaggaaaacaaaactcgcattatcgaagacgttttcgagtgtaggttcgattttagcggtaatcttgttccacccacaagacaaatagaatctaccgttcattccggcttgcaccatcatagcgactcgcccgaactggctggttacaccatagtcgagctagaacatttagcaagatctactttcgcatctcaaaggtgtattgccatacaaaccctggggagaatcctttacaaactaggccaaaagagctactaccaactagtgccggagatcgatgcagagacatacaaagaagatgggagtatatccaacgttatggataagatttattccatgttttgggatttgattatagatggcaaaatcattgaatcactggaaattgcctcggatgaaaaatatactagaaatctatcagtaagaaattatgctattgacgcactttggctatggaaacaaggcggcggatactttagagtcaagaaatag

SEQ ID NO: 664 - DNA, 384 bp, Saccharomyces pastorianus
atgccacaatcatttacgtccattgtgaaaattggtgattacattttaaagtcacccctcctatctaaactatgtgtccctgtagccagccaatttgtgaacttttcgggctacaagaaactagggctcagatatgatgacttaatcgcagaggaaaatcctgtcatgcaaactgccctaagaaggttgcctgaagacgaatcatatgccaggtcgtataggataatcagagctcatcaaaccgagttgacccatcatttgctaccaagaaacgagtggatcaaggctcaagaagacgttccttacttgttgccttatatactagaggcagaggctgcggcgaaggaaagggacgaattggataacatagagatctccaaataa

SEQ ID NO: 665 - DNA, 714 bp, Saccharomyces pastorianus
atgtctccaaataaagtattactagcactcacttcatataacgatgtcttctatagcgacggctccaagaccggtgtcttcgcagtggaagctttgcatcctttcaatactttcacgaatgaaggtcttgaagttgactttgtatctgaaactggtaagtttggttgggatgaacattccttggctaaggaagccctagacggccaagataagattgatttcgaaaataagagttccaatttcaataaggcactggcaaaaatcaagactccaaaggagatcaatgcagatgactaccagatattctttgcatctgccggccacggtactttgttcgattacccaaaggccaaagacctgcaagatattgcatccgatatctacgctaacggaggtgttgttgcggctgtttgccacggtcctgctattttcgatggcttaacgaataaaagtacaggtaagccattgattgaaggtaaatcaataactggtttcaccgatgtgggtgaaaccgttttgggcttggacagtattttgaaggctaagggcttggcgacagttgaagatattgctaagaagtatggtgcgaagtatttggctccggttggtccttgggatgattactccattactgacggaaaactggtcactggtgtcaacccggcctctgctcattccactgctgttagatccatcaaggctttagaaaattag

SEQ ID NO: 666 - DNA, 1491 bp, Saccharomyces pastorianus
atgactgtagcacaacctgttgctcacctaactgctgaggaatacccaaaagtcaagagaactgttgattttaagattctagatcctactgatttgtcatatttccattctattttgtcaaacgatgaaatattagaatcgaagaatcctggagaccttgtttccttcaaccaggattggatgaaaaagtacagaggccaatccaatttaattctcttgccaaattctactgaaaaagtctcgaaaatcatgaagtattgtaacgaaaaaaaactggcagttgtaccacaaggtggtaatactgacttagtaggtgcctcagttccagtttttgatgagattgttctttctttgaggaatatgaacaaaattagggactttgatcccgttagtggggcttttaagtgtgacgcaggtgtcgttatgcgcgacgcacatcaatttttgcacgaacacgaccatatctttccattagatttgccttcaagaaataactgtcacgtaggaggtgtagtctcaacgaatgccggtggtttaaacttgttaagatacggttccctacatggtaatgttttaggtttagaggtagtcctacccaatggtgaaattattagcaatatcaatgcattaagaaaggacaataccggttacgatttaaaacaattattcatcggtgcggaaggtactattggtgtcattactggtgtatctatccttgcggcagcaaaacctaaagctttgaatgccgtttttttcggtcttgattgttttgatactgtacaaaaattatttgtcaaggcaaagggtgaattatcggagattttatctgcttttgaattcatggatcgcggttccattgaatgcaccatagagtacttgaaggacatgccatttcctttgaagaatgaacacaacttttatgttctcattgagacctcaggttctaataagaagcacgatgacgaaaaactgagcggtttccttgaagagactctgaactcaaagctgatctcagagggagtaatggctaaagacagagctgattatgatagactttggacttggagaaaatctgttccaacagcttgtaactcctacggtggtatgtacaaatatgacatgtcccttcagttgaaggatttatattcagtatcagaagccgtgacagaaaggttgaatgcagctggtttgattggtgacgcaccaaaaccaattgttaaatcttgtgggtacggtcatgtaggtgatggaaatattcatttgaatatcgcggtaagagaattcacaaagcaaattgaaaacttacttgaaccatttgtttatgagtatatccaatcaaagaagggttccatcagtgctgagcacggtgttggcttccataaaaaaggaaaattacattattgcaggagtgacattgaaataagatttatgaaagatatcaagcatcactatgatcccaacggaattttgaatccttataaatacctctga

SEQ ID NO: 667 - DNA, 1884 bp, Saccharomyces pastorianus
atggacccaactactgtcaatagggtgctttccgaagaattcacagaggttgccgttcccgaaattctggaaaaggaagctggtgcgactactgccgttggccctgcgttgaccacatcttccccggctccctcttacattgaattgatcgacccgggtgtacgtaacattgaaatttacgcagaacagtacagccgtcctctataccgtgtcggcttgttcttctcacttttccttattgcctatgcttacgggttagatggcagtgtccgttacactttccaggcgtatgctacttcttcgtactctaagcactccctattgtcaactgtcaattgtattaaaactgttattgctgcggtaggtcaaatcttttttgcaagactatctgatatttttggcagattctccatactgattatcagtgtcatcttttatattgtggggacgatcattgaatcacaagcagtgacgatcactagattcgctgttggtggctgcttttaccaattgggtcttaccggtgtcattttgattctggaggttattgcctcagatttttccaatttgaactggagattgctagctttatttgttcccgctttgccatttatcattaacacctggatcagtggggacgtaacaagcgctataggcagtaactggaaatggggtatcggtatgtgggctttcattttgcctttaacttgtattccattgggtctctgtatgttgcacatgagatatttggcaagaaaacatgcaaaagataaattgagacccgaatttggaaccttgaataaactagactggaagtccttctgcgttgacatagttttctggaaattggacttaattggccttttgctagtgactgcattcttcggatgtgtgttggttccatttaccttagccggtggcttaaatgaagaatggaaagctgctcacattattgtacctgaagtcatcggttgggtagtggcgttaccactatatatgttatgggaaattaattattcaaggcatccattaacaccatgggatttaattaaagacagaggggttttctttgccttgtttattgctttcttcattaattttaattggtacatgcaaggtgactatatgtatactgtgctagtcgtctctgttcatgaatccgtcaagtcagccacgagaatcacctccttgtactcatttgtttctgttattgttggtacaatccttggaattatattaattaaggtgagaagaactaagcccttcatcatattcggtatttcttgttggattgtttcattcggtcttttggtccattaccgcggtgactcaggcgcacattcaggtataattggttctttatgcctattaggttttggtgcaggttcatttacctatgtgacacaggcttccattcaagcttctgctggaactcacgcgagaatggcggtagtaacttcattgtacttggctacctataatattggttctgcattcggcagttctgttagcggtgctgtctggaccaatattttaccaaaggaaatctcaaagagaattgctgatcccacgttggctgcaacagcgtacggctcgcctttcgaatttattaccacttacacatggggtacaccagaaagaattgctttggtcatgtcttatcgttatgttcaaaagatcttatgtatcataggtttggcattctgtttccccttattaggctgtggattcatgttgagaaatcacaaattaacagatactattgcgcttgaaggcaacgatttcttggagagcaaagacaataatgaaattgaggaaaaggaagagacttccctaaaaactagatttttggcccagttcacaagtaaagtgaaagaaaattag

SEQ ID NO: 668 - DNA, 1452 bp, Saccharomyces pastorianus
atgaatgaattgggcgagtacagtaaactagaaagcaaggagcttagaacggagtttgaattgacagacttcccttttcctggcataactgacaacgactcggatgacgggagtcaaggaaaggactccccaaatatcatctaccctattacttctgatacggatgatcagttagtcaatagtatgcttcgggaaaatgatagaaaatctagcatgagaatggcttttatgaatttagccaattccatcctgggcgctggaataattactcagccgtttgcgatcaaaaatgctggtataattggcgggctgatatcatacatagcactcgggtttattgtcgattggacattgaggcttattgtcattaatttaactcttgctggcaagagaacatatcagggtacagtcgaatatgttatgggtaagaaaggaaaattactaatccttttcacaaatggactatttgccttcggcgggtgtattggttattgcattatcattggggataccataccccacgttcttagagccatgtttagtcagaacgatggcgaagtacatttctggcttagaaggagcgttatcataatcatggttactatcttcatttcctttccgttatctttgaaaagaaatatagaggccctatcaaaggcatcttttttggccgtcattagtatgatcgtgattgttctcacagtcgttatcaggggtcctatgctaccatacgattggaaaggtcatacccttaaactatcagacattttcataaaaaaaaccatcttcagaagtctgtctgtcatttcctttgcgttggtttgccaccacaacacaagttttattttcttttccatgaggaatagaagcgtagcaaagtttaccaaattgacacatattagtataattatttcggtaatatgctgcggcttaatgggttattcaggatttgctgcttttaaggagaaaacaaagggcaatgttttgaatagtttcccaggaacagatgcagctatcaacatagctagactgtgctttgggtttaacatgttaaccacttttccgatggaaatctttgttttacgagatgttgttggcaatttgttacatgaatgtcaccttattaaaaattatgacgagcacactcaattatcaggcaagcagcacacaataataacttcgatactggtctttattaccatgggcatatcattaactacctgtaacttgggtgcgttatttgaactaattggagctactacggcatccacaatggcttacattttaccgccatatacaaacctattgctaacgagtaaaaagaaaaattggaaggcgaaacttccatactacttttgcatttgttttggttttatgattatgattgtcagcagcactcaaactattttagatgctgtcaatagccccaatgggcagcactgtcagatatag

SEQ ID NO: 669 - DNA, 1815 bp, Saccharomyces pastorianus
atgaagttagaaaacactctatttactctcggtgccctaggaggcatctccgctgctctggttatccccaatcttgaggataccgccgaccatcgcgagctgatgggcaaggaggaacacgatagccccagacacgctgagtttgccgacggcaacgacagacatgacgaaaaacctccacacaagaagggccgcaaggagagaaagaacgcggaatctatcgaggacagctccgacgacgaggacaagccccaccgcaagggcggctgccacggtaagaaggacaagaaggacaagaaagacaaaaaagccaaggacaagaaacaccacggcaagaaacttgcaaagggtgagaaacaccacggcaaggagcaccacagcaggctggctcccttggtgtccgctgagcagttcaacccggacgccatctccaagatcattcctaaccgctacattatcgtcttcaaaaaggacgtttcttcggaacaggccgctttccacagggaaaccgtccaccaagcgcaattgcaatccgtagagaacttggccgccgaggatgcctttttcatgtccactagagactccgccttgtccacctccgagaccggcggaatccaggactccttcaacatcgacagcctgttttccggctacatcggctacttcacccaggaaattgtcgacttgatccgccaaaaccctctagtcgactttgttgaaaaggactccgtcgtagaagccaccgacttcgacactcaaaacagcgccccttgggggctggcccgtgtttcccacagggagcgcctgaaccttggttctttcaacaagtacctctacgacgacgacgccggccgcggcgtcacctcctacgtcattgacaccggtgtcaatgtcaaccacaaggacttcgaaaagagagccatttgggggaagaccatcccactcaacgacgaagaccttgacggcaacgggcacggtacccattgtgccggtaccatcgcctccaagcactacggtgtcgccaagaacgccaacgttgtcgccgtcaaagttctgagatcaaacgggtccggtaccatgtccgatgtccttaagggtgtcgaatacgctgccaaggctcatcaaaagcaagccgaggaaaagaagaagggcttcaagggctccaccgccaacatgtcgcttggtggtggtaagtcccccgctttggacctggccgtcaacgccgcagtcgaagccggtatccacttcgccgtcgccgccggtaacgaaaaccaagacgcctgtaacacctctccagcctctgctgacaaggccatcaccgtcggtgcctccactctgagcgacgacagagcctacttctccaactggggtaagtgtgtcgacgttttcgcccccggtttgaacattttgtccacatacatcggcagtgacgaggccaccgctactttgtctggtacctccatggcctctcctcacgttgctggtctgttgacatacttcttgtcgttgcaaccaggttccgacagtgagttcttcgaatcgggccagaaatctttgacccctcaacaattgaagaagaagttgatctattacagtaccaaggacatcttgttcgacatccccgatgacactccaaacgctttgatctacaacggtggtggccaagacttgtccgccttctggaacgacaccaaaaagtctcactcgtcttccggtttcaaacaagaattgaacatggacgagttcatcggttcgaagactgatttgatctttgaccaagtaagagatgttcttgataaattgaatatcatttaa

SEQ ID NO: 670 - DNA, 225 bp, Saccharomyces pastorianus
atggcgccaccaaccacaattcgcggcagagaccaggcgctggctccactggccacacccgactcccacactcactgccacctgaaagagctcgtgcagtgggagtgccagttcaagggagcagactacatctgctcgcccttcaaacggctctttgagcattgcacggcacccggtaaagcggccaccaactacgaggtcaccgatacatacaccaacagctag

SEQ ID NO: 671 - DNA, 702 bp, Saccharomyces pastorianus
atggcaaatggcgggatccagaaaaatgacggtacaacaggttctaaaacagtacagttttggacttattcaagggaaattgacatcatcatgaaaaagatatcgtttctggaaaggaacataaccagacaactggacactctcccacatttcccaaagactttgccgccaaatcacgaaacacacataaacagaacgaggagggcgaaggggagttggagtactcagctgaaaaacttattagggatttactccagggacgaaatctccactttggacaatttagctgcaacgcttcatgaccaagttttgaaactgcaaactaagctgttcccagttgccatactaaaacaggtccatcttaataaggacaacgtagaaaaccaaaaaatcctaaaagagattacatacgagtacctttccaagaaaaactgcccacgggagagtaaatttggcgcgttcatcgtcaaaaggatttttttcggtgatctatctcttggggtttccatattggtcaaccgaacagcttttgagacagttcaatcgtccactgtagtggtgagaagttcttttattgaaaatgatttcctttacgaagactacttgatatggggttgtagaatgaaaagacgaaagaaattcaaaaggaaaatcttatttatttctactacaataaatttcaattatcaaactaaagtttaa

SEQ ID NO: 672 - DNA, 1206 bp, Saccharomyces pastorianus
atggaaactcaagaaaagccactttccgtggatgaggagtacgatttatggaaatccaatgtgccattaatgtatgattttgttagcgaaacgcgtttaacgtggccatctttaaccgtccaatggctccctacacctgtgcaagaaccagaaatgggctttatcaaacaggaattaattattggtacgcatacgtccggtgaagaggagaattatctaaaatttgcagaaatcaaccttcctgaggaaatcttgaacaatgaagatccacaagaagaagccgaagaggacgatgaggcctctgttcccgctcccagatcgaacatcaaaatcatcactaagtacaagcacgaagaagaaatcaccagagcccgatatatgccccagaaccctgacactgtggctaccataaacggacagggtacagttttcatatattctcgctcagagggccttcaatctacactgaaatttcacaaagataacgggtatgctttgtcgtttagccctctagtcaagggtcaattgttatccggttcagacgatcataccgtcgccctatgggatgtgaatggtagcagtgattcaacaagaccaatacgaacttggagtgatttgcattctgatattgttaatgacagtaaatggcataatttcaataaagatatattcggtactgtttcagaagattttcttttgaaaatcaatgacctgagggtagaaaataccactactggtactacgaagtgttcacaaccttttaatgcattagcgtttagtcatcactcttcaaatcttttggcggctgcaggtacagactcacatgtttatttatatgacttaagaaatatgaaagaaccattgcaccatatgtcaggccatgaagacgcggtgactaatttagaattttcaccccatgtggatggcgtggtcgtttctagtggttccgataataggttgatcatgtgggatctgaaacaaattggtgcagagcaaactcctgacgatgcagaggacggtgttcctgaattaatcatggtccacgcaggtcataaaagtgccgtgaatgattttgatttgaacgcacaaataccctggttggtggcaagtactgaagaagagaatattttacaagtttggaagtgctcgcatagtttaccagttgtagggggtccgccaaaagtaagcatggacatgattagttaa

SEQ ID NO: 673 - DNA, 498 bp, Saccharomyces pastorianus
atgcctccaaagtttgatcctaatgaagttaaatacttatacctaagagccgttggtggtgaagttggtgcttccgctgctttggctccaaagatcggtcctttaggtctatctccaaagaaggtcggtgaagacatcgccaaggccaccaaggaattcaaaggtatcaaggttaccgtccaattgaaaattcaaaacagacaagctgccgcctctgttgtcccatctgcttcctctttggtcatcaccgccttgaaggaaccaccaagagacagaaagaaggacaagaacgtcaagcacagtggtaacatccaattggatgacatcattgaaattgctagacaaatgaaagacaaatctttcggtagaactttggcttctgttactaaggaaatcttaggtactgctcaatccgtcggctgtcgtgttgacttcaagaatcctcatgatatcattgaaggcatcaatgctggtgaaatcgaaattccagaaaattag

SEQ ID NO: 674 - DNA, 783 bp, Saccharomyces pastorianus
atgtccggtaatagagagcaagtctttcctacacgtatgacgttgggtttgatgaagattaagttaaaaggtgctaaccaaggttattctttattaaaacgtaagtctgaagcgctaacaaagaggttcagagacatcaccaagagaattgacgatgccaaacaaaagatggggagagtcatgcaaactgctgcgttctcattagccgaagtttcctacgcaacaggtgaaaacattggatatcaagtccaagaaagtgtttctaccgcaagattcaaagtgagagcacgccaggaaaatgtgagtggtgtttacttgtcccaatttgaatcttacattgaccctgaaatcaatgatttcagattgactgggttaggtagaggtggtcaacaagtccaacgagccaaggaaatttattcaagagccgttgaaaccttagttgaattggcttctctacagactgcgttcatcattttggatgaggtgattaaagtgacgaacagaagagtcaatgctatcgaacatgttatcattccaagaactgaaaatacaattgcttacattaatagtgaattggatgaattagatagagaagaattttatagattgaagaaagttcaggaaaagaagcaaaatgagactgcaagactagatgctgagatgaaattgaaaagagagaaggcagaacaggaaggctcagaggaagctggtgaaaatcacgctgatgaagagcctcaaggtgaaacattggttgccgatcaagaagatgatgttatattctga

SEQ ID NO: 675 - DNA, 1182 bp, Saccharomyces pastorianus
atgttggtactagggtctcttaggtcggtgctgtggtccagttccacagcgtcgcttattgggaagaagagcccttgttatacatatggtattttataccgaggtttctctcaaagtgttaaaacgtggcaagaaaatgtgttgaaagacgagtccagcttgaatcttactccacggttgttgaagattgttcctaatgatacggatatcgtgacccttgagaagcaggatgaattaatcaaaagacgtcgtaaactttcgaaggaagtcactcaaatgaagaaactgaaaccggtttcacctggtttaagatggtatcgctcccccatctatccatacttgtataaaggtcgtcctgtgagagctctgactattgttcggaagaagcacggtggtaggaataattcagggaagattaccgtccgccatcaaggtggtggccataaaaatagaacgaggttggtagatttcaacagatgggaaagtgggtctcaaacagttcaacgaatcgaatacgatccaggcagatcctctcatatcgcgctactgaaacatagtgcgactggcgaattatcttatattgttgcttgtgatggtttacgtccaggcgatattgtcgaatcgtacaggaaaggtattcctcaaactttattagatgaaatgggtgggaaggtcgatcctgctatcttgagtgtcaaaactacgcagagaggtaactgtttacctatctctatgattcctatcggtactattgttcataacgtcggtataacacccgttggacctgctaaattctgccgttctgcaggtacatatgctagagttcttgcgaaactgcctgagaaaaagaaagccgttgttaggctacaaagtggtgagcatcgttatgtctctttggaagccattgctaccgttggtgtggtctccaacattgaccaccagaacaggtctctcggtaaagccggtagatcaagatggttaggaataaggcccaccgtcagaggtgttgccatgaacaagtgtgaccatcctcatggtggtggtcgtggtaaatctaagtctaacaaattgtcaatgtctccttggggacaattggcaaaaggctacaagactagaagaggtaagaatcaaaatacaatgaaagtgaaagacagaccaagaggaaaagacaagagattataa

SEQ ID NO: 676 - DNA, 459 bp, Saccharomyces pastorianus
atgagtctaattccctgcttcgtatcattgatagacgaacttgataaacctatactgatttatgttcccaatgagaccgaaaatgagttgaatgatgttctgaagtataacgtcctttctaatatatcattggactattttgagagccctctaattacctggacttccttggattccaaacctttgttaaaatcgatcttccaattggaaggcgcctctgtatttggcatgttaatcaaacagacagggttgaagatcgtcattgggtttgaacagaatgccttgaatggtggtgatgatgaattgaagcaaattggccaaatcttcgaatccgtcagaaaaatttacgtacgggttaagtgtaatccattagttaccaatggcgacgaaatctctaccgtggaaagtctggaaaggaaattcgatgaattattcatctcaactgaagttgagttatga

SEQ ID NO: 677 - DNA, 1164 bp, Saccharomyces pastorianus
atgactgaatttgaattgcctcctacctattcctccgccgccaacgacttgcggtcggacactttcaccactccaacgccagagatgatgcaggttgccctagaggcgtccatcggggacgccgtctacggtgaagacgttgacactgtcaggctcgagcagacggtcgcccgccttgccggtaaggaagcaggtctgttctgcgtctccggtacgctttccaaccaaatcggtatcagaactcacttgatgcagcccccatactccgttctgtgcgactacagggcccacgtttacacgcacgaggccgcaggtcttgccattctgtctcaagccatggtcgtccccgtgatcccttccaacggtgactacatgaccttggacgacatcaaggcccactacgtccctgacgacggtgacatccacggtgcccccactagactgatctctttggaaaacaccttgcacggtatcgtctacccattggaagagctggtccgcatcaaagcctggtgtatggagaacgggctcaagctgcactgtgacggtgccagaatctggaacgccgctgcgcaagccggcgtcccattgaaacagtacggagaaatattcgactccatctccatctgtctgtccaagtccatgggtgctcctatcgggtccgtcttggtcgggaacctcaagtttatcaaaaaggccactcacttcagaaaacaacaaggtggtggtatcagacagtctggtatgatggccagaatggccctgtacaaaatcgacggtgactggaaggcccaactgctgtactctcactcgctcgcccacgagctggcccgtttctgtagcgacaaaggcatcccgctagagtcccccgcagacaccaacttcgtcttcctagacctaaagtccgccagaatggaccctgacgtccttgtcaagaagggtctaaagtacaacgtcaagctaatgggtggcagagtatccttccactaccagatcactagagacactctagaaaaagttaagctggccatctctgaggccttcgattatgcaaaggagcatcccttcgattccaacggtcctaccaagatttaccgtagtgaatccaccgaagtcgacgtggatggcaatgccattcacgaaataaaaacttacaagtactga

SEQ ID NO: 678 - DNA, 2928 bp, Saccharomyces pastorianus
atgtcagtctctgtaattaccacggttttagcatgtctgtggctgtcttatagactctacaagtttctcaccatacccgtggccagcatcgtctccactttgaagatcaagattccgccagcgacgaaggtctctatcgacaaaattgccaccgattcgctgactattcactgggagaatgagcctgtcaaggcggagaacggcggggtcggagcccgaaacttcatctcccactacctgctgtacttgaacaatacgcagctggccatctttccgaacaacccgaactcgctctacacgtgctgctccatcacgggactcgaggcagaaacgcagtaccaactggacttcattaccatcaacaacaagggtttcatcaacaagctgccctccatctactgcatgaccaaggcgagagaggccaatgagacgctaaagacaagaaaatggagaaggaacaccgtcaccgcgtccacggctatccagcccccgaacttaaaggccgacttgtcctcgttgacatctcactgctcctccgtgtctctttccgcctttgcgtccaacaacaccggtagcagcacgagcaacagctcgcccctacccgcctacacatccttgaccacgctaaaagacttggactcgttttccatagacgacttgaaaaaaatcttgatatgtgcccaggaagatctgcacgatgtgttgtcccaacaaacttcgctcttgcaagacttccaggagtctaaggtggagctagaactagaactggataacctgaaaacccactggtcgcatgagatcgatttgaggaagtctttgaagtccaacatcaagtcgctggaaaactctaaactcttgacagatctgaaaattgaaaaactaagcaagaaaatcgataagtccagggaaaaaatatcgaaaatgcgcaacgacatgcaagattggtctcaagaagacgccgaacttttgtcgcaagacactataaaggagaagtacctcagactactaaacgaagcaaatgcttctgtggccaaggtcaaccaacaggttctttctttgcaaaaagaaatctccaacatggaggagtctaacaagaaattgaatgccactcggaaatcgctagtaacgtccatagtagtgaacgccaatgtcgaaaatgacaaacccattgccagcggagaactatctgctgtattgaaaaaactccttgattttactcaagagaaaaatggtttttcaagtacttctggtgaagaattcttatccaaattaaatgcagactcgtcattgattagactgatcaagcaagaattaagcatcgaccaagattcggaaacgaactggaaatcacaaaggtcaaatttcctaaagaaaatcagtatcttggaaaaccaattcaatgaaaggagcctcaacaacagaacactcaaaacaaaactgatggttcaaccatacaacaataacggcgattcgctcgtggcaaccaattcaaacaactccaccgaaaacaacagaagttccgcatcggccacattaccattatccaacagcatgtcaagaactgggtcaatagatttgatatccaataaaaacattataaacggaactagcaacggagacacggccccacaattgagattacacaatccggcatcctacccaccttcaaacgagcctacacaaccgccaggtagtctactgagccaattgacacaggacactggaaacagatcgatgctttcgaaccagatgtccccaaatagcgaaaatcaacaaccctcttccttttcgcatgctttacctacgacggctaccgttattgccaatgccacagcaacgaacggtaatttcgagtcaaatttatggaataacacacagttcgcccaaccgtcgcatcaacaagaatccgcggaactcgatcgagccttcgaatacgataacgcaaatcatttgatcagtggcctgcaaaatatgatctacgatgaagcagactatccagataacataagcaattattccagggggttcactaccgacgagctggacaattactggaccaaacagcaaccgcaaactcgcaacacgagggagaactcattctctacatcgggaacacccatgtcatcatacaaggccaatcctgtaatgtcgccatattcaaactcacacctaaggcaaaactccaacgctaccaactcgatgcacccacaaagtctattggctgcaacattgaatgatgcttcattgcgaagttttgtacgcggtggctctttttacaatgctcctcaaccaggaaccccattgcataacaatgtaaatggtaatgaaacgggaaacctcagtccgagagtctcgaacgaattcagtatgttagtaccaaatcttagtccacggcgctcacacgacgttcccattataccaggaaacaacaactcaacaccctctcattcgaacattttaacaatgaaccatcaaacaacgacagacagcaacacgttgttgagcagattgaatggagcagataaccagactgatctgagctcagtgtctgcagagcacactgcaggaagatcgttccatgcctcatcacccacgtttaactccatttggaacccaactacaaatcagccttcactaccactcgaacaagaacacaacttcgatgtgcctgtaactccaaaggtgccaacaaaggtgccaacaaaggactctcccaaaccttcgcacaagagaaatcaaagcaatagcagtatctcgtcagcctggtctaagttcaagcacaagtcagcatcgtcttccggtaatgccgatgcggatatcttagattcatcaactccaccaaccagtccaaccggcagaagaatgtcgaaactactgtccaaaagtggcatgaataacctgtttaaaccacacagtcatgactcatga

SEQ ID NO: 679 - DNA, 342 bp, Saccharomyces pastorianus
atggctaaagaaagtgcagaattcaaaccaggttctggaaagaaaggtgcaactctatttaaaaccagatgtcaacaatgccacacaatagaagaggggggtcccaataaagtgggtcctaatctgcatggtatctttggcagacactctggtcaagtgaagggctactcatacacggatgcaaatatcaaaaagaacgttcaatgggatgagaacaacatgtccgagtacttgactaacccaaagaaatatattcctggtaccaagatggcctttgccgggttgaaaaaggaaaaagacagaaatgatttgattacttatatgacgaaagccgccaaataa

SEQ ID NO: 680 - DNA, 1206 bp, Saccharomyces pastorianus
atggttagtttaacttttaaaaatttcaaaaaggagaaagtccctctggatttggaaccttcaaacacaattttcgaggctaagactaaactggctcaatcgagctcgtgcgaagaatctcaaataaaactgatctactcaggtaaagtacttcaagattccaaaactgtgtcagaatgtgggctaaaagatggtgatcaagtcgttttcatgatttctcaaaaaaaatcaacaaagaccaaggtaacagagcctccagtcgttccagagactaccgcccctgccagaaacgaatctacagaaccagcaaccgccagtacggacgcacccgccaccgaaaccaccaccgctgctaccgaaggctcgcaaccacaagaagagcaatcctctactacagaaccagccggatctgcttctacaccgggattcgttgtgggggcccagagaagcgaaaccatagagagaatcatggagatgggatatccaagagaagaagtcgagcgtgccctaagagctgccttcaacaacccggacagagccgtggaatacttactaatgggaattccagagaatctacgccaaccggagccacagcaacaagctgcggctgcgaccgaagaatcatcggccgcagctaccgccgccacgtcagacctaccagccgaagatgacctatttgcacaagctgctcaaggcgacaatgcttcatctggcgggcttggttcagcaggaggtgccgccggtgccgcacaaggcggcccaccgggttccatcggcttaactgtagaagatttattatcactaagacaagtcgtttcaggtaacccagaagctttggccccgttattagaaaacataagtgcaagatatccgcaattacgcgaacatatcatggcgaacccagaggtgtttgtttctatgttattggaagccgttggggataatatgcaagatgttatggagggcacaaacgacatggtggagggagaagacatcgaaagtgcaggagaaggtgatgctgtgggactaggacaaggtgaaggcgaaggctctttccaagtgaactatacccctgaagacgaccaagccatttcgcgcttatgcgaattggggtttgaaagagatctagtcattcaggtgtatttcgcatgcgataaaaatgaagaagccgcagctaacatcctattcagcgatcatgcagattga

SEQ ID NO: 681 - DNA, 1476 bp, Saccharomyces pastorianus
atgaagtacagtaaaagaaatctcagttttaaccccatcacgataagcatcgctggaacgctgcttaccgtgttcttcctcacgagactcgtgctctcgttcttctccatatcgctattccagctgctgtcctttcagggcatctttaaaccctacgtgcctgattttaaaaacactcccggcgtggagttctacgacctgcgaaattaccagggcaaccaggacggctggcagcagggcgaccgcatcctgttttgtgtgccgttgagagacgcctcggagcatctgcccatgttcttcgaccatcttaacaccatgtcatatccgcacaacctgattgatctgtccttcctagtcagcgactcgtccgacaacaccatgggcgtgctgctgtctaaactgcaggtggcccagtcgcagcaggacaagaccaagcggttcggcaacatcgagatctacgagaaggactttggccaaatcatcggccagtccttttctgaccgtcacgggttcggcgctcagggccccagaaggaaacttatggccagggctcgtaactggctcgggtccgtggctctgaagccataccactcctgggtctactggagagacgtggacgtcgaaaccattccctccaccatcatggaagatctaatgcatcacgacaaggacgtcatcgtccccaacgtttggagaccacttccagactggctggggaacatccaaccttacgatctgaactcttggaaggagtccgaaggtggcctccaactggccgacgccctcgacgaagacgccgtcatcgtggaggggtaccctgagtacgccacttggagaccacatctcgcctacatgagagacccaaacggtaatccggaagacgaaatggaactggacggtatcggaggtgtctctatcctggcaaaggccaaggtcttcagaacaggctcgcacttcccggctttctccttcgaaaagcacgcagagacagaagcattcggcagattgtctcgcagaatgaactacaacgttatcggcctgccccactatgtaatctggcatatttacgagccttccagtgatgacttaaaacacatggcctggatggccgaagaagagaagcggaaactggaagaagagagaatccgcgagttctacaacaagatctgggacattgggttcgaagacgtcagatatcaatggaccgaagaaagagacttcatcttgaaaaacatcgactctaccctaaatagcaaagttaccgtggactggtctgaagaaggcgatggctcggaactggtggactcaaagggcgaattcgtctctccaaacaaccagcaacagcaacagcaacaacagcagcaaaagaaacaacaagacagcaacccgcaggggaaacttcatgacggcaacgataagaacaagaaaatgcttcctaaagaggttccattggacttcgaccctgatagaaactag

SEQ ID NO: 682 - DNA, 474 bp, Saccharomyces pastorianus
atgtctgacgaagaacacacctttgaaaccgccgatgccggtacctccaccacctacccaatgcaatgttccgctttgagaaagagtggtttcgttgtcatcaagggtagaccatgtaagattgtcgacatgtccacctccaagaccggtaagcacggtcacgccaaggtccacatggtcgccattgatatcttcactggtaagaagttggaagatttgtctccatctactcacaacatggaagtcccagttgtcaagagaaacgaataccaattgttggacatcgatgacggtttcttgtctttgatgaacatggacggtgacaccaaggatgacgtcaaggccccagaaggtgaattgggtgacaccatgcaagccgctttcgacgaaggtaaggacttgatggtcactatcatctccgccatgggtgaagaagccgccatctccttcaaggaagctgctagatccgattaa

SEQ ID NO: 683 - DNA, 2934 bp, Saccharomyces pastorianus
atggatagctccacgggtttcaacggagatgctaccactttcttcgctccagatgctgtgtttggtgacagggtgcgtagattccaagagtttttagacaccttcacctcgtacagggattctgtgaggtccgtacagatctacaaccacaacaacgggacaaactacagcgaggaccaggatgatgctggcgaacaggatctgcccggcgatgaggacggtgacgacctggagaaggagaagaaaaccgcgtcctccactgcattgaacatactccctcacagaattaccatttcgctagacgacctgagggagttcgacaggtccttctggtctggaatcctgaccgaacccgcgtacttcatcccaccggctgagaaggcgctcaccgatctggcggattccatggacgatgtcccgcacgcaaatgcttctgcggtatcgtctcaccatccctggagactttcgttcaagggttcatttggtgcgcacgccctgtccccgcgtaccatgacggcccaacacttgaacaaactagtctctgtcgaaggtatcgtcactaagacctcgctggtcaggccaaagcttatcaggtccgtccattatgcggccaagaccggtagattccactacagagactacacggacgccaccacgaccctcaccacgcgtatccccacacccgccatctacccaacagaagacccagagggcaacaaactaaccacggaatatgggtacagcacttttatagatcaccagcgtatcaccgtgcaggaaatgcccgaaatggcgcccgcaggtcaactccccagatccatagatgtcattctcgatgacgatcttgtggacaagaccaagcccggtgacagagtcaacgtcgtgggtgtattcaagtcgctgggtgctgggggtatgaaccaatccaactctaacacgctgatcgggttcaagacgctgatcctaggtaacacggtataccccatgcatgcaagatctacaggtgtcgccgcaaggcaaactttgacagatttcgacatcagaaacattaacaaactgtccaaaaagaaagacatctttgatgttttatctcagtccctggcaccctccatttatgggcacgatcatattaagaaggctattctattgatgctcatgggtggtgtggagaaaaatttggaaaacggttcccatttgagaggtgacatcaatatcctgatggtgggtgatccctcaaccgccaaatcacaactgttgagatttgtgctgaatacggcatctttggctattgccaccaccggtagaggttcttccggtgtgggtttgaccgcggcagtgaccactgatagagaaactggtgaaagaagattggaggccggtgccatggttttggccgatcgtggtgtggtgtgtatcgatgagtttgacaagatgaccgatgtagacagagtcgccatccatgaagttatggaacaacagaccgtgacaattgccaaagcaggtatccatacaactttgaatgctcgttgtagtgtcattgctgcagccaatcctgtatttggtcaatacgacgtcaatagagatcctcaccaaaatattgcgctgccagattcgcttttgtctcgtttcgatttattgtttgttgtcacagacgatattaacgaaatcagagataggtccattagtgaacacgttctaagaacacatagatacttacccccaggttacttggaaggtgaaccaatgagggaacgtttgaatttatcattagccgttggcgatgacgccgatatcaatcctgaagaccgttccacttccggaactggtggggaaaatgaaggggaagatgaggaagaccatgtttttgaaaaattcaacccactattgcaagcgggtgctaaattagccaaaaacaagggtgattataacggtaccgaaattcctaaactagtcaccattccattcttaagaaagtacgttcaatatgccaaggaaagagtaattccacaattaacacaagaggcggtcagtgtcattgtgaaaaattacactgaattaagaaacgatgagaacaccaaaaaatcacctatcactgcaagaaccttagaaactttgattagattagctacagcacatgctaaagtcagattgtccaaaactgtcaacaagacagatgccaaagtggctgctaatttgctaagatttgccctactaggtgaagatattggtaacgatatcgatcaagaggaaagcgagtatgaagaagccttgtctaagagatcaccacacaaatcgcctaaaaagagacaaagagtcagacagccggcaagtaattcagggtcaccaatcaaagctaccccaagaagatcagcggcaccgtccgtcaacgctacaccatcatcggcgcgtagaatactacgtttccaagatgacgaagaacaaggtagcggagacgataacgatatcatgtcgccacttcccgtagatgaagaagccgaattacaaagaagactccaattggggctgagagtatctccaaggcgcaaagagcatctccacacatcagatgaaggtgccccagggcctcttactgaaatgggtaccccaaggttacctaacgtatcttctgcaggtcaggacgatgagcagcaacagtaccaacagcaacaacagtcggtgatatctttcgaaaacgtggaaccaggtactatctctactggtaggttatccctgatctcgggtataattgcgcgtttgatgcaaacagaaatattcgaagaagaatcatatcctgtggcctctttgtttgaaagaatcaatgaagaactaccggaggaagagaaattttccgctcaggaatacttagcgggactgaagatcatgtccgacagaaacaacctaatggttgctgatgataaagtttggagagtatga

SEQ ID NO: 684 - DNA, 3648 bp, Saccharomyces pastorianus
atgacggagaaagcatttgtgagcagtcctattgttagggactcgaggctgttggtgccaaagtcatcagcatttaagccatacgtattaccgtttttcccattatacgctacctttgctcaactatattttcaacaatatgatcgttacatcaagggacctgagtggacttttgtttatttggggacactggtctctttgaatatcctggtaatgttgatgcctgcttggaatgtcaagatcaaggcaagtttcaactacagtactactaaaaatgtcaatgaagctactcacataatcgtctataccaccccaaacaatggttctgacgatattgtggaaatccaaagggtcaccgaagcagggtctttgcaaactttttttcaattccaaaagaagagattcttgtggcatgaagatgagcaagtcttttcatcacctaagtttcttgtggatgaatctccaaaggttggtgatttccaaaaaagtaagggacactctggcgacttgactcatttgagaagactatatggtgaaaacagttttgatattcctattccaacttttatggaattgtttaaggaacatgcagttgcaccattgtttgtcttccaagtattctgtgtcgcattatggttattagatgagttctggtattactctttgttcaatttgttcatgattatttccatggaagctgctgcagtattccaaagattgactgcgttgaaggaattcagaactatgggtatcaagccatacactatcaacgtgtttagaaataaaaagtgggtggccttaccaagtaatgaattgttacctatggatttggtctctgtaacaagaactgctgaagatagcgcgatgccatgtgatctgatcttggttgatggttcttgtattgtcaatgaagcaatgctttcaggtgaatctactccattattgaaggagtccatcaaattgcgccctagtgaagacagtctacaattggacggtgttgataagattgccgtactacacggtggtacaaaagccttgcaagttactcctcctgaacacaaatccgatattccaccaccacctgatggaggtgctttagcaattgtcactaaaactgggtttgaaacatctcaaggttctttagttcgtgttatgatttattctgcggaacgtgtttctgttgacaataaggaagcattgatgttcatcctcttcttgttaattttcgctgttgttgcctcctggtacgtttgggttgaaggtacaaaaatgggtagaattcaatctaaattgattttagactgtattttgattattacatctgttgttcctcctgaattgccaatggaattaaccatggccgttaatagttccttagctgccctttccaaattttatgtctattgtactgaaccatttagaatcccattcgctggtagaattgatgtatgttgtttcgacaagactggtactttgacaggcgaagatcttgtttttgaaggtttagctggtatttctgaagacggtgaaaatattcgtcacttatatagtgcagccgaagcaccagaaagtacaatcctcgttattggcgctgctcatgctctagttaagctagatgatggtgatgttgttggtgatccaatggaaaaggctaccttgaaggccatcggttgggctgttgagaaaaagaataccactttcagagaaggtactggtaagttgaatgtcatccgtagattccaattttcttctgctttgaaaagatcagcttctattgcctctcacgatgacactctgttcgctgctgttaaaggtgcacctgaaactattcgtgaaaggctttccaacattcccaagaactacgatgacatttacaagtcttttacacgttctggttcaagagttttggctttggcttctaaacaattaccaaaactatctcaacctaaaattgaagaattgacccgtgatgaagttgaatcagacttaattttcaatgggttcttgattttccactgtcccttgaaagaggacgctattgaaacgattaaaatgttgaatgaatcttcccatcgttctgttatgattaccggtgataacccactgactgcagttcacgtagctaaggaagttgggattgtttttggtgaaactttgattttggatagagctggaaaatcagacgatggccaattgttgttccgtgatgttgaagaaacgatcactattccatttgatccatcaaaggatacttttgatcattctcaattatttgatagatacgatattgctgttactggttatgctttaagtgccttagacggacactctcaattaagggacttgttacgtcaagcttgggtctatgcacgtgtatcaccatctcaaaaggaattcttgttgaatacacttaaggatatgggatatcaaacccttatgtgtggtgatggtactaacgatgttggtgccttgaaacaagctcacgttggtattgcattgttaaacggtactgaagaaggcttgaataagttgggtgaacaacgtagaatggaaactatgaaaatgatgtacatcaaacaaaccgaattcatggctagatggaaccaaccacagccacctgttcctgaacttattgcccacttattccctcctggtccaaagaatcctcattatttgaaaactttagaaagtaaaggtactattattactccagaaatgagaaaactagttgaagaagcgaatgctaaacccgttgaagttatcaaaccaaacggattaaccgagaagaagccaaccgatttggcttctatgttattggattctgccggtgatgctcaaggtgatgaggctccagctctaaagttaggtgatgcatcttgtgctgctccatttacctctaaacttgctaatgtttctgctgttaccaatattatacgtcaaggtcgttgtgctttagtcaataccattcaaatgtacaaaatcttagctttgaattgtctaattagtgcctattccttgtctatcatttatatggctggtgtcaagttcggtgatggtcaagctactgtttctggtttattgttgtcagtctgtttcttgagtatttcccgtggtaagcctttacaaaaattatcaaagcaaagacctcaagctggaattttcaatgtttatatcatgggatccgttctatctcaatttgctattcacattgctactttggtttacatcacaacggaaatctacaaattggaacctagagagccacaagttgatctcgaaaagcagtttgctccatctctattaaacacaggtattttcattattcaattggtgcaacaagtctctacatttgctgttaactatcaaggtgaaccatttagagaaaacattagaagtaacaagggtatgtattacggtttaataggtgtgacaggtttggcacttgcaagtgcaacagagtttttccctgagctgaacgaggctatgaagtttgtgccaatgagcgacgactttaagataaaattgaccttgacactgctacttgatttctttggtagttggggtgctgaacaagtcttcaaattcttctttatggatgacaagccatctgacatttctattcaaaaggtcaagattgcttccaaatga

SEQ ID NO: 685 - DNA, 939 bp, Saccharomyces pastorianus
atgcctcggctcttggcaacacaatctcatgtagtgcacggctacgtgggaaacaaagctgctacgtttcctttgcaatgtctaggttgggatgtagactgttgcaatagtgtccagttttccaatcataccggatatggtttagacaaagtatttggaactataacagatgaaactgatctaaagcaactcttatcaggcctattcgataattttcctcgagactaccaagctttactttcgggttacttgcccaataaaaattcggttcgatgtatggggacgtattatgctaagttcaaggaagaaaatcctgaaataatatggcttatggatcctgtgatgggagatgaaggacaattatatgttagtgaagatgttataccagaataccggaaaatagcgttgtctcccaaacagctggtcgatataataactccaaatcaatttgagttggaaatattatatggagaagaaattaagaccaaagaacatttgaaaaaggcattagaaaagctacatcgtacgattccagtgataattgttacatcttgtgattgtaagatgtttgatgatcaagattttatctattgtgtggcttctatgaaaggcaagacacctgttgtttatagagtgccgttcattgattcgtattttactggggtcggtgatttgttctctgctttgctattagaccgagtctataaaatcttgtcaaacccaacaacaactttagaatttgaagatcaggttaataatgtgctaaatgttattcaaaaagtattgaatgtcactcgaagttatacttcagggaaaatcaatgctaaaatgggctccgctctggaaatgaaagaaatggaattgcgaattattgaatcaagagacatatacgaaactatcaacatcaatgaaaaggattatgtttataccagactgtga

SEQ ID NO: 686 - DNA, 483 bp, Saccharomyces pastorianus
atgactgaattgtgtcctgtctacgcccctttctttggtgccattggttgtgcctctgccattatcttcacttccttaggtgctgcttatggtactgctaaatctggtgttggtatctgtgccacttgtgtgttgagaccagacttgcttttcaagaacattgttcctgttattatggctggtatcattgccatttatgggctggttgtttccgtcttggtctgttattcattgggccaaaagcaagctttgtacactggtttcatccaattgggtgccggtttatctgtcggtttgagtggtctagctgcaggtttcgctattggtatcgtcggtgatgcaggtgttagaggttcctctcaacaaccaagattgttcgtcggtatgattttgattttgatttttgctgaagttttaggtttgtacggtttgattgttgctttgttgttgaactccagagctactcaagacgttgtttgttaa

SEQ ID NO: 687 - DNA, 381 bp, Saccharomyces pastorianus
atgtccgctccaaacccaaaggctttcccattagctgatgctgcattaacccaacaaatcttggatgttgtccaacaagctgccaatttgagacaattgaagaagggtgccaacgaagctaccaagactttaaaccgtggtatctctgaattcatcatcatggctgctgactgtgaacctattgaaatcttattgcatttgccattactatgtgaagataaaaacgttccatacgtctttgtcccatctagagtcgctttaggtagagcttgtggtgtttctagaccagttattgctgcttctattaccactaacgatgcttctgctatcaagacccaaatctacgccgttaaggacaaaattgaaaccttgttaatttaa

SEQ ID NO: 688 - DNA, 648 bp, Saccharomyces pastorianus
atgttaggaataagatcgtctgtcaaatcctgcttcaagccaatgtctttgacttctaaaagattgatctctcaatctttggtggctaacaaatctacatatagaacgcccaactttgatgacgttctgaaagagaacaacgaccctgataagggccgttcttacgcttatttcatggtcggtgctatgggtctcttgtcttctgctggtgccaagtcgactgttgaaacatttatttcatccatgactgccacagccgatgttctagctatggccaaagttgaagtcaacttggcagccattccattaggtaaaaatgtcgtcgtcaaatggcaaggtaagcccgtgttcattagacacagaactcctcatgaaatccaagaggctaacagtgtggaaatgtccgctttgaaggacccacagactgatgctgacagagtcaaagaccctcaatggttgatcatgctgggtatctgtactcatttgggttgtgttccaattggtgaagctggtgatttcggtggttggttctgtccttgtcacggttcacattatgatatttctggtagaatcagaaagggtcctgctcctttgaatctggaaattccttcctacgaatttgaaggtgaaaaggtaattgttggttaa

SEQ ID NO: 689 - DNA, 804 bp, Saccharomyces pastorianus
atgtctaacgctacttataaagaacgtgctgctgctcatcctagcccagttgctgccaaattattaaacattatgcacgaaaagcaaacaaacttgtgtgcttctttggatgttcacaccacaaaggagctgctcgaattagtagaagctttaggtcccaagatatgtctactgaagacacatgtcgacatcttgactgacttttccatggagggcactgtcaaaccgctaaaacagctatccgctaagcataattttctgctatttgaagacagaaagttcgcagatatcggtaacacagtgaagctgcagtactcatcaggtgtatataggatagctgagtgggcagacatcaccaatgcgcacggtgtggtgggtcctggcattgtcagcgggttgaaagaagccgcagaggaggccaccaaagagcctagagctcttctgatgctagcagaattatcatgcaagggatctctagctactggggagtacaccaagggcactgtgaacattgccaagagtgacaaagactttgttattgggtttatcgctcaaaaagacatgggcggtagagacgaagggtacgactggttgattatgacgcccggtgtagggctagacgacaagggagacgcattgggccaacagtatagaactgtggatgacgtagtctctactggatccgacatcattatcgtgggaagagggctatttgccaagggcagagatgtcaacgtggaaggtgagcgttacagaaaggcaggctgggaagcttacttgaagagatgcggcagccaaaattga

SEQ ID NO: 690 - DNA, 264 bp, Saccharomyces pastorianus
atggacgcattgaattctaaagaacaacaagagttccagaaagtggtggaacaaaagcaaatgaaggatttcatgcgtttatactccaacttagtagaaaggtgtttcacggactgtgtcaacgacttcacaacttccaagcttaccaacaaggaacaaacgtgcatcatgaagtgttcagagaagttcctaaagcacagcgagcgtgtaggacaacgtttccaagagcagaacgccgctttgggtcaaggcctggggcgttag

SEQ ID NO: 691 - DNA, 1683 bp, Saccharomyces pastorianus
atggctacaaaagtcacgcaacatttcgctcagcttctacaaaaatacggtatcgacacggtatttggtatcgtgggtatccccattgtccagttggcggatacgatggtcgccaacgacatcaaattcataccatgcaggaatgaacaggccgcgtcatacgctgcgtctgcgtatgggtatatcaacgataagccgggggtactgcttattgttgggggccccggtctaattcactcgttggccggaatatacaactcaatgaacaataggtggtctcttttggtaattgcggggagctcctctcagagtgacgtccataagggaggattccaagaactggaccagataagtctgttgtctccctttttaaagttcactggcaagctaacccctgataacatcgacatggtaacccgaaaggctttgaatcattgtatacagggcacgatgggcgtctcgtacattgacttccctgcggacttgattgaaaacgaaaaatcattggcaggaaacgaccacctgaataatgaattacccatgattttaagtccaaacaagtgtggcccggacccatcaaagatcagagaaattgtacagctcattttacaacacagggacaagaacatcctcgttgtcattgggaagggcgcagtgaaaaattcacacgaacttcgcaggttggtaaacagttttaatcttccattcctgcccacaccgatggcgaagggaatcgtcccggactcatcacccctaaacgtgtcgtctgcgaggtcccaggctttgaaaaccgcagatatcgttctcgtttttggcgcgagactaaattggatactgcattttggttcttcgcccagatggaacactgagtccgtcttcattcagttcgactcccatcccgaaacactgggcgataacaatacgtcacctggcgccggactctccgtttggggggatataggcttgagcgtaactgccttgatggaagagctgccacaacaaagaccaggttggaagtacagaggcgtcaacaactacctgagggagaaaatccacgtgaaccagacccgcttgcaggagaaggagaaggtggggggcgcgcaactgaactaccatcaggtttatgggaccctaaggccgcttatcgaggactataggacaatacttgtcacggagggtgcgaacaccatggacagtgcacgggtctcgttccccaccgacgctccaagacaccgtctggacgcagggactaatgcgaccatggggattgggctcgggtatgctctggcgtgcaaggcatcccgtccggagctcgacgtggtgctaatccagggcgattccgcattcgggttctcggccatggaaattgaaacggcggtgcggtgccagctggcgctagtcatcgtcgtcatgaacaacagcggtatataccacggggtgaaggatggcaaggccgaactaccgcccaccgcgctaagcaagaattgccgctacgacctcgtgggtgaaggcctgggcgcccacgggttcttcgtaaacacgctggaagaactaggcaagagcttccgggaagccgtgcagttggcccgcaccagaagggaaacaagcgtcatcaacgtcatcatcgaacccggcgaacagaagcccatcgcatttgcatggcagaacaaaccgcgtctataa

SEQ ID NO: 692 - DNA, 804 bp, Saccharomyces pastorianus
atggcccaagacgacaatcctatacctaagtcggtacctttgcaccaacaggcaggtaaatatttccacactttacatacgcaagacttatcaaacctctaccagcaatgctacaaacagtttgacgaaactataaaccagctagtagattccccgtcgccttccacttccaaaatcgacaagccaatagcggatctcacaaacatatacaagcttctttcaacgcatgaatcggaatctaattcattccacaacgacatccaagacttgaagaatactttcaaaattcaatcagactcatgccctcaaattgacctttccacctgggacaaatatcgcaccggtgaaattaccgctccccaactttctgaattatatctaaacatgtctcgatcggagccatccgctgccgtcgatagcacggctactttaaaaatacttaaggtcttaccgtacatctggaatgatccaacgtgcgtgataccggatttgcaaaatcccgcagacgaagatgatttacaaatagaaggtgggaaaattgagttgacttgccccatcacttgcaaggcctatgaaacgccattgatatccaaaaaatgcaatcacgttttcgataaagatggtattcagaattacttacaaggatacacgacaagagactgtccacaagctgcatgctcacaagtcgtttccatgagggatttcgtaagagaccccatcatggaactgaggtgcagaatcgccaagatcaaagattctcaggaacaagacaaaagaaacaaccaagccatcgatgtcctatga

SEQ ID NO: 693 - DNA, 828 bp, Saccharomyces pastorianus
atggatacggaggtgagtgagctggtggtgttgcagctgatacatacgctgatctcgaacaaaaatgaagaactggtcaagaacggtggaggaattaacatgatcgggaacaatcttcgaatatcgctggtaaagctgacgaacgaaatacaaaataacgtgctgatcaacgagctaacgaacctgaggaggcaaggcggtgttgtgaacgggaacggaaaactgggcatcaacgatatcctgacgattgtgaagagtctgttccccggctacaggacaacgctgaacgatgggcagttaagcctgcacggcctagagatgcatgatattgagaaactcctagtgggcaagtacgatgaattcaagagagcacaaactgaacagataagggcgatggaggacgagatccagaagaacggtataaagagcggtacaacgcaatcgcaatcgcaatcgcacacaggcaagagtggaggtgccgtgataggcacgactacaacccatggaggacatgctatggaccccaaaagagaaaagctgttgaaactgtacagggacaccgtgctgaataagctagagagcaagacaggaaacttccaaaaactgttcaagagccccaacaacacgatcatcaaggatgaggtcaactacgaagacataaagaacgagacgcccggcagcgttcacgagctgcaactgatcctgcaaaagtgcataacggacggcgtaatgcgaggggtcataggcacggacgactggaaactagcaagacaggttcagctggaactagacgacacagtacagttcatgaggagagcactagaatag

SEQ ID NO: 694 - DNA, 132 bp, Saccharomyces pastorianus
atgttgatgaacatgttgccaggtggtgttatcttagttttcattctagtcggtttggcttgtatcattatcatttctaccattatctacaacaaatggaaggccagacaacaagggttgcaaagattttaa

SEQ ID NO: 695 - DNA, 978 bp, Saccharomyces pastorianus
atgtcgagcacgtctactttcgctcgctggaagaaggcggacctgattgacctggccaacaagctggaaatcgacggcttccccaactacgcaaagaagagcgacatgatcgagttcctggaaacgcacctgaaccgtctcgagagtcccgtggatttcaaagacgactacccggaactgaagtcgttctacgaatcgatcatcgcggaccagtccaaggacgagaaggacatgtccgggtcacgatccgggtcctccgacaccgcagcaaacgactctgacctggaaaaggcgtatatcaaggacgacgacggatctcaatccactgacgaggccagcgcgaagcccgacgcagaggccagcgcgaagaagaacttcaatctgctcgatttcagcgctgaccacgactcgtccgtctctgcgttgaccaagttcaagttcgacttccaggacagcctctccgacatcaagtggcatgtgcagaaactgaacgagaatgtgcaggactgtctgtccacgatctcttccgtcgacgccatcttttctctcgtggagtgctctcttttggtgagacaagtattagccgccgggcggtccaccgcctccccctcttcgctcgcctcgtcgttcgaagccgctgccgccggccacacggaaccgcagcgcatgctcgatttctgcctgcccatactcacatggctgctctttttcagaggcatcccgacgctggtttcgtactacatcaacttcatccggtacgacctggacatcgagttggatccgatgacgttcaacctttcgaaattcttgatctctctggcaatcttcaaaacctgtaataataaaaacatagatttccactctcttcaatacgtcgaccaagtgtggacccagctctgtgtcgtgaaccactccctgggcacggtgcccctggtgttatctatggccagctgcctactgactctatacgtcctatag

SEQ ID NO: 696 - DNA, 1689 bp, Saccharomyces pastorianus
atgtctcaatttattggctttggtgtacaagtggagctaaaagacgggaagctcattcaggggaaaatcgccaaagcaacttcgaaaggattgactttgaatgacgtacaattcggtgacggcggtaaatcccaagcttttaaagtcagggcctctagactaaaggatttaaaagttctaactactgcccctcaatcgggtaaaaggaaacaaccaagacaacagcaacaacaacaacaacagcaacagcaacaaaatgactataatcaaaatcgcggtgaacaaattgattggcaagacgacgatgtaagtaagataaaattacaagacgattttgattttcaaggaaatttgggcatgtttaacaaaaaagacgtattcgctcaattaaagcaaagtgacgatatattaccggaaaacagattacaaggacataatagaaagcaaccccaatcccaaccgaataactaccaaatcgatgaattggttatccctgatgcaaagaaagattcatggaacaaaatctcctctaaaaatgaacaaagcgcgccacagcctcagccgcagcaggaagaagatgatatagaggtggaggatgacgagcatgagtatgacgagcatgagtatgacgttgatgatattgatgaccccaggtatttaccgatcactcaatcgttaaacatcactcacttaatccactctgccacaagttctccatccatggacgataaaaccaaaaacgccatcataagtgacaaagatcaagttctagctaaattaggtcaaatgattattagccagtcaaggtcaaactcgacatctttaccacctgcgaacaaacaaacgaccattaaatccaagaacactaagcaaaccatcccgatggccactccagtacaattactcgaaatggagagtatcacatctgaattttttagtatcaattcatctgtactgttagaaaattttgctgtaaacgcgtcattctttctgaagcagaagcttggtggccgtgcacgtttgcgtttacagaatactaatccagaacctctggtggtaatattaacctcagattccaacaggtctggtgccaaagcattagcattaggtaggcacctatgtcaaacgggtcatatccgtgttataacattattcacatgttcccaaaatgagctacaagatcctatggtcaaacaacaaacagaaatctacaaaaagtgcggcggtaaggtcgtaaacagtatatcgtcactggaatccgccatggaaacattgaacagtcctgtagaaatggtcattgatgccatgcaagggtacgactgcacattaagcgatctagcaggcacgtcggagacaattgaagctaggatcaaaagtatgatatcgtggtgtaacaaacagcgaggctctactaaagtatggtctctggacattccaaatgggttcgatgcaggctctggtttgccagatatcttcttcccggacagaatcgaagcaacggggattatttgttcaggctggcccttaattgccatcaataacttaatcacacacctacctaaattagaagatgctgttttgatcgatatgggtatcccacaaagtgtttattcacagagaacctctttgcgtaagtttcaaaactgtgatctatttgtcaccgatgggtctttgctcctagacttgtaa

SEQ ID NO: 697 - DNA, 1737 bp, Saccharomyces pastorianus
atggggtcatgttgtagttgcttgaaagattcttcagacgaggccagtgtctcaccaattgccgagaatgaaagagaagcggtgactttattactaggatacttggaagataaagaccagttggatttctactcaggcggtccgttgaaagcattgacaactttggtttattcagataatttgaatttgcaaaggagtgctgctttggcgtttgcagaaattactgaaaaatatgttcgccaagtctctcgagaagtgttagaacctatcttaatactgttacaaagtcaagacccacagattcaagtagccgcctgtgcagccctgggtaatttggccgtaaataatgaaaacaaattgttgatagtggaaatgggtggcttggaaccattaataaatcaaatgatgggtgataatgtagaggttcaatgcaatgccgttggatgcattaccaatttggccacaagagatgacaataaacacaagattgccacttccggtgctttaatcccattgactaaattggctaaatctaaacacattagagttcaaagaaatgctacaggtgcattactgaatatgacacattctgaggaaaacagaaaagaattagttaatgctggtgccgtacctgtgttagtatctttactttcatctactgatcctgatgttcagtattattgtacaactgctttatcgaatatagcagtagacgagtccaatcgcaagaaactggctcaaactgagccaagattagtttcgaggttggtgggtctgatggattccccatcttctagagtaaaatgtcaagctactttggcattaagaaacctagcatcagatacaagttatcaattagaaattgtaagggctggtggtctacctcatttggtgaaattgattcagagtgattctataccactagttttagctagtgtagcatgcatcagaaatatctctattcacccattgaatgaaggtttgattgtagatgccggtttcttgaaaccattagtgaaattactagattacaaagactcggaagaaatccaatgtcatgccgtatctacgttgagaaatttggcagcatcatctgaaaaaaatagaaaagagtttttcgaaagtggggccgtagaaaaatgcaaagaattagctttagattcgcctgttagtgtccaaagtgaaatttccgcatgttttgcaattttggctttagcagacgtctccaaattggacctattagaagcaaacattctagatgctttgattccaatgaccttttctcaaaatcaagaggtgtccggtaatgcagcagctgctttggcaaatctgtgctcgagggtaaacaattatacaaaaatcattgaagcatgggaccgtccgaatgaaggtattcgcggatttttgattagatttttgaaaagtgattatgctacgtttgaacacattgcgctatggacaattttacagttactagagagtcataacgataaagttgaagatttggtcaagaatgatggtgatattattaatggagtaagaaaaatggcagatgcgacttttgaacgtctacaaagatcaggtatcgatgttaagaatccagggaataatatgaacacaaattcaaatgacaacagcagtaacaacaacgacacaggttcggagcatcaacctgcagaggacgcaagcttagaactgtacaatattactcaacaaattttacaatttttacattga

SEQ ID NO: 698 - DNA, 2115 bp, Saccharomyces pastorianus
atgtacaacgttcctgataatgtcaaaggtgcagtcgaattcgatccgtggctgaaaccctttgcggatgtgctatccgagagaagatacctggccgacaagtggtcttacgatatcactcatgccacgcccgatggttcgtaccagtcgctgagtaaattctctagagattcatataagtcgtatgggttgcatgccaacccagatactaaggatattacctacaaagaatgggcacccaatgctcaacgtgcatatttagtgggggagtttaacaactggaatactacatctcatgagctcaaggacaaggacgagttcggaaatttcaccatcactatccctcccctatcgaatggtgactttgccattcctcatgactctaagattaaggtgatgtttgttttgccggatggttctgagatcttccgtttacctgcatggattacaagagccactcaaccttctaaggaaacttccaaacaattcggacctgtttatgaaggaagattttggaacccacaaacctcttacaattttgttaatccaaggccaaagtttaacggatctgtagactctttaagaatctacgaagcgcatgtaggtatttcaagtcctgagccaaaggtcactacatataaggaatttactgaaaaggttttgcccaggattaaatacctcggttatgatgccattcaattgatggctattatggaacatgcctactatgcatcatttggttaccaagtgactaatttctttgcggcaagctctcgttttggtacccctgaagagttgaaagagctggtcgataccgcacatggaatgggtatcatagtcttattggacgttgttcatagtcacgcttctaaaaatgtagaagatgggctgaatatgttcgatggctccgatcatcaatatttccattctgtaagttccggtagaggtgaacatccattatgggattctcgtctttttaactacggtaaatttgaagtacaacgatttctattggcaaatctggctttttatgtcgacgtttatcagtttgatggttttagattcgacggtgtcacttccatgctatatgttcatcatggtgttggtgaaggcggttcctttagtggtgactacaacgaatacctttctcgtgatagatcttctgtcgaccatgaggctttagcttatttgatgttagccaacgatttagttcacgaattactgcctcagtcggctgtcactattgcggaagatgtgtctggttacccaactctctgtctaccccgttccattggtggtagtggtttcgactacagattggccatggctttacccgatatgtggattaaattaatcaaggagaaagcagacgatgaatgggaaatgggcggtatcgtttacactttgactaatagacgtcatggtgaaaaagtcgttgcctattgtgaatctcacgatcaagctttggttggtgacaagaccttagcattttggttgatggatgcctcaatgtataccgatatgactgtattgaaggaacctaccattatcattgatcgtggtattgccctacacaagatgattaggttaattactcattcattgggtggtgaagcttatttgaacttcgaaggtaacgagtttggccacccagaatggttggatttccccaatgctaacaatggcgacagttataagtacgctcggagacaatttaatttggcagatgatcctttgttacgctaccagaatttgaatgaatttgatagatcaatgcagttatgtgagaaaaaacataagtggttgaacacagaacaagcatatgtctcattaaagaatgaaaaagacaaaatgattgtgtttgaaagaaataatttactatttattttcaactttcatcccacagacagctacagtgattatagagttggtgttgaaaaagctggtacttatcacatcgtattaaactcggatcgtgctgaatttggcggacataacagaatcaacgaaacttccgaattctttaccactgacttagaatggaataacaggagaaattttattcaggtatacattcctagcagagtttgtttggttcttgctttgaaagaatga

SEQ ID NO: 699 - DNA, 849 bp, Saccharomyces pastorianus
atggtagcagatttagctaaaggtatgctaaaatggaaatcgagaacagagtttgacaccgccgcaaactgttccttttacgagaatttaaaggccttacctcccctcgcatcacataaaaaattaacacgaggtgctattttcaatagtacgaaatacgaactactacaagttaaagaagatattctgtccatttacgatgttgtaaacaaggatatcaatgaggagcgtaatcagatgcaacaaatcgaatttcaactaaaaaaatctttgaaaaaagtagaacacaattacaagaaggtcttaaagcaaagggcttctaccagtgggatcaacggaaatgactgtctactgagtaatgcagaaaaaaagcttgtagtgttggatggagaacttgcccgtgtcgatgctatggttgaagatataattaatatttttattgctttaaatgacaagctcccgaagaaggcacaattactgagaaatgactctataaatgaagctcattatcctctgctctttgattttttgcgtaaggcatgcccagaagctatcgtttctgctacagaaactattgttcaagaagataacttgaactcttccccctcagaagagggtgaactattaatagaaagcacagataatattgacggtggaagggagctgcgaaacaatactccggattctcattcaaaagatgacggcgatatacccaaatatcaaaagtttctaccccctacattcagcaagagaagcggtccttcaatcgtaactaactttgagaatgttagtgcagatggcctcacatataccaaacactgcttgaaagatacggcgcctttgacttga

SEQ ID NO: 700 - DNA, 1029 bp, Saccharomyces pastorianus
atgtggagtttattaggagcattttcgcttgtgtttggaggttgctgttccaatgttgttactttcgaagggttaatgggtgataaaacaagtaatataagtaaccttatcaccttctgccaatttttgttcgttgcatgccaaggcctccccagatttgtggatgttcatggaagttttccttatctcaagccactgaaaaccccccttcacgtgtacgttatttctgtggttttgttttatatttcctccacaacgaataataatgtgttcaagtacaatatatccattccaattcacattgttttcagatgttttggaaccgtcataaccatgattacatgctggttactaaatggtagaaaatatacgaggactcaagtttcatcgacattttttttaaccgttggtgctattattgcatcactgtataaagacaatgaacttcgctatcaagatttcaaattgcaagatttacgaaatagaagcaatgaacctatagatcgcacgttcgttttaggtgtttgcatactgatactttcttcggttacatcctctttgctttcagcatacaatgagcgcacgtatcaaaaatatggtaagcattggaaagagaatatcttttatagtcacttcttggcactacccctcttttcattgaacgcaaaacagctagtccatgaatatcaagcaatgaaaaactcaaagaggatgatatgtttaaatcttggacaaaagaccagaatcccgcacgcagaaacttttctattttttaatgttctgacccagtatttttgcgttaagggtgtaaacatgcttgccagccagacgaatgccttgacactctccataacattacttgtaagaaagtttgtaagcctcttactaagtgttcatctttttggaaatagcctttcatatacaggctactttggggttttactggtattttttggtgctttcttatactcactcggatcaattcgtcctaaaattaaaagaaaagaagtattagggaaggaacaatag

SEQ ID NO: 701 - DNA, 1293 bp, Saccharomyces pastorianus
atgcggatcagttggagttttttctgttgtgtccttctccaggccattctcgccgtgagcactcaaggtttaaagacgcttgttctttacgaccaatccgccgaaccgttagaggattattcgttttatttaaaagatttggaagaaagggattacaaactggaatatctagacgttaacagtacttccactgctgtagatttgtatgataaagaactaagattatatgataatatcatcatattgcctaccaaaggaggcaagaatttagctagacaagttcctgttaatcaattaatcaagttttttgaaaacgaaggtaatatattgtgtatgagctcccctgatgccgttccgaacactattcgtttatttttgaatcaattgggtatatatccaagtccaaagggacacgttgttcgcgactatttctcatcttctactgacgagttggctatttcttctgattacctcttaaataagcacgtttacaacactgaaaatgacgagcaatttgtttttggagagagctctgctgccttattggaaaaccgtgaacaaattgtgccaattttaaacgcaccacggacatcatttactgagtccaaaggcaaaatcaactcttggacaagcggatcgcaaggcttccttgttgttggtttccaaaacttaaacaacgctcgtttggtgtggatcggaagtagtgatttcttgaagaacaaaaatcaaaattctaatcaggaattcgcaaaagagttactaaagtggacatttaatgaaaaatcagtaattaaaagtgtacaggctgttcactcacatgcagatggtaccagttatgatgaagttccttacaaagttaaggacgatgttgtttattccattggattctcggaatggaatggtcaaaaatgggtaccacatgttgcagatgatattcaatttgaattaagacaagtggacccatactaccgcatcacaatgacgccaagtgagaacgactccgaaacgcagtactatagcaccggtaaatttatgcttccggatcgtcacggtgtgtttacattcattaccgactaccgtaagataggcctttcgtttattactgatagagatgttaaacccatccgtcatcttgctaatgatgaatacccaagaagttgggaaatcagtaactcttgggtttatattagcaccatttgtggtgttattgccgcctggatcttttttgttgtgtcttttgctacaacttcctctgttagcaagaaacttgaaacattcaaaaaaactaactaa

SEQ ID NO: 702 - DNA, 678 bp, Saccharomyces pastorianus
atgaagttttcaaaattaattgggttcactctattaaatgttttgggtggtctatctgccgctacatctattattgacggtgagagtatcgagaaaaggcaggaagtggaagataatgtggcgccaccttctatcaatttagaagtgaagtgcgatatcgtgggaaaggaatctgaaagtcctaatacggtttttgaattttacgctgaggataccgcgtcattggtctataatattactaattgggaagataccaacatcacaattgtaggtgttaccggaacaattgttacatacccaaatggttatccaattgcgaatattacagccgctaatgtagggccctttgaaatggaagttaatgggactacaaagtttggacaagacgttactttgagtataccagaaggacaatatgttctgattccgtttttattagctgctagatctgatgaaatggtgagagttgcagcccctccaaccctatttgaaattgccagcccacctatctccttcttcaacccccagtttttatccgtccagatcatcgttttggccattgttgggggtattagttactactacatgaagtttaaaacacaacaaaaacccatcaagaagaacgtcgcccctaagaaagttgacgaatcatggttaccagaaacatataagaaataa

SEQ ID NO: 703 - DNA, 378 bp, Saccharomyces pastorianus
atgtccgtcgacttcaacactttggctcaaaactttactcaattttactataaccaatttgataccgatagaagtcaattgggtaacttatacagaaatgaatctatgttgactttcgaaacaagtcaattacaaggtgccaaagacattgttgaaaaattggtttctctgccattccaaaaagttcaacatcgcatcaccactttagatgctcaaccggcctctcccaacggtgatgtcttggttatgatcactggtgatctactgatcgacgatgaacaaaacgcacaacgtttttctcaagttttccatttgattcctgacggaaactcttactatgtgttcaatgatatcttccgtttgaactactccgcttaa

SEQ ID NO: 704 - DNA, 762 bp, Saccharomyces pastorianus
atgtcctacgctaaaatcgctttattcgctgctgtcgctgctttggcttccgcccaaactcaagaagaaattgatgaattgaacgttatcttgaacgatgtcaagtctcatttgcaagaatacatgagtttggctcaagacccatcttctggtttctctttggccaatatgccagccggtgttttggacattggtgtggctttggcttccgccactgacgattcctacaccactttgtactctgccgttgactttgctggtgttaacaagatgttgaccatggttccatggtactcttccagattggaaccagctttgaagtccatgatgggtgaagcatccacttcctccgctgctccaacttccaccgaagctaagagttcctccgctgctgcctcctcatccgccgcttcttcttctgctgctgcctcctcatccgccgcttcttcttctgctgctgcctcctcatccgccgcttcttcttctgctgccacttcttccactgaagctaagtcttcttctgctgctgcctcttcttctgctgctgcttcctcttccgccaagcaatccgccagcgtatctagctccgccaaggcttctgccactgcttctggttctgccaaggcttctgccatctctcaaatcactgatggtcaaatccaagccaccaagaccgtttctcaacaaactgaaaatggtgctgctaaggcctttgttggtatgggtgctggtgttatggctgctgccgctatgttgttataa

SEQ ID NO: 705 - DNA, 597 bp, Saccharomyces pastorianus
atggatattattttaggtattcgtgtaaaagattctgtcattctagcgtcttccaaggctgtcacaagaggtatttccgtcttgaaggattcagacgacaagacaagacaactatcgccacacgcattgatgagttttgctggtgaagctggtgacactgtccaattcgccgaatacattcaagcaaatatccaattatactctattagagaagattatgaactatctccacaagccgtgtctagtttcgtcagacaggaattggccaaatcaatcagatcgagaaagccttatcaggtcaatgtgttgattgctgggtatgacaaaaagaagaacagaccagagctgtaccaaatagactatttgggtaccaaagtagaattaccttacggtgctcatggttattcagggttttatacattttcaatactagatcgccattatagacctgatatgacaactgaagagggcctaactctactaaaactttgcgtacaagagctagaaaagagaatgccaatggatttcaaaggcgtcatcgtcaaggttgtagataaagacggtataagacaaatagacgacttccaaacaaaatga

SEQ ID NO: 706 - DNA, 1620 bp, Saccharomyces pastorianus
atgataacaccattgaccaagttgaaaccaaatgccaaagtcgccgtagttggaggaggtgtttctggactatgttttacatacttcttaagtaaattaagaccggatgttcaagttacattattcgaatcacagaaaagaacagggggttggataaactcatgtgctacaaaggatgagagcgggaaaccgattatggtagagaagggacccaggacgttgaggggtgtatctgacgggactgttgtaattatggatacccttagagatctaggtaaagaagcaatggtgcagagtattgaaaagggctgcactgcggacaagaagttcctactagaccccagtgataaactggtgcaagttcctgactcaatatcgacaactttaaaattccttttcaatccgttggggaaaggacttattccaggcatgttgggagaatggttcaggaaaaaatcaccacatcccggacaagacgaaagcgttgaatcagtactaaacagaaggtttggtaatgactacatatcgaaaaacatgattagcgctttattaaggggcatttatggggatgatgttgctttgttaagtgctaagaggacattcaagaaaatttactacaacgaacttaagcacggatctaacacgcaagcaatgtttgataatatgcgagagaagtctaaaaataaaaaaaaagacggtcatagtcaggccttaactggatgtcttaatgattatgtaatggcatttggaaaagataaatcgaacttattggatctagcaaacactttgaagaaatatcccatgctcggtttagtcggtgggttagaaacttttcccaaaatagtcagaaatgccttaaatgagttcagtaatgtcgaaatagttaccaacgagccagtgacgcaagtcatcaaatccagctctaatgcaaaaaccattgggttgaaagtgcagtcaggtgacaaatacgaaggattcgaccatttaaggcttactataacaccatccaaaatcgccgagttactaccgaaggatgaagattctctgtccaagctgttaaatgagatccaatcaaatacaattcttttggttaattattatttaccaaacaaggatgtgttgaatgccgatcaacatgggtttggttacttggtacctaaatctaataagaatccagggaaattgcttggtgtgatttttgattctgtcattgaaaggaatttcaaaccacttttcaataagaactttcaaaactctaaagctctcaaggaatacacaaaactgactgccatgataggaggtgatatgctgaatgaacacggtgtgcctgttattccatccaaggaagtgactattagtgccgtaaaagatgcactaaaccgtcacctaggcatcaacaacgacgacctagaagccggccactgggaattcactattgcagataaatgtctcccaagattccatgtgggctacgacgcatggcaagacaaggccgaaaacaggtttcaagatgcttacggccagactgtttcactgggcggaatggggttctccagaagtccaggtgtccccgatgttattgtagatggcttcaacgatgccctccaactcggccaataa

SEQ ID NO: 707 - DNA, 2235 bp, Saccharomyces pastorianus
atgtccactcgagactatgctcttaccgatttgattgaatcagatcctcgtttcgagagcctgaaaataaaattagctaattacagaaagggttctgatgaatatattcaggaactttattcccaattgccactggctagctggccaaactataagaggtatctgaagaaacaagccgctgcaactccgaattctgataataaagctgggtttagccccatttataggagttctctttcttcgaaacatttgatcagttgcgttgacaaaaacctaaaaactgcctacgaccatttcatgttttcagtgaggaactggcctcaacgagactgcttaggttcaagaccatttgacaaggctacaggtacctgggaggaaacttaccatttcgaatcattctctacagtatctaagaaatgccattatattggaagtggtatattgtccttggttaacacaaagaggaaacgccaattggatgctaatgactttactgttgctatattgtcccacaataaccctgaatgggttttgacagatttggcttgtcaagcttattctttaaccaatactgcgttgtacgaaactctaggtcctcaaacttcggaatacatattaaacttaactgaagctcccattcttatttttgccaaatcgaatatgtatcatgttctgaaaatgctacctggtatgaagttcatcaatactttagtttgtatggacaaattaagtgacaatgaactgaaaatgctaaacgattcacttatacccatcgagaccaattctttaaatgaaagaataacacttttttcattggaccaagtagagcggattggcagtctcaatgaaattcctgcaattccaccaactccggattccttgtatacaatttcattcacttctggtacgacaggcttacctaaaggtgtagagatgacccagagaaatattgcgtctgggatagcattcgctttctctacttttagaattccaccagataaaagaaaccaacaattatacgatatgtgttttctgccattagcccatatttttgagagaatggttgttttgtatgatttggccatcggctttggaataggattcttgcataaaccagatccgaccgtattagtagatgatttgaaagtgttaaaaccctatgcagtcgccctagttccaagaatattaacgcgttttgaagcaggtataaagaacgctttggataaatctgctgtccaaagaaacgtggcaaatactattttggattccaaatcagccagatttactacaaaaggtggcccggataagtcggttatgaactctctagtttatcatcgtgtattgatcgataaaataagagaatctctgggtttgtctaacaactccttcataataactggatcagccccaatttctaaagatactttactattcttaagaagcgccttagatattggtataagacaaggttacggtttaaccgagacatttgctggtgtctgcttgagcgaaccgtttgagaaagatgttggatcttgcggtgccattggtgtttccgccgaatgtagattaaaatctgttccagaaatgggatatcatgccgataaagatttaaaaggtgaattacagctccgtgggccacaagtcttcgaaagatattataaaaatcccgacgagaccgcaaaggccattgatcaagatggttggttttctaccggagatgttgcatttattgatgtaaagggccgtataaatgtcattgatcgggtcaagaactttttcaaattagcacacggtgaatacatcgcaccagaaaagattgaaaacatctacttatcatcatgtccctatatcactcaaatatttgtcttcggggactctttaaagacatttttgattggtattgtgggcatcgacgttgatgcggttcgatcgacattagctgcaaaacatcctaaagtaagaaaatggactggcgaacaattggtagagaatttaaatgaagataaaaagttgagaaaggagtttttaaacaaaatcaacaagtgcatcaacgggctacaaggctttgaaaaattacataatatcaaagtcggaattgagcctttaactctcgaagatgatgttgtaactccgactttgaaaattaagcgtgccaaggcctcaaaatttttcaaagagacactgtaccagttatacgaagaaggttcattaatcaaagaagaaaggctgtag

SEQ ID NO: 708 - DNA, 1026 bp, Saccharomyces pastorianus
atgagtgcaggtattggcgaatcacgtacagaactgctcacttggctgaatgggcttcttaacctgaactataaaaaagttgaagaatgtgggactggagcagcatattgccaaataatggactcaatttatggagatttgccgatgaacagagtgaaatttaatgctgcggcagaatatgagttccaaacaaactacaaaatcctacagagctgttttagcaaacacggaattgagaaaaccgtttacgtcgataagttgatcaggtgtaaattccaagataatttagaatttttacaatggttgaagaagcattggattcgatataaagacgaaagtgcgtatgatccggattcccgacgcaagtaccgtcctattatgacgaacaatagcgccaccaagactcgcacgccatccaaccctatcagtacaagaaggtcattaagcacaggaacaagcaactctataccaggaggcccaccaataagacactcttcactaggggtgacgactggtaggaaaaccagtgctacccaaggtcagttaaatgcgatgcaagctgaattatccaatgcacaggaaacaattggttcattgaatgaagagatagaacagtacaagggaacagtgagcactttggagattgagagagagttttatttcaacaagctgcgcgatattgagatcctggtccataccacgcaagacttaattaatgaaggcgtttataaatttgatgatgagactatcacgggccgtggcgctgggaatggcggtgctttattacggtttgttaagaaagtggagagcatattgtatgccacggcggaaggatttgaaatgaatggtggcgaaggtgaacaacaggaggaagatgggggaaaaagtggtgctgtacagaacggaaatatgttcgaaaacggcaatggcaatgtccaggaagataacgatgacgtgataatgcagaatgacggaagtcaggttggtgtgaacagtaatttgattattgacgaggagactttttga

SEQ ID NO: 709 - DNA, 2295 bp, Saccharomyces pastorianus
atgatgatgtggcaacgatgcgcaaggggtgcgccacgctcgtggacttcactcccgctcgccagagctggtgccgtatcaactgcaaggccgattctgctgcgctcattcgtacgcttgcccgctggtcgcagtggctgtcgcagtctaacaaccaccaatacggtgtaccgtgccgcctccgtacgttcattccatctctctgcagcaagatccaatgaaaacaagccaaacgataccaaggacaaggacaaggacaaggacaacaacaaaaacaagaatgaagaagacgatgccgaccccaacaagaagaaggagttcaactcgccatccgagtacttcaggtccaaggaattcaaaaacacaatgtttttgaccatcgggttcaccatcatattcaccctactgacgccctccaataacaactccgcagacgattccaaccgcatcctcacatttcaggacttcaaaacaaaatacctggaaaagggcctcgtttccaagatctacgtcgtcaacaagttcctcgtggaggccgagctggtcaacacgaagcaggtcgtctcgtttaccatcggctccgtagatatctttgaagaacaaatggaccagatccaggaccttttgaatatcccgccccgcgatcgaatccccgtcaagtacatcgagagatcctcccccttcgccgttctgttccccttcctgcccaccgtaatcttgcttggtgggctctacttcataacaaggaaaatcaatagctcgccccccaatgccaacggtggcgccggtggtggaggtcttggcggcatgttcaatgtcggcaagtccagagcaaaacttttcaacaaggaaaccgacataaagatatccttcaagaacgttgctggctgcgacgaggccaaacaggaaatcatggagttcgtccatttcttgaagaacccggccaagtacaccaaactgggcgccaaaatcccccgaggcgccattctttccgggcctccaggtaccggtaagaccctcttggccaaggccaccgcgggcgaggccaacgtgcccttcttttccgtgtctggttccgagttcgtggaaatgtttgttggggtgggtgcttcccgtgtaagagacttgttcacccaggccagatccatgtccccctccatcatcttcatagacgaaatcgacgctatcggtaaagaaagaggcaaaggtggcgctcttggtggcgccaacgacgaaagggaagccactttgaaccagttgctggtggaaatggacgggttcaccacttccgaccaagtcgttgttcttgccggtacaaatagacccgacgtgctggataacgccctgatgaggccggggagattcgacagacatattcaaatcgactcacccgacgttaatggcagacaacaaatctatttggttcacttgagaaaactgaatctggatcctcttctcaaagacgatatggacaatctttccgggaaactggctacattgaccccaggtttcaccggtgcagacatcgctaatgcttgcaacgaggcggctttaattgctgccagacacaacgatcaatacattaccatttaccattttgaacaagccattgaaagagtcattgctgggctcgaaaaaaagacaagagttctttccaaagaggaaaaaagatccgtggcttatcacgaagccggccatgctgtttgtggttggtttttgaaatacgctgatccacttttgaaagtaagcatcatcccacgtggccaaggtgctctgggttacgctcaatacttgccggcagaccaatatttgatatccaaggaccaattcaaacacaggatgatcatggcccttggtggtcgtgtctctgaagaattgcacttcccctccgtgactagcggtgctcatgatgattttaaaaaagtaactcaaatggcaaatgcaatggtcacgtctttaggcatgtcgtccaagatcggctatctatcattcgaccaaaatgacgggaatttcaaagtcaacaaacccttcagcaataaaacggcaagaaccatcgatttggaagttaagtccattgtggatgatgctcatcaagcttgtaaagaattgctaaccaagaacctggacaaagtcgaccttgtcgccaaagagctgctgcgtaaagaagccatcaccagagaagatatgattagattattaggtccaagaccattcaaagagagaaatgaagcttttgaaaaatacctggatccaaagaaaactgaacctccagtggcacctgcaccaacgaactaa

SEQ ID NO: 710 - DNA, 663 bp, Saccharomyces pastorianus
atgacaagcatagacgcgttcggcaacctcgagcaccgaatggatgcgttccagcaagacgtggcccaggtgctgtcccgccaacaagaccacgcgcgccagcaactgcagcgtttccaagaggaaatgcgccacttgcacggccagcatcagaacctcgttgacgaactgcaacggcttgccgcccagcgcacagctctgcagcagcagattcgcgcggccgagcaggccaccagcaccaccagagagcagtggcgaggataccacgagcgcaagggcgagctgtctagacggcagttgacactggcggctcagtcgcgcgagctggactcgctgctgcaacagcgcggcgcggagtgtgcgcggttgcggcagcgctgggccgcccaggtgggtaacgacgctgcggaggtcgcgttgtacgagcggctgctgcagctgcgcgtggtgcccggcgcgcgcgacgcgcgcgacgtgcggttcgtgtttggtgacggcggctgctgggtggaggtagcgatgcacggagaccacgtgctcggcgcatgtcacccggagctggacgcatccagccggggaacgcttgagcacgtgctgaccgtcgagggcgacctcggggcgtttctggtcgtggcacgcgatatgcttctgcgttctttataa

SEQ ID NO: 711 - DNA, 267 bp, Saccharomyces pastorianus
atggcaagttcggttccaccagggggtcagcgtattctacaaaagagaagacaggcgcaatctgtcaaggagaagcaagcgaagcaaactcctacttccgccagacaggctggtcacggcgggtcgtcgagctcggtattgaagttgtacacggacgaggccaacgggttcagggtcgactcgcttgtcgtgttgtttctatccgccgggttcattttctccgtcataggcctgcatctgttgtcgaagtttacacatattatataa

SEQ ID NO: 712 - DNA, 1365 bp, Saccharomyces pastorianus
atgggtctctgcgcatcctcggaaaagaatggtagcccttctgcctcgcagaccaccagcactgccggtggcagtgctggtggggccaaggcatcgtcacagcagcagccgcaagggcatcgacagaaaattacaaagactgcaggcaggtccggtcagcagcagcagcaacaacaacaacaacaacagccggagccggcagcgcctgcacacagtgtaaaggacaacaacattaccgccatcaacgcgatatctcccacggtcaccgccaataccaacggatcgcaacagatcaacatcgactccgctttgagggaccgggcgaccaacggcccggcgcagcaaacggtttccgatgcctccagtggcagcaacaacaaggagctcaaggtgctattgttgggggccggtgaaagtgggaaatccaccgtcctgcagcagttgaagattctacaccagaacgggttcaccgaccaggaaattacagagttcattccgctgatctaccagaatctgttggagatcggcaagaacatcatccaggcgagaaccaggttcaacgttaacctggagccggactgcgtcctgacacagcaagacctgtccgagatcatgtcctttgaaatgcccaataactacacagaccagttcccaccagacctggcgaccatgattgccgaactatgggcactgccctccacacagcgcctaatcagcggccccaatgcatcgaagttctacttgatggattctaccccttacttcatggagaatttcaccagaatcacctcgcccaattacagacccacccagcaagacatactgagatcaagacagatgacctcggggatcttcgacaccgtcatcgatgtgggctcggacatcaagatgcacatctacgacgtgggtggccagcgctcggaaagaaaaaaatggatccactgcttcgacaacgtcactttggtcatcttctgcgtctctctgtcggagtacgaccagtcgctgatggaggacaagaaccagaacaggttccaggagtccctggtgctcttcgacaacatcgtcaacagcagatggttcgcccgcacatctgtggtgctcttcctaaacaaaattgatttgttcgccgaaaaactaaacagagtacccatggaaaactacttcccggactacacaggtggtgcggacatcaataaggctgccaagtatatcctttggagattcgtccagttgaacaggtcgaacctaagcatataccctcacgtcacccaagctacagacacctccaacattaaattagtgtttgcggccatcaaggaaaccatcttggaaaacacattgaaagactctggggtgctgcagtaa

SEQ ID NO: 713 - DNA, 1572 bp, Saccharomyces pastorianus
atggctagtgctgcagtgatgatggacgtggactcctccggtgtcaatgatttgcaccattccgaaaagaaatacgcggaacaagaccaaattcaagagcttttgaacgtcttgaacgagatctccaagaccaccaccacactagaccccagatacatatggaggagcttgaaagacttgagctctcttagaaaccaagagcttttaaacgcagaaattctatctttcacagtgaatgtcctgtaccctgattcctcgtcatttaaaaaaaatctactgaaattcattaattccaaccacaagtcatcagtatccgactcagacgagcttagaaactcgtacccggcttcattttacacggtgaacactgaaaaaaagaccattgaagtgacacctgaaattaactgtttcatccatctcttggttcaattatttttatgggacagcaagaaattggaagagctggtggcattcaatagaaaggtcgttatcccacaattgttgtgtttttacaacctgcgttccttaaatctgatcaacgctaagttatggttttacatatatttaagtcatgaaacattatcacgtggctgcatggaaaacgataacgataatcaaaatataattttgaggtccaccatgatgaagttcttgaaaatcgcctctttaaaacacgacaatgaaactaaagccatgttgatcaacttaattctaagagatttcttaaataacggtgaagtcgatagcgcgtccgatttcgtctccaagttagaatttcctcacatagacgtttccagttcattggaggcaaggtacttcttctacctatccaaaatcaatgctattcaattggactattccaccgcaaatgaatacattattgcagccataagaaaggctccacacaactctaagagtttggggttttcacagcaatcaaacaaattacactgttgtattcaattactaatgggtgatattccagaattatcatttttccaccaatcgaatatgcaaaaatctcttctgccttactatcatttaaccaagaccgtcaaactaggtgatttgaaaaaatttacatccacaatcacaaagtataaacagcttttattgaaagatgacacttaccaactttgtgtcagattaagatctaatgttattaagacaggtataagaatcatctctttaacttataaaaaaatctccttaagggatatttgtttgaaactaaatttggattcggagcaaactgtagaatacatggtttcaagagctatcagagacggtgtcattgaagctaagatcaaccatgaagacgggttcatcgagaccacagaattattgaacatttacgacagtgaagatccccaacaagtatttgatgagagaattaaattttccaatcaactacatgatgaataccttgtatccatgaggtaccctgaggataaaaagactcaacaaaaagaaaagaatgaaaacggtgacgacgatgatgatatgcttgatggcgatctattggatgacatgtcagatatctcggatcttgacgatttggggttcttataa

SEQ ID NO: 714 - DNA, 2067 bp, Saccharomyces pastorianus
atgacgacagaagaaccagcgccaaaacactctgattctgaaataggaattaaattggcattggatccgaacttaataacattggcactaagctctaactcaaactccaatcttcattcaccagcatctgacgaatcagtgcctagatccggagaaaaggtggatgacaatgctcacttagaaggtgatgaagtggagaacaagacaaagaaggataatgacaagagactgaaatttctgaagaataaaaattcattggtcagcaatccacatgaaatttacggttccatgccattagaacaattgatcccaatcattttaagacagcgtggtccaggatttaagtttgttgatttgaatgaaaaggaattacaaaatgaggctaatcaacgcgataacgatgatgccgatgacagcaacaacaacgagaagaaagacggcaatgctgaggatgaaaacgtacaagtgggagaggatttcatggatgttgattatgaagacaaaaatgatacatcaaatctaatcaacgaagcggagcacaagacaaatgaaaccggtgaggcagatgatagcgtagggacgatgatgacacaagaacaatttgtcaagagaagaaaagacatggtagaacatatcaatttagctatgaacgaatcgtctctagctctagaattcgtttctttgttactatcaagcgttaaagaatctacgggcatgtcttcaatgtcaccgtttttgagaaaagttgtaaagccttccagtttaaacagtgataaaataccatatgaaccgcctacaaaggaggaatttattgagttagatatattaaacaaaggctggaagttacaaagcttaaacgattctaaagatttattacgcaggagcttcaataaattaagttttatcttgcaaaatgagcatgattattggaacaagataatgcaaaatatcagcaacaaagatgttattttcaaaattaaagatagatctaccggtcagaagctattagcaatcaaatatgggtatgaggattccggatctacgtatagacacgatagaggtattgccaacataaggaataacattgaatctcaaaatctggatttgataccccatagtagttctgcagttaaaagtacggatttcctacattcggtgaagaaatttttaagagtccgcattttcacaaagattgaatctgaagatgattacatattgagtggggagagtttaatggatggcgatggcgataatgatgagactgagacaaaagacattagaaaacagatacaaatattgaaaaagattatttttgaaaaggaactaatgcatcaattgaagaaagaatgcgctttattgatttcatatggtgtcagtattgaaaacgaaaataaagttataattgaattgcctaacgaaaagtttgaaattgagttattgacccttgatgatgactccatagtcaatcatgaacaagatttacctaaaatcaacgacaagagggccgatttgatgcttgttatgctgaggttattattggtagtcatgttcaagaaaacactgagatcgagaataagttcacctcaaagagtcaccaacttgaaggaagacaatgatgtgctattaattcgtcccatcctgggtaaagttagatttgccaattacaaactgttactgaaaaaaatcataaaggattatgtgctggatattctccccgggtcgagcataacagagactgaaattaagagagaagaatcccaagaaaatgaaaatattgatgacgaaaacataacgaggttgaacaaagaaatccgtgcctttgacaaactgttaactgtacccaagcgtgaactcgagataaacctaccgccatccgagcacaagagccccagattaagcctaatactagaaagtcctaactattgtaacgcattgattcacatcaagtttgaagatacctctgaagccaacgcggtcacctttgacacgacattctctgacttcaaagaagtcgaggacttcctacatttcatcgtttctgaattcattcaacaaaagaagatgtaa

SEQ ID NO: 715 - DNA, 861 bp, Saccharomyces pastorianus
atgacgtacacattggctatcttaggttgtggtgttatgggccaagcgctcctttcagccatttacaacgctccaaaggctgctgacgcagccatcgctgcattctatccttccaagatcatcacatgtaaccacgatgagcccagtgcacaacaagttactgatcttgtcgaaacattcgacgagtcacctaacggtatcactgtggacagcacctacggcaacaacgtcagcgctgtggaagaggccactgtggttcttcttggtacaaagccatttttggctgaagaagtattgaacggcgttaagaaggtcattaagggaaaactgcttatttccttggctgccggttggacaattgaccaattaacccagtacactagcactgtatgtcgtgtaatgactaacacacctgccaaatacgggtacggctgtgctgtggtatcttattctgccgatgtttccaacgagcaaaaaccattggttaacgagttgattagtcaagttggcaagtacgtcgaattgccagaaaagaatatggacgcagctactgcattggttggttcaggccctgcctttgttttgttgatgctggaatccttgatggaaagtgggttgaagttgggaatcccattgcaagaaagtaaggagtgtgcaatgaaggtgttagaaggcacagtcaagatggttgagaagagtggtgcgcacccatccgtcttgaagcaccaagtgtgcacaccaggtggtacaaccattgcaggattgtgtgtcatggaagagaagggtgtcaagagtggtattatcagtggtgtggaggaagcagcccgtgttgcttcccaactaggacaaaagaagaaatag

SEQ ID NO: 716 - DNA, 2763 bp, Saccharomyces pastorianus
atgtcaagcggtagtactattgtttcgcccgacaagtcggaacgaacattcagacatgaggcagaactacccaaattaccattacccagattgagtgacacgttgctacacttgaagcaaagtttagagccactgtactacgcggatggctattatcaacatcccctagatccagagcaaattgaggatctgtcttccatcatcaacaattttgaaaaaaatccagtgagtgagaaactgcaatccaaattacaaaactatcacgattctagagattgctatcttgacgaattgcacctagacatcaacaatcatacatctacaagagaaatccaggacgacgtgttgcccagaaacccgttcttggtcctcgcggacgatgctttaccaaatatctctcaagccgacaggtctgccgtcttggtacattctgcagcaagatttgtttcggctttgaagcaagatttgttgcccccagacattaatgctaccagcggtaagccattgtcgatggcaccgtttttgaacttgttcggtactactcgtagtcctgtcttccagcacggtgaagttgaaaattttaatttgaataatccttacactgcatctgacctggaagacccagattattcagatgatgaggacaggtttagtgaagctactgaaaaggaattggcagaccggaagcaaaaacgcaaagaagacatatttactggtaatggtataaccattaaaaagcacccggatagcaaacacatattgatcatctccaggggccaatattatactttggaggtgttggactctatgaataggatcatatataccacggctgaattaaccacaattttccagcatattataaatgattcatcagacagtggtaaatcaaccgcactaggcagtttaacttctcattcctttaggaactggaaatacgcaaggaaaaggttgcaaaaaagatacccaaacgaattatatcgcatagactctgcgttattcgttcttgtgctggacgagtcccaggaggaaactattaatagtgacgacgacgccgccgacattagccagaaatttaataggactatcactgaacgagacaagaaatgcacttctgcaaattgtaaaagagtatattatggtacttctataataaacaacaaaggccatcaagtgggctcatgtgtctctcgttggtacgacaaattacaattggttgtcactgcagatgccaaagccacggtgatttgggattcattcacctgtgatgggtcagtcgtgcttagattcacgtccgaaatttacacggaatctgttttgagattagccagagacgttaatgccggcgatccgcaattctcgctatggccaaacgtcacccaaacagatcctgaaactaaaaaattaatgacggcgactataaatgcaaatagcgagggcccaaccgaaattgatcctaaatcagttgtggaaaaaatcgattggtcctttagcaacatcctgaatacacatgtacatttgtcagagacaaaactagctgatttgatttccaaatatgacattgttcgctcttctattcccttgggtagaaggtcagcccagagattaggcatcaagcctgactcaatggtgcaagttgctttacaaattgcccattatgcattatacggtagaatggtctttggatttgagccgatatccactcgtggtttcaaaaattcaaggtcgtcatttattaatattcaaaatcaggaactcctagaactatgtcagttatttatttctagctccatcgatgggacggggaaactggacaaatttattcaaacctgtgaaacgcaccatgaaatggtgaaaaatgccaaatcaggtgtcggttatgaaaagcatttcaatgctttgaagtatcttttcaagtttcatgaccattttggtatctccctaaatggtgatgaatcatctgttgcaaaagacctttttgaaaacccattggttttgcctttctcacaacctgaattgattgtcgccaattgtggtaatgctgccactacaacattcggtataacgcctgctgtacctcaaggatttggcataggttacattatcaaagatgatcaaatggatttaaccgtgacatcgcaattcagacagggcgacagattgatgttcatgttaaactgggtcttaggtgaaattcgttcgtattggaggatgtctcgcggtacttcccataacaaaactggtgtaaagattagccctgtggtagataaattgtatgaaatggacaatgcaatcaacaacccctcaaaacacaatggctacacggtttctggacctcgccaaacatcttcatcatcacaagtaaatttgaacagatatggtggattttttgatttggaaagtcacatagacagtagaaatatctccaaatcaccatctttgaagaacttgcagaaaaacttcaatgggttgatggtgaatgcagagaatgatcattcaagctcagcagtatccgtcccaacagaaaaggaaaaattgaacacaggccatgaaattttacaaattcaaccacgagagttggccagtaacagattggaagcaggagaagagacggatattgatgctggcaataccgatagcatatcatcgtcttcttccgctacgtctttgagttccaagaaacgtaacgtcatcaactcgagattcgacatcgattttgatcgtagtcgcgtgggcagaaaagtcgctactttggatcaataa

SEQ ID NO: 717 - DNA, 1584 bp, Saccharomyces pastorianus
atgagcgacttacaagatcaagaaccgaccattattatcaacggtaatttggacccagtcggtgaaccagatttcattgaagaaactgaagttgtagctcaagaggcagaagaaaatgaagaagccgacaaaccaaagaagaaagttgcattcactggcttggaagaagatggggaatctgaagaggaaagaagaaaaagagaattcgaagaaggtggtggtttacccgaacaaccactaaaccctgatttttcagaattaaacccactatctgcagaaattatcaacagacaagccacgataaatatcggtaccattggacatgttgcccatggtaagtccacagtcgttagagctatttctggtgtccaaacagttcgtttcaaggatgaactagaacgtaacattactattaaattaggttatgccaatgctaaaatttacaaatgtcaagaacctacatgtcctgaacccgattgttatagatctttcaaatccgataaagaaatcaatcctaaatgtcaaagaccaggttgtcctgggcgctacaagttgatccgtcacgtttcgtttgtcgactgtcccggtcacgatatcttaatgagtactatgttgtcaggtgccgctgttatggacgcagccttacttttaatcgcaggtaatgaatcctgtccacaaccccaaacctcagaacatttagctgccattgaaattatgaaattgaagcatgttatcatcttacaaaacaaggttgatttgatgcgtgaagaaagtgccttggaacatcaaaaatctatcttgaaatttattagaggtaccattgccgacggcgctccaattgtaccaatctccgctcaattgaagtataacatcgatgctgtcaatgaatttattgttaaaactattcctgtaccaccaagagacttcatggtttctccaaggttaatcgtcattcgttcatttgatgtcaataagccaggtgctgagattgaagatttgaaaggtggtgttgccggtggatctatcctaaacggtgtcttcaaactaggcgatgaaatcgaaattagaccaggtatcgttaccaaggatgacaaaggtaaaatccaatgtaaaccaattttttccaacatcgtttccttattcgctgaacaaaacgatttgaaattcgctgttcctggtggtttaattggtgtgggtacaaaagttgaccctactttatgtagagccgatcgtcttgttggccaagtcgttggtgctactggtcatttaccaaacatttacaccgatattgaaatcaactatttcttattacgtcgtctactaggtgttaaaacagatggtcaaaagcaagctaaagtcagaaagttggaaccaaatgaagttcttatggtcaatatcggttctaccgctacaggtgctcgtgttgttgccgttaaagctgatatggcaagattacaattgacatcacctgcttgtactgaagttaacgagaagattgctttatcgagacgtattgaaaagcattggcgtttgattggttgggctactattaagaagggtactactttggaaccaattgcttaa

SEQ ID NO: 718 - DNA, 825 bp, Saccharomyces pastorianus
atggttgagtcggacgaagattttgcacctcaagaattcccacacacagaaacagatgtcatcatagatgaacgtgacaatgaggggtattcctccgacgagtttagcggcacattaagcagaagggcttcgagtatattttctataaacacagctccgttggctccgccaaatgctaccgacatacaaaaatttacaagcgacgaacatcattttagcatgatgaggaatttacatatggcagattatattactatgttaaacgggttctctgggttttactcgattgtgagttgtttgagattcacacttacaggcaaacctcattacgttcagcgtgcccatttttttattttattaggtatgtgtttcgacttccttgacgggagggtggcacgtctcagaaatagatcgtctctgatgggtcaagaactggactcattggccgatttagtctcctttggtgtggctccagcctctattgcgtttgccattggtttccaaaccacacttgatgtcatgattctgtcattcttcgttctatgtggtttggcgagactagcaagatttaacgtcaccgtcgcccagttgcctaaggattcttccaccggtaagtccaaatactttgaagggttaccaatgccaaccaccttggctttggttttgggtatggcgtattttgttagaaacgggtggatttttgacagcatcccattcggtattttcagagaagaccaattattggaatttcacccaataattctggtattctttattcatgggtgtggtatgatttcaaagagcttaaagattcctaagccatag

SEQ ID NO: 719 - DNA, 1272 bp, Saccharomyces pastorianus
atggctggcgacaactctgaaaataaggatgcctctatgttagatgtaagcgacgcagccagcaactccaataagaacgatggaagtaactcaagcgcaaaccaaaacaacgaggccgccctggcgtacacattttctcaaatgaatgttgacaatccaaacgaattagagcctcaacctcctcttagacataaatcgagtttaatttttaatgatgacgatgacgacgaaataccaccgtattcaaaccacgcagaaaacgggtttggagaaactttcgattccgatgacgacaacatcggcggtagcagctcgagtagtatcgacagcaacgaagccgatggtcatgatgcagatatgacagcaaataccctacaaaatacggattatcaatcaactcagcaagcagacgtgtcccataatcaatcacctcaacagcagcaagatgaacagcagggtagtgtggcgaacaaaaaaataagagctatgatgcttccaattgatatcacttggcaacaggggggtagtaaggtgtatgttaccggttcattcactggatggaggaaaatgatcgggctggtaccagtgcctggacagccggggatcatgcacgtcaaattgcaattacctccaggtactcatcgtttcagatttattgttgacaatgaactaagatttagtgattatttgcccaccgcaactgaccaaatgggtaattttgttaattatatggaagtaactgcaccacctgactggagcagtgaacctcagcaacaagcatccgataacaaaacaaatcatgcagatgatagtcagtctgcgaagagaccaatgagcgctcggtcaaggatcgcattggagatagaaaaggaaccggatgacatgggcgacggttacactcgtttccacgatgaaaccccatcaaaacctgatttagaatacacccaagatatacctgcagtgtttactgaaccgaacgtaatggagcaatattacttgacacttgatcagcagcaaaataaccatcagaatatggcttggttgactcctccacagttgccacctcacctggaaaacgttattctgaacaattattcaaatgcgcaaactgataataacgaaaacacctctggcgcccttcctatccctaaccacgttatattgaaccatctggcgactagcagtattaagcacaatacattgtgcgtcgcgtcaattgttcgatacaagcaaaaatatgtgacccaaatactgtatacaccgctacagtag

SEQ ID NO: 720 - DNA, 600 bp, Saccharomyces pastorianus
atgagtaaaatacaggtggcacacggtagtcgactagccaacctgatcgattataagctgagggttcttacccaagatggccgagtatatatcgggcaattgttggcgtttgataaacacatgaatttggtgctgagtgattgtatagaggaacgagtacccaggactcagctggacaagttgagaccgaagaaggactctaaagacggtgcgtccttgaatatcaaagtagaaaaaagagtattgggtctgaccattttaagaggggaacagattctgtctacggtggtagaggataagccactgctatctaaaaaggaaagattggtgagagatcaaaaggaaaacaagcaagcgcaaaagcagaccaaacagagcaaggataaagaaaagaagccagggaagatcaccaaatcgaatgcggcgaatgccaagcatagcaataacaccgatagagaaatagcacaaccttcctcgagcaggtacagcaatagcggtggtcccggcgatagcattagtacaaatagatcgaggttcaacaatgaagcgcctccccaaacaagaaagtttcagcctccgccaggcttcaaaagaagataa

SEQ ID NO: 721 - DNA, 672 bp, Saccharomyces pastorianus
atgagcagcgaggactatgggtatgattacgacttgttatttaaaattgtgctgattggcgattccggagtagggaaatccaatctattgtcaagatttacgaagaacgaattcaacatggattccaagtccactattggggtcgagtttgccaccaggactctggagatcgatggcaagaggatcaaggcgcagatctgggatactgcgggccaggaacgttacagagccattacttctgcttattatagaggggctgtcggtgccttgatcgtatacgatatcagtaaatcaagctcatacgagaactgtaaccactggttatcggagcttagggaaaacgcagatgacaacgttgcggttggtcttattgggaacaagtctgatttggcccatttacgtgctgtacccacagaagagtctaagacatttgctcaagaaaaccagttattatttacagaaacaagtgctttgaacagtgagaatgtggataaggcctttgaagagctgattaatactatttaccaaaaggtcagtaagcaccaaatggatctcgcagattctggtgttaccggaaatgccaatggcgcatctgctccaaatggtccaacaattagtttgacaccaactccaaacgaaaacaaaaaaaacagcgggaataactgctgttaa

SEQ ID NO: 722 - DNA, 3240 bp, Saccharomyces pastorianus
atgcggtcctttatcaaatctcacaagaagtctacctcgtttgacgatagtcctaaacgacatagcaacttcagcactaatactaataatagccctcaaaggtcgagcaatgattcattggagtttctaccatccacgccatcacaaatgaactatgataatattcccacaacagcaaaacactccccgggtttcgagtccttccaccgtttggcgaacaaaacctcgaagttgttcaaaaaaacatcaaactcaaatttgaactcttatctagcttccaatccagctcccaattcaaatgcacccccttcaaactcattcatagttcagaatccaccttctaaacaggctgcaccaccgccaccgctgccacttccactcttacctgcctcgtccacttcttcttcttcccaatacgacaatgacgttgaatctgctgggttaagaaattcttcccctaccaacggtctcaataaggccacggactctttgcccgccattaagggaaccatcacacattcgtggggggtctcctccaagattgaaccgcatgttattatactgaacgaccctgctttccccgcatcgaatacatctgacgcgacctccacgaagcaatttagacattcattactcgtgaatgaagcatcgtcttcttcgtcttctaacttagaacctgctataaggatactgaataaatgcaagaccagtgatagtggtaataatggggaagataatgatgaggatgaatttgatgacgagttcccaaagaaggaaaagcatatctacaaagcgctagcgttggctaaaaaccgaaacagacaagcaagaatccattcacatgacgatataataaatctggggaagacatcacaaatggatatgagtttactagctgctgcgttttccggaaactctactaataatgaccagtcttctaatgagcagaacgacgagaaaattttggacatagagagagttgctaccacgtccactttgacttcatctgaaaactcttcactaataaataaatctcccgaattttataatcaaccgctccccatttcccccaagatacgacatggtgatttattatcaccgcatttagacgtcaataacaataaacatcaaatcgaaatgtcacacaagaaaaaggtaagaatcaacttagacaagaaagaaagaaagaacatttattttttcaggaataattctgacgaatacactaacaatgaaaatgtaacctcagaaatgtacgaaatccatgaccttaatgaagaatcgcctggcgaagaagcgggagaagaagacgacgacgatgacgatgatgacgatgacaacgaatcagaattttcttttgaatatgcgggaataaacgtaaggacatcgtcagtcaaatattactccaaaccagaaccaacggccaacgtatacattgacgatctttatgaagacgagatttttgatgacgatatgaattgcatagaggatggcgaaagcgagatggaggagaatgaaatgggccatttatcacccgggtttgaagaaacagccctaaacaacaacaaagttaaaaaatataatgacctttttgcattgaccgatgacgatgacgatgacgatgacgatgatggtggtgatgatggtggcgatgatggtggcgatgacaatgatgatgattgcgaccaagaagaacttggaagtagaaaggaaagcaacggcaatgagtatgatgattactttgtagaaggtgtagctgatgacaaagaatcctttgatgaattgaccatattgccgagaactgaaattgtcaaaaaacccattcagaaatatagtgatctctttgacttgtctgatgaagacgaggaggaggtggctcgatctgatttagagtccaaaagtttttctgatgaagctcccagtatggacagtgataatactgcattgcatgggaagccaacatcgacaatctacagccaatctaataaaaatataatgacacctgggataacatcaaagaataacctgggatcaaaaggtacttcaagcgaccgtaatgagcagatgtctcctatgaatacacctctcgaatctactatttctaagcctaaagtcgaatcattttcagatatttttaatatagatgatagcgaaagtgatagtgaaagtgaggatagaaccatgctcaacaatcctgatgatctgatatccaataatttgaaaaacgaatcttccttagagactgctttacatgaaaacaacttagaaccattttcttccaataatcaacttttacaattgcctcaaacacccgctaaaatatttattgcgccaagtaattccgctatgtattcacaaactagtacaactagcgattttggtgacgatgatgacgacacagatagtatttcgcgaactccattccaacttatagaaccaagcttttcaaacccactcccctatgagagctcacattatcccttgccattcaatacccctccacttccaccacctgcaagatcgcaatcactaaaataccatgatttaaactgtgacctggattcggaactccccagaccaacgagcaacctcttcttcattaatgaggctgaagaagatgaatacaatcagaaaaataaaatccaagattatgaccattatgatattgatgaaattaatggtgttcccgaagatttcaatttttcagattctgaaagagatgatcctaaccgtggtacattgaaatcgcctttgcgacgtggttccagaaataaagatgtatctccattttcatctttgtcctcgtccttcagaagtacacatagttttaatgggaaattgacaatcaaccagggtgccaaagagctggctccaatgaaaaataagatagaattgaccaacaagactgtcacctttttcaataacaatagcaattggaacacctacgataacaactcgctctcacggaagtcttcattgcaaatgagggacaacaaatatcaaatgcatacctctcaccaaaacctggaacttccaaatgttctttcacaacaaccgaaaaatcaaaccgaactggacgaaaaagataatgataactatgtaatctcacccactttaccgaaaactgtaacgcctaccaattcattcagcaaacctacatcagaattcttgaacgattattcattaagtcccatccaggagacaccatcttctgttcagagctcgccaaggaaagcgtag

SEQ ID NO: 723 - DNA, 555 bp, Saccharomyces pastorianus
atggacgcgttcagcttgaagaaggacaatcggaagaagttccaagacaaacagaaactgaaacggaagcatgccacgcccagcgacaggaagtaccggttattgaaccgccagaaggaggagactgcaaccgaggagcaggagcaagaacaagaacagcctgaattggacacgaacgaagaccgataccatgaggacccggagctggcgttcgaggacccgaacaccgcagcgaccagcgtagaggtgaatagagtgctgaaagacgtgctgagaagtcggcagctgcaggattacggcaacacggacaccaaccaagcggctagtgccgatgcactgaagaccaaggatctcaaacagatgggtgccgccgagcttaatcgctggttgcaccaacagaacacaacaacaacaaaaacaacggcagcagtaggagccacttcgccgtccgtgcaaagcgagcagccggcagctcgccagcaaggcgctacgccgcccgccgatcttccggaagagttagagacggaccaggactttctcgacgggctgctctaa

SEQ ID NO: 724 - DNA, 1833 bp, Saccharomyces pastorianus
atgccaccagtatctgcatcaaaggctaagagagacgctaagaaagctgaaagagacgctaagaaaactgctgaaggtaaaaccatcagaaagctaggaagaaagaaggatgctacggttgaagaatctgaagcagatgctgccgccagagaaatcaaaatgatgaagttgcaacaagataaggacggtctttccgaccgtgttgtcaccggtgttttgagttcattggagacttcccgtgatatcaaattatcttctgtgtccttgttgttccatggtaaagttttgattcaagattctggtttagaattaaattacggtcgtagatacggtcttttgggtgaaaatggttgtggtaaatccacattcttaaaggctcttgccactagagaataccctatccctgagcctattgatatttatttattggatgaacctgctgaaccaagtgaattgtctgccttggactacgttgtcactgaggctcaaaacgaattgaagagaattgaagatttagttgaaaaaaccattttggaagacggtcctgaatccgagctattggaacctttgtacgaaagaatggattctttggatcctgatacttttgaatccagagccgctattatcttgattggtttgggtttcaacaagacaaccatcttgaagaaaaccaaggatatgtctggtggttggaaaatgcgtgttgcgttggcaaaggctctttttgtcaagccaactcttctattattggatgacccaaccgcacatttggatttggaagcctgtgtctggttagaagaatatctaaaaagatttgacagaactttggttttggtgtctcactctcaagatttcttgaacggtgtttgtaccaatatgattgacatgagggctcaaaaattgaccgcatatggtggtaactacgactcttaccataagacaagatccgaattggaaaccaaccaaatgaaacaatacagtaaacaacaagaagaaattcaacatatcaaaaaattcatcgcatctgctggtacttatgctaatttggtgaagcaagctaaatccagacaaaagatcttggataagatggaagccgacggtttagtgcaagccgttgttccagacaagattttttcgttcagatttccacaagtggaaagactacctccaccagttctagcattcgacgacatttctttccactacgaaagtaacccaagtgaaaacctgtacgaaaacttgaattttggtgtggatatggactcgcgtattgccctggtcggacccaacggtgttggtaaatccaccctattgaagatcatgaccggtgaattgactccacaatccggccgtgtttccagacatacacacgtcaagttaggtgtctactcacaacattcgcaagatcaattggacttgaccaagtctgccttagaattcgttcgtgacaagtaccctagcatttcacaagatttccaatactggagaggccaactaggtcgttacgggttgaccggtgaaggacaaaccgtccaaatggccaccctatcagaaggtcaacgttctcgtgttgtctttgccctgttggctttggaacaaccaaacgtcctattgctggatgaacctaccaatggtttagatatcccaaccatcgactccttagccgacgccatcaacgagttcaacggtggtgttgtcgtcgtctcgcatgatttcagactactagacaagattgcccaagatattttcgttgttgaagacaagaccgctaccagatgggacggctctatcttgcaatataagaacaaattggccaaaaacgttgttttgtaa

SEQ ID NO: 725 - DNA, 966 bp, Saccharomyces pastorianus
atgacatgttctaaagactacagagcgttatatagagatgaaatcaaaaagcagatacgactaaaccaagaacatctgcaaagtttgaagcatccaggcacacaactcaattttgaggtggatccttcagaattaccggatcccgaccaggctcgaaaagtgtttttcttcgacattgacaatactttgtataggaaatctacaaaagtgcaattgctcatgcaacgatcgctgtcgaatttttttaagtacgagttgggtttcgaggaagatgaggcagaacgtctgattgaatcatattatgaagaatacgggctgtctgtgaagggtctgatagaaaataaacaaatagatgatgtgttacagtataatacgttcatagatgattccttacccttgcaagactacttaaagcctgattggaaactaagggagttattgataaatttaaagaagaagagatttggtaaattcgataaactatggctgtgtacaaactcatacaagaaccatgccattagatgtgttaagattttaggcattgctgatttgtttgacggcatcacatattgccattatgatagacctattgatgaagaattcatctgtaagccagatccaagattcttcgagactgccaaattacaaagtgggttggcgacttttgccaacgcttggtttatcgatgataacgaaagtaatgtggaggccgccttaactgtgggcatgggtcatgttatccatttgatagaggattatcaatacgactcagaaaatattgttacgaaggaccattcaaacaagcaacagttctccatactgaaggatatccttgagatccccttggtaatgagaagaaacactttctatccatcttccttcgcaataaaggaaagagaagatgctgaggaagagagtgaagctgtaaattggtcaaagcaccagatcaatgttcagtcgtcataa

SEQ ID NO: 726 - DNA, 1398 bp, Saccharomyces pastorianus
atgggaaccgttgactcatccccggataaggagtttgaggctgtccaagattcgcagatatccgagtttgattctcccttggtaccgactagtgcaaggaacgtcttccgcgatgacgatgatgatgacgacgacgatgacaaggtacggcccaactttatcgttgatacagagaacgatagtctcaacagtgacgatgatttgtcagacttggacggtggtttacttctgccttgtgacaaaccaaagctttccgatgacgttgacccgattttgaagagaagtatgctttccaaaagaaaggctcctagtaatgacgaagacgaagatatctccagaacacccaagaaatctgtcaattacattcctttgaagaattataacctcggaaagagtttcgataccacgattattaccaaaattattaagctacaagacttgaacgacgaaatctctaaatcgcccaggaaaagcactagtttagtggttactagtaatacagtagccaaaagggagttgcaaaaaagcttaaagttttctgggactgttccagagatttacctggatttggttactaaagaaactatatcagataaatataaagactggtattttatctctgaaaactgtcactacgaagagttaacggatttggagatgaaagatatggaccattcattcctgtttgataacggtgcattccaaggcaacgtacctgaattcatgcgctcgaaatgccccaatattgcaaacttgttagttttatttggtatcagcgaaaaaaaatctcaatcattaaaaattcaatataaggagaatgagaactgtaaatatgataaactgtgcaccatttttcccactgaaaaaatgcttaaattcctgatgtactattataagggcgacggtgaggaaagagaagtgtttttgaaaagttttatatgtctgattctggataaaaatgttttcaattccatggaattcgagttcaggctgtgttataaaattttgaaactatttgacgagactcattttataaattcgtatttagaaattgtatgcaaagacgatttcttcttacattataggctattacaaattttccccattttacaaaatgtactactgagaaaattgtttaacgaagaggaagccacaagcgacacaacacgccaaaatctgatcgataagttcaatgaattgtttgactataaaaagtataaaaatcttttgtattttatcttaatgatgtatggttcgaaattcattccttttggtcccaaatcacaagtaacagaatatttcagagactgtatactggatgtttctaatgagacaacaaatgacgttgaaatttccattttgaagggaatattaaatttattttccaagatcagatga

SEQ ID NO: 727 - DNA, 2190 bp, Saccharomyces pastorianus
atgcaagacgaccccgaaaattcgaagttgtacgacctgctgaacagtcatctggatgtgcacggtcgaagtagcgaagaggcgagacaaatgggtggcagcagaagccagaccagcagcagtggtggtgagaacgaagaggatgtgacatttggcggtggattccacagcggtacgttcgactcgatgctggaggcgctgcccgatgatttgtacttcacagacttcgtgtctcccttcgcagcggctgccacgaccagcgtcaccaccaggacaatagaggagagcgttccggctaccaaccacatggaggacgacatcgccatgttcgattcgctggccacgagcaagcccatcgatatagccgcttccaaccagcaaaatggtgaaattgcacagctctgggacttcaacgtggaccagttcaacatgacaccgagcaactcgagcggttctgccaccatcagtgctcccaacagcttcaactctgacattccgcagtacaatcacggtacgctcagcaatagcgtctccaaatcttctttgttcccaccgaatgctaccggaaccaccggaaataataacctttataacagcaacaacagtaacacgaatgccagccagcagtctcaccattctttcaacatctataaactacaaaacaataactcttcttcatccgccatgaacattgccagcagcactagtaccaataatatccaacatccgtttctaaagaaaagcgattccatggggttatcgtcatccaacacaacgaactctgtaagaaaaaactcactcatcaagccaatgtcgtctacgtcattggccaatttcaaaagagctgcttcagtgtcttccagcatgtctaatatagaaccctccggtcaaaataagaaaccgctgatacaatgctttaactgtaagacattcaagacaccactttggaggagaagccctgagggaaacaccctctgtaatgcatgcggtcttttccaaaaattgcatggtaccatgaggccattatctttaaaatccgacgttatcaaaaagaggatctcgaagaaaagagcaaagcaaacagacctgaacattcctcaaaataccacaagtgcaccccccacatcgtcaacaccagtgtccactttaactgcgaagcccgtacgatctaggaagaaatctttacaacaaaattgtatatccagagtaattcccgaagaaatcaacaatgacaatataaataaaaataacaatatccttaccatgaatagaggaggctataactttaattccgttccttcgccaatccacatgagcaaccagcagtacaacagcagtggcccaaacttcaatggaggaagcaatgtaaacttgaattcaaataatttgatgcatcacaattcaaccactatcacccccaatttcagaaggtcttcaagacgaagtagtacttcatcaaatacctcgagttccagtaaatcttcatctagatcagtggtcccgattttaccaaaaccttctccaaatagcgctaattcacagcaattcaacatgaacatgaacctagtgaacacgacaaataacataagcgcaggaaatagtgtggcatcgtcaccaagaattatatcatcgtcgaacgtcaattcaaatagccctttacaacaaaacctgctatccaactctttccaacgtcaaggaatgaatataccgagaagaaaaatgtcacgtaatgcatctcattcctcatcgttcatggctgcatctttacaacaactgcatgaacaacagcaagtggacttgaatccaaactcaagtgcaaattcaaacagaccaaattggaatacaagcaatagtgtctctacgaattcaagatcgtcgaattttgttacccaaaagccaaatttcgatatcttcaacgctccgtcagattcaccgggtatttcaagaccgtcttcaagaaaatctcacacttcgctgttgtcacaacaattgcaaaattcagaatcaaattcattcacttcgaatcataaatacaacaataaattgttcggtagttctacatcacccatgaaatatgacgcgaattcgagtgctggcgaaaaaagtaatgaagatggttccataaagggatcctctaaagaaagttcagcgattgcagatgagttagattggttaaaatttggtatatga

SEQ ID NO: 728 - DNA, 2286 bp, Saccharomyces pastorianus
atgggtgttcctcaaatatgggagtttttaaagccatttcttcaagactctagaattccactacgaaagtttatcgttgattttaatatatcgcaaaaaagacccccgaagattgcaatcgacgcatatgggtggctgtttgaatgcggattcattcaaaatttagatacgaaatcaagatcaagatcaagatcaggaagtcctatccgttcacctcgaagaaatgatatcgaaatcaaccaagattataatggtggccgaggctatacatcgacaggaaaagctgtcataaatttggtatctagattaaaggaattactaagcttaaatgtggaattcttgcttgtatttgacggaattatgaaaccctcttttaagagaaaattcaatcaggaaccaaccgctacttgttatgatgacgagaaagagtactatttaaattgggaacaacacgtcaaaaaccacaaactttatgacaattgccaagggtcggcaacgtcactcgaacctgagtttattaaacttgtacggaaattattggacttgatgaacatttcctacgtaatggcatgtggagaaggagaagcccaatgtgtttggttacaggtttctggagcagtagatttcattttgagtaatgattcagacactttgatttttggaggagaaaaaatactaaaaaattattcgaaattttatgatgattttggtccaacgtcagtagcctctcacagtcctaataggcattatgatagtacggaaccctttgtaactgttgtagatctgcctaggattaaccaagtagctcaagggatttttgatcgattgtctctcttactttttagcgttttattaggcgctgattataatcatggaatcaaaggcttaggtaaaaacaagtcattgaaattggcacaatgtaaagatccaaattttactgtagagttttataacattttcaaggatttcaagacaaaagattcgaaattagaaagtttaagagattttcagtataaggcgtttcaagataggatatactcatattgtaaagaccattccgtcaagatttttgggagaaattattctgtattattaaaccatggttcctttgaaggttggccatcaactgttgccattatgcattattttcaccccattgtccggccatattttgatgaagcagtcctcagcaataaatatataaatatgatgggaaataagaattacaagaatctgaactttaaggaattgtcattttttttgcaaagtttaaatttgcctcaaatttctaatttcgatagatggttccatgattctatgcacgaaatgtttcttttaagagaacttttatcatacaacgagcctggtagtataggtgaaggtaacatgagaatcaccgaagaaaaaacgttgaacaccaatggtaacaaatttcagatgcaatgtttcaaaataaggtacacaacatttttgccaaacattcccatttcttctcaatctccttctaaaaggagtaattctccaagtagaagtaagagccctacacggcgtcaaatggatataatggaacatcctaatagtctctggctgcccaagcgcttgatacctgaatcccatccactggtactccaatattacgaagaacagcgcatagcattagagcagaagaataagaaggggagaaatgtaggaaaaaagagtcagaaattacaaaagaacaatttagacgattttcttagaaagcatgcatcaccgattaaaaatatccaaaaagtagatgaatcgatgaagcaaaccttgaagcccgtgaagaagcgccttttcgtggacacagacgaggacacaagcttggaagaaatatcccccatcatagaattgcccaccaggcataatgatagcgatgatggcgatgattctttgattttcgttcaagaggttacaaacaaccaatcagtgcttgataactcgcctggcaagaggttccgggatcttgctcaaaataaaatgattgacaccaaggacgatgaaacagaagaatcacctttgaagaaatcaagagctggcattggtgagataaaactgccatcacctgacccaaagccatacctgacttctactggcaatattcatttgcaaagaacaaagatacaacctccaaagttggccaatctacgactagagagagagcatttctcagtgcttgaccagcttgtcacagacgcacaagatactgtcgaccggttccttgtagcctatgacagcgccagtagcagtagcgtagaataa

SEQ ID NO: 729 - DNA, 555 bp, Saccharomyces pastorianus
atgtcatcgctcatctctaaaacaattaagtacgatccaaaaaaggataagctaatcacattagcatgtgggtgtttttggggtacggagcatatgttcaggaagtacttaaatgatcgcatagtggattgcaaagtaggctacgcaaatggtgcagaatccaaaaaggattctgctcacggtgtatcttacaagatggtttgcgggggtgacaccgattttgccgaagttctacaagtatcctataatccaaaaatcgtaactttgaaagagctaacagatttctttttcagaattcatgaccccaccacatcgaattcacaaggacctgatcaaggaacgcagtatcgcagcggattatttgctcattcagatgctgatttgaaagagctaactcaaatcaaagcagaatggcaaccaaaatggggtaataagattgctaccctggtcgaacccatcaaaaatttttatgacgctgaagagtaccaccagttatacttggataagaatcctcaaggttatgcgtgccctactcactatttgagagatatttag

SEQ ID NO: 730 - DNA, 1350 bp, Saccharomyces pastorianus
atgtctgctccagctcaaaactacaaaatcgctgatatctctctagctgccttcggtagaaaggaaatcgaattggctgaacatgaaatgccaggtttgatggccatcagaaaggcctacggtagcgtccaacctttgaagggtgcccgtgttgccggttgtttgcacatgaccattcaaactgctgttttgatcgaaactttagttgctctaggtgctgaagttacctggtcttcttgtaacatctactctactcaagaccatgctgctgctgccattgccgcttccggtgttccagtcttcgcatggaagggtgaaaccgaagaagaatacttgtggtgtattgaacaacaattatttgccttcaaggacaacaagaaattgaacttgatcttggatgacggtggtgatttgaccactttagtccatgaaaaatacccagacatgttggatgactgtttcggtctttccgaagaaaccactactggtgttcaccacttatacagaatggtcaaggaaggtaagttaaaggtcccagccattaatgtcaacgactccgtcaccaagtccaagttcgacaacttgtacggctgtagagaatctttgatcgatggtatcaagagagccaccgatgtcatgttggctggtaaggttgccgtcgttgccggttacggtgatgttggtaagggttgtgctgctgctttgagaggaatgggtgcccgtgttttggttactgaaatcgatccaatcaatgctttacaagccgctatggaaggttaccaagtcatcaccatggaagatgcttctcatattggtcaagtctttgtcaccaccactggttgcagagacattatcaatggtgaacacttcatcaacatgccagaagatgctattgtctgtaacatcggtcatttcgatatcgaaattgatgtcgcttggttgaaggctaacgctaaggaatgtatcaacattaaaccacaagtcgaccgttacttgttggcctctggtagacacgtcatcttgttggctaacggtagattggttaacttgggttgtgctactggtcactcctctttcgtcatgtcttgttctttctctaaccaagttttggctcaaattgctttgttcaagtctaacgacaagtccttcagagaaaagcacattgaattccaaaagaccggtccattcggagttggtgttcatgtcctaccaaagattttggatgaagccgttgctaaattccacttgggtaacttgggtgtcaaattgaccaagttgagtgatgtccaatcagaatacttaggtatcccagaagaaggtccattcaaggccgaccactacagatactga

SEQ ID NO: 731 - DNA, 447 bp, Saccharomyces pastorianus
atgttcaacctccaagacgtaataaccacaacaaagaccaccttggcatcaatgccaaacggttacttaccaaaatggttactgttcatttccatcgtatccgtctttaattcagtccagacttacatttctgggttagaattgacacgtagagtctacgagagaaagcctaccgaaacaacacacttaagtgcaagaacattcggtacttggaccttcgtcgcctgtattatcagattctatggtgctttgtacttgaatgaaccacacattttcgagctggtcttcatgtcttatgtcgttgctcttttccatttcggttccgaactgttgattttcagaacctgtaagttaggaaagggattcatgggcccattgattgtttcaaccacatctttggtatggatgtacaagcaaagacaattctacaccggtgttgcatggtaa

SEQ ID NO: 732 - DNA, 432 bp, Saccharomyces pastorianus
atgtccaagaataatttcttgaaagacgtttccgccttaccagacgacgtacttatagaaaatgaaagaggcataacgttgcttggctacccagtgttttcccccaagatcctggtgccaccgtttgacccgcctcagtttcaaagactaaacacggaaaacggctcgctaattcccctgtcaaaaaacaccatatctaatttcaccgaactgtaccctattgatctggccaccgagcgcgttgcaggcaatggcaattcacagcagacaaaatggtttgttctgatggatttcgatgaaagatatgacagcgatgatcaaggttggtgctacagctggaactttaacaattccaggtggaaatctaaaaatgggttggttagaagaagagtctgggtgagaatatccgctgccagtcattcactagactaa

SEQ ID NO: 733 - DNA, 2706 bp, Saccharomyces pastorianus
atggagtcacaaagaggccaccacattctaacgcgactaacgaaaatacgcaaaagacctcagcaacctttaactgacttcaccgaactttatagtagaatcgctaatgaaacaatatattttttgaacttagaagagaaaaagcgatataaagacgcactacaaggctggaaggccttgacaactgacgtgcttttcaaactgacattgatagaacataactatccgagtatccaaacgtacacgaaggatgagctcagtctacaaaatgggattagagaattgtatcataagagtgttatgcatctagaaagagtccaaaagttggttcgggaagaacctgtcaggaaagacgtaccgtcttccaaaacacagaacacacatcgtagttcctccttcacaagaaccacagaaccaccctctgcctttcatatggttcctggaagaatgatgaagacattgcgagataggagtgcatacggctacaaaaaggcatactctaacccatcattaccagcccataataacaatatatctccgaaacccgtagaagaaacggagagtgttagagtaaattttgtgccttccaagcccttatcgaataccgctaccaaacaatataaaaaagccgtcgagcaccacgatcgcccactcaagaaagaaacgggagtatactcagagaaatatgcatcagagccaatactaatagatttaaccaatgacgaggatgacgaggatgactatgaggctggaatagaggagcacagcgtatttgatgaagaagagagcgaagagtttgaattcgatgtctcggattattatgacaattactccgagattgatgaagaagaacaacgacaacgcatagaaaccctaaggagtttggatggaatccaacaaccaatgtccgacttatctgtcacctcttccctatctagtaacaagagtacggaatcgtcaggtcatgttcccgaatcctccttacggtctttaccaaatacggctcccgcactgcctttgttgcccccacctcctccatcaagcactaacagggcatctagcacgggtacgataaaggagtataatttagaatcttatggcactatgaatccgtcaaagactaagcattcccaaatctcaaaattgatgaaaactagtaatgcaacatctctgaagagtactaaatcaaccccaactcttatcgctaaatcaacgccaacttgtgtcgcaaaatccaaaaataactcaacgtccaccgcaaaatccgccacatcatctcccacttcttctttgacagcttcgaaaccaacacttcaaaaacccagaacggcagcaatggctgccaagaaagtattaggcaacagaaaagttgtgaataatttgacaaacaacaccgtgaaaaagactcgtcccgttctgaaatcaaagaccactaagtcttcggtttccagtttgaagaaaaccagcattcatccatctagacccgcgattaatccgaaagcgtcttcgcagagcacgtcttcaaataagaagctaatgaaaacttcaaacgcatccgtcaataaagtgaatcgacaagtatcagcaccaaaaaagacagaatcatctaaagtagatcccgctaaagcagattccactaagtcagaattgaccactggaaacgcaactcccttgaccgaggggaacgaagattcagaagtagacaaaaaggctcttagagaaattctggaagatgaaattattgacagcttgcaaggtgtagataaacaagccgcgaagcaaatttttgctgaaattgtggtccatggagatgaagtccattgggacgatattgcgggattagaaagcgccaagtactctctaaaagaagcggttgtctatccatttttgagacccgatttgttcagagggctacgtgaaccagtcagggggatgcttttatttggtccacccggtacaggtaaaacgatgctggcaagagctgtagccacggaatctcgctccacctttttttcaattagcgcttccagtttgacatccaagtatttaggtgaaagtgaaaaactagtaagagcattgtttgctattgctaagaaactatcgccctctattgtatttgtggacgaaatcgattctatcatgggtagcagaaataacgaaaacgaaaatgagtcgagtcgtaggatcaaaaacgagtttcttgttcagtggtcatcattatcgagtgcagcagctggttcaaacaagaatgagggcactggctccaataacaataacgacgaagatgatacaagggtcctggtacttgccgcgacaaacttgccatggtcaattgacgaagcagcaagaagaagatttgtaagaagacaatatattccgttgccagaggaccagacgagatacgtccaattgaagaagctgctgtcatatcaaaagcacacgcttactgacttagattttgacgaattggtaaagatcactgaggggttttcaggaagcgatataacatctttagctaaggatgcagctatgggcccactgcgagatcttggggataaattattggagacagatagagatatgataagacctataggtctggtggacttcaagagcagtttgcagtatatcaagccgtccgtgtcccaggatgggttggtgaagtatgaagaatgggcttcacagtttgggtcgtctggatcgtga

SEQ ID NO: 734 - DNA, 1176 bp, Saccharomyces pastorianus
atggtaaaggaaacagagtattatgatattttaggtatcaaacctgaggctacagctacagaaattaaaaaggcctaccgtaggaaggccatggaaacgcatccggataagcatccagacgatccggatgctcaggcgaagttccaagcggtgggtgaagcataccaagtcttgagtgatcaagggctccgctccaagtacgacgaattcggtaaggaggatgcagttccacagcaagggtttgaggatgcttctgaatacttcactgcgatattcgggggtgatggttttaaagattggattggggaattctctttatttaaggagctgggcgaggccacagaaatgtttgagaaggaaggcgaggagggcactgctgctactgataccgacaagggaggtgagacctccgatagtggtatgattagacacgatggcaatagggctgaacacctaaggaaggatagactatccagagagcaaagaaagaaacttttggaaatggaaaagaaaagacgtgaagatatgatgaagcaagtcgatgaattagctgagaaactgaacgaaaaaattaccaggtatttaatcgccgtcaaggctaacaacttggaggaatttacaaggaaactggatcaagaaattgaggagttgaaactagaaagttttggtttagagttgttgtacttgttggccagggtttacaagaccaaggcaaataattttatcatgtccaagaagacttacgggttttccaagcttttcacaggtactcgagacaatgctagatctgtcaaatcagcatacaatttgttatcaacaggactggaagcccaaaaagccatggaaaagatgaacgaagttaatccggatgagcttgaccaatacgaacgtgccaaatttgaatccacactggccggtaaggctctaggtgtcatgtgggccatgtccaaattcgaacttgaaagaaaactaaaagacgtttgtaatcaaatcctaaatgatagaagagtgtcttctaaggagcgtctcgcaaaggcaaaggcaatgctattcatcgctaacaagtttgccggcgccagaagatcaccagaggaagccgaggaagccagggtgtttgaagagttgattcttggtgaacaagagaaggaacacaagaaacacagtgtgatcagatga

SEQ ID NO: 735 - DNA, 285 bp, Saccharomyces pastorianus
atgcctggcgttacagctccaacaagaggacaagtgttgtcgttatacaaacaatttatcaagaattccaaccagttcaataattacaactttagacagtactttcttagaagaacaagggacactttcagggaaaatgtgaaccaaaaagatccgaaagtgctaatgaatctattcaaggacgcgaagaacgaattgggtgtcttgaaaagacagtcagtcatttcccaaatgtataccttcgatagactggttgtggaaccgttgaaaggaaggaaacactaa

SEQ ID NO: 736 - DNA, 1932 bp, Saccharomyces pastorianus
atgaagagaaagaacgctgaaggtaaaggatcgaacgagaaggataacaagcaaatttcacttgaagaagataaaattaagggtttgtttaattcaaaaatctgggacaaatccttccaagatggcttaaaaaaggaaattgaagacgcccaaccatacaactggggtaccatccatgagttagtcaacgatgaccttctacgtgcggtccgtaaagagatcgaaactgagattcatttcactaagaaggaaactgacatttatagagtcaaccagagtggtgacttggctaacttgtccggtttggactggaacgacttgtcacgtttgccaaatttgtttaagctacgtcaaatcttatactccaagcaatatagagattttttcggttacgttaccaaagctggtaagttatctggttctaagaccgacatgagtgttaacacttacacaaagggttgtcacctgttaacccacgacgatgtcattggttctagaagaatcagtttcattttgtatttaccagatcctgatagaaaatggaaatctcactatggaggtggcttaagacttttccccagtattttaccaaacgttcctcattctgatccatctgccaagctagtcccacaattcaaccaaattgctttcttcaaggtcttgccaggtttctccttccacgatgtcgaagaagtcagagtcgacaagcacagattgtctatccaaggttggtaccatattccacaagtcggtgaagaagggcacatcccgggtgaagaagaagcatgggtacgtaataacacctccactttggcacaaatcgaatccaatgtcttggaagattttgagtttccaaaggatgaaagagatatcttgccattccatgaagttaagcattttgaaaaaatgttgaagagcgatgctgcaaacgaaaacaatactcctaaggaagctatgaccagtataatttctgattctctccagttatctgaaactgaattcacctatctatcccagtatatttctcctgaacacttgaacccagaaggcattgaaaaactacaaaagaagtttgttgagaattcttctttacaaatcgaggcttttctgaacgatagcaaatctgaattattgaagaaagttatcaaacaaaaggaaatggagcaagaatgcccttaccattcaaaggacgtgaagacgccgtggaagacggctattcctccacacaaagcccgttatctgtacattgatggtaaggaataccgtaatttccaaacagaagcagacatttttaaggcgttaaacaacgatgatttggcaaacttccaattcaccaaggataccatcaaggtaattgccgatgcttctggtaacagtaaggaaagcaactttgatgctgagctagcgttgattgacttggccatcttccacaagagcaccattttcaagaagtatttagccttgctgacttctttgtgcccagtcagtgaacaagtcctcatcagaagattcagacctggtatggatttcacattagccaccaagtgccgtttcaatgaacttttgaagggtaatccagatatcttggatgctgttttggaaggtactttatgtttgaccccttctcctggttgggaatcaggagaacttggcggttatgaattgtacatgatggatgatgatgaagataataagcaatacctaaaggaggacgttgaagatgcttcagtgtatcgtgcagatgacagtggtgactctgttctgattaacgatccacctgcttggaacactttcaacttggtcctgagagatgaaagtgttttggaatttgttaagtacgttagctggagtgccaaatctagtagatgggatgtgaaaatgaaatgggatgtcaaagcctgtgatgaagatgaagaaaatgaagaagcctaa

SEQ ID NO: 737 - DNA, 903 bp, Saccharomyces pastorianus
atggagtctcctaaacaaccacgtaaaatcgaattatatacaaaagagttttattccacatgtactttaggtggtataattgcatgtggtccaacacattcttcgatcaccccactagatcttgtaaaatgtagattgcaggtcaaccctaagctgtatacctctaatttggatgggtttcgtaaaatcgttgccactgaaggctggaaaaaagtgtacactggggtcggtgccacatttatcggttattccttacaaggtgcaggtaagtacggtggttatgagtacttcaagcatttatattccggctggttaactccaggcgttactgtgtacttaatggcctcagcgaccgctgagttccttgctgacataatgctgtgtccatttgaagctataaaggtcaaacagcaaacctcaatgccccccttctgcaacaatgtaattgatggttggaagaaaatgtatgcggaaagtgggggtatgaaatcgttctacaagggtattgttcctctatggtgcagacagatcccatacacgatgtgtaagtttacttcttttgaaaaaatagtccaaaaaatatacagtgttttaccaaaaaagaaagaagaaatgagcccattggagcagatatctgtcagttttgtaggtggctatttggccggtatattatgtgctgccatttcgcatccagcagatgttatggtttctaaaataaatagcgaaagaaagggtaatgaatccatgtctgtcgcctcaaagagaatatatcaaaagattggatttgccggactatggaacgggttgatggtgagaattgtaatgatcggtaccttgacaagtttccaatggctaatttacgattccttcaaggcttacgtgggcttaccaactaccggttag

SEQ ID NO: 738 - DNA, 114 bp, Saccharomyces pastorianus
atgcaagatctagaagtattcttaagtatttttgccttcaccttcgtcttctactttggtgctcatagaacagtcatgaagagaaataagagcgatgtgccatacttgcaatga

SEQ ID NO: 739 - DNA, 894 bp, Saccharomyces pastorianus
atggatttggtaaatcatctgaacgatagactgctgtttgcaatcccaaagaagggtcgtttatactctaaatgtgtttcaattttaaatggtgcagacattaacttccaccgttcccaaagattagacattgcattgtgcacaagtctacctatagcgttaatctttttgcctgccgcagatattccaactttcgttggtgaaggtaaatgtgatctcggtataaccggtgtcgatcaagtacgtgaatctgatgtcgacgtggacctaccgatcgatttgcagttcggtaaatgcaaattacaagtacaagtcccagtaaacggtgagtacaaaaagccagaacaactgattggtaagaccattgttaccagttttgtcagacttgctgaaaaatacttcgcagaattggaaggaaccagcgtagaaaaaatgtcgacgaaaataaaatacgttggtggttctgtagaggcatcatgcgcgctgggaatcggtgacgctattgtggatcttgtagaaagtggggaaacaatgagagctgctggtttgatcgacatcgctactgtattgggcacaagcgcctacctaatagaatcaaaaaacccaaagagtgacaaaagtttgatcgccaccatcaagtcaagaatcgaaggtgttatgaccgctcaaaagtttgtttcgtgtatctacaacgctcccgagacgaagctcggagaactcttaaaagttacgcccggccgtagagcaccaaccatctccaaaattggtgacgaaggttgggtcgctgtcagttctatgatcgagagatcaacaaagggtgttgttttagacgaactgaaaagaatcggcgccacagatattatggtcttcgagatttctaattgtcgtgtataa

SEQ ID NO: 740 - DNA, 390 bp, Saccharomyces pastorianus
atgaccaccaagttaactccagtcttttgtgaatccgctccagctgctgctgcttcatactcccatgctatgaaggcaaacaacttgatttacacttctggccaaatcccaatgacttccgacaacaagctggttgaaggatccatagctgataaagcagaacaggttattcaaaacatcaaagacgttttggaagcaagcaattcttctttagatagaatcatcaaggttaacattttcttggctgacattaaaaactttgctgaatttaacactgtttacgcaaagtatttcaccacccataagcctgctagatcatgtgtcgctgttgctgctttgccattaggcgttgatatggaagtcgaagtcgttgctgctgaaagagattaa

SEQ ID NO: 741 - DNA, 1278 bp, Saccharomyces pastorianus
atgtctgtcacaggtgattcttcgtcgtcaactaacgcaagcaacagtccgaagtctacatactcaatacagtcagatgataaagcaagtctcgtaggcaccagaaatgatgaaacgcgttcagacgatccacaacaagacaataataggcgtgatattgtggtcataacaagggtagcctctgatgaaactctagaatcgcaatcatctacttcatcgatgggaattagaccagacccgtcttttagctcagaagatattcctccccaggccagagctgaactgaataaccgagtgcgtgccttaagtatgaacaacattaataaataccatccagtacgattctcaaagagtagcgaaaggcgatgcaaaaacgacgaagcaagtgaagcgagcagtttgaatgataaagcacaaagtggacctacggttcaattatcgacccaagaagacagagtgcttgagggcgacaagagcaatccacaagcaactccctctctgaatatagcagaattccctactgataagcttcttaaaatgctgaccgcattgctgactaaaataatcaagtccaatgatagaactgcagccgctaatccaagtttaacacaagagattgaaaatgggaagtctcctactctaactgataacgagaagaaatatttgagtcctgttttggggttccgaggaaagcacgtgccacagattggccttgatcagtactttcagagaattcagaagtattgtcccactacaaatgatgtatttttatcactgcttgtctatttcgatagaatctccaagagatgcaatagtgctactacaacgcccaaaaccgatgccgtaaaatatggaccaagttcagacaaaaactccttaagtaaggctaataaggacgatgacaaaatgtccgcatgtaacagtaacgaaaataatgaaaataatgagtcagatgatgaaaatatggatgttgaaaaaaactccaagccacatccccagatgttcgttatggattcccataatatccatcgactaatcatagctggtattaccgtcagtacgaaattcctgagcgattttttctacagtaattcaagatattctagggtcggaggcatatcgttacaagagctcaaccatttagagctgcagtttctggttttatgcgattttgaactgttgatttcagtcaatgaattgcagaggtacgcggatttactatacagattttggaacaacgcgaagacccaatcacaagcgctagtaacgagtgtctag

SEQ ID NO: 742 - DNA, 1632 bp, Saccharomyces pastorianus
atgcctcaaacatcagacgtgtccgtgattgaaacacaagatgtgggacgcgagctcaaagatctagaatctggagctcgtgattccaagacatctttatttaatgtatactatgagcatacagaatcgcggggaaccgatgagttggtcacggctgaactaaaatcgcccggaacacacgaactagtcaagagtaaaccgtcttttttcaatagaatggcctctgctttaaacgccgagacaaagggtattgaaccaattacggaagatgagaaaaccgatgattccatacttaatgcagcaactatatggttttcaagtaatatggttattgtagcatactccgtaggtgccttgggtcctatggtgtttggtctaaatttcggtcagagtgttttggttattgtttttttcaatattttaggtttgatgcctgttgcattattttctctatttggtgtagaactaggactaaggcagatgattttgtccaggtatctcgtcggtaatatcacggcaagatttttttcttttgttaatgttattgcttgtgttggttggtgtgttttgaacatttctgtttccgctcaactgttaaacatggtgaatgaaggctctggtcatgtctgtcctctttgggccggttgtttgatcgttgctggtggtactgttcttgtgacattcttcggttacagtgtcatccatgcttatgaaaaatggtcatggatacctaattttgcagcctttttagtcattattgcacaactatccaggtctggaaactttacaggtggtaaatgggtaggaggtgcaactactgcaggtggtgttctatcttttggttcatccgttttcgggtctgcagcgggttgggcaacttatgcagcagattatactgtgtacatgccaaagaacacaagtaaatacaagattttcttttccgtagttgcgggtcttgcgtttcctctatttttcactatgatacttggtgctgcctccggtatggcggcccttaatgacccaacctggaaggcatactatgaaaaaaacgccatgggtggtgtgatctatgccatcttggttcccaactctctacacgggtttggtcagttctgttgtgttctattggcactttccaccattgctaataatgttcctggcatgtatactgttgctttatctgcccaagctttgtgggcacctttggctaaaataccgagagttgtctggaccatggctggtaatgccgcaacgttgggtatctctatacctgccacctattactttgatgggttcatggaaaacttcatggactccatcggttattacttggctatctacatcgccattgcctgctccgagcatttcatttacaggcgttcgtttagcgcttacaatgtcgatgactgggacaactgggctgctctacctattggtattgcaggcactgctgccttaatcgtcggtgccttcggtgttgccttgggtatgtctcaaacctactgggttggtgagattggccgtttgattggtgagcatggtggtgatattggtttcgaattaggtgcaagttgggcatttattatttacaacatcgcaagacctctagaaatcaaatacttcggccgttaa

SEQ ID NO: 743 - DNA, 753 bp, Saccharomyces pastorianus
atgggattgactactaaaccgctatctttgaacgttaacgccgctttgttcgatgtcgacggtaccataattatctcccaaccagctattgctgctttctggagagattttggtaaagataagccttacttcgatgccgagcacgtcatcgaagtctcacatggttggagaacttatgacgctatcgccaagtttgctcctgattttgccaacgaagattacgttaacaagctggaaggtgaaattccagtaaaatatggtgaaaaatccattgaagttccaggtgctgtgaagttgtgcaatgccttgaacgctttaccaaaagaaaaatgggctgtggccacttctggtacccgtgatatggcccaaaagtggttcgaacatttggggattaagagaccaaaatacttcatcacagctaatgacgttaaacaaggtaaacctttccctgaaccatatttgaaaggtagaaatggtctagggtacccaatcaacgaacgcgatccttccaaatccaaggtagttgtctttgaagacgccccagctggtattgctgccggtaaggctgctggttgtaagatcatcggtattgctactactttcgatttggatttcttaaaggaaaagggctgtgatatcattgtcaagaaccacgaatctattagggttggcggttataacgccgaaacggatgaagttgaattcatctttgatgactacctatatgctaaggacgatttattaaagtggtaa

SEQ ID NO: 744 - DNA, 639 bp, Saccharomyces pastorianus
atggcagactattcttctctaactgttgttcaattaaaggatttactgactaaaagaaacctgtctgtgggtgggttgaaaaatgaattggtccaaagactaataaaggacgatgaagaatcaaagggggataatggcgaacctaaccaagagaaagaacaacaattagagtctgtggctaaagaagaaccagcccctaaagatgctattgaaacagaagctccggccgaaactaaagacgttgctactaaagatgaaactaaggaagcccagataacctccgatgatgtttcccctactgctcaaaaacccaaagaaccagctgccgccccggttctatcaccagaagaaattaaggccaacgccttagatctactgaataagaaaatgcatcgtgctaacaaattcggtcaagaccaggcagacatcgactctataaagagacagataaaccgggtagaaaaattcggtgttgatttgaatagtaagttggctgaggaattaggccttgtcactaggaaaaaaaatcctggaagtagcgacagcagtagacccaaaaatagaagcaaaggttcgaacaaccgttctagagtcagtaagagcagaaaaggtaacaaccgctctaatttcagaaggtaa

SEQ ID NO: 745 - DNA, 1671 bp, Saccharomyces pastorianus
atgcctatcccagttggaaataagaatgattttgcagctttacaagcaaagttagatgcagacgctgccgaaattgaagaatggtggtctgactcacgttggagtaagacaaagagaggttactcaggtaaagacattgctgccagacgtggtacattcccaccagtcgaatatccatcttcggttatgtctagaaagttattcaaggtattggaacaacaccacagtaaaggcacagtttccaagacttttggagcccttgaccctgtccagattactcaaatggctaagtatttagacactatctacatttctggttggcaatgttcttcgactgcatccacttcaaacgaacctggtccggatttagccgattatccaatggacaccgttccaaataaagtggagcatttgttcaaagctcaattgtttcacgacagaaaacaactagaagctcgtgccaaagcaaaatctcaacaagaactagacgaaatgggagcaccaactgattacttgacaccaattgtagccgacgctgatgccggtcatggcggtttgactgcagtttttaagctaactaagatgtttattgaacgtggtgctgcaggaattcatatggaagatcagacctccacgaacaagaaatgtggtcacatggcaggaaggtgtgttattccagtccaagaacacgtcaacagattggtgactatcagaatgtgtgctgatatcatgcgttcagatttagtcattgttgccaggactgactcagaggccgctactttgatcagctcaacaatcgatacaagagaccattactttattgtcggttccaccaatcccaacatagaaccatttgctgaagtgttgaatggtgcaattatgaatggtgcttctgggaaggaattagccgacattgaacaaaaatggtgcagagacgctggtctaaaattgtttcatgaagccgttatcgatgaaatcgaaagatcaggattgtcaaataagcaagaatcaatcaaaaaattcacttctaaagtgggcccactaaccgaaacatcccacagagaagccagaaagctcgccaaggaaattttaggtcgtgacattttctttgattgggaactaccacgtgtaagggaaggtttataccgttacagaggtggtactcaatgttctgtcatgagagctcgtgcatttgctccatacgcggacttggtatggatggaatctaactacccagacttccaacaggctaaggaattctctgaaggtgttaaagaaaagtttcctgaccaatggctcgcttacaacttatctccttcgttcaactggccaaaggccatgtctgttgacgagcaacacactttcattcagagactaggagatttgggctacatctggcaatttatcactctagccggtttacataccaatgcgttagcaatccacaacttcgctcgtgattttgccaaggacggtatgaaagcgtatgcccagaacgttcaacaaaaggaaatggatgatggtgtcgacgtgttgatgcaccaaaagtggtcgggagcagaatacatcgatggcttgttgaaattggcacaaggcggtgttagtgcgacagccgcaatgggcactggtgtcactgaagaccaatttaaagaaaacggagtaaagaagtag

SEQ ID NO: 746 - DNA, 486 bp, Saccharomyces pastorianus
atgacgaaaaaggataaaaagacagtaaaggtacagaccgttactactgaggacggtgaatctgtgaagctatttgaagacttgcaaggcttcgagaatttcattgccaacgaaaccgaagatgacgattttgaccacttacattgtaagctgaattactatccaccatttgttctacacgagtcacatgaagatcctgaaaagatcagcgactctgcaaactctcattccaaaaagtttgtgcgtcacttgcatcagcatatcgaaaagcatcttttaaaagatatcaaagaggctgttaggaagccagaactgaaattccatgagaaatcaaaggacgaaacttttgataaaatcgtgtggcactatggtgaggaaaccgagtatcatggtaggccattcaagatagacgttcaagtagtgtgtacacatgacgatgccatggtgtttgtcgactacaaaacacaccctgtggctacacattaa

SEQ ID NO: 747 - DNA, 2667 bp, Saccharomyces pastorianus
atgtacgtttataaaagagacggtcacaaagaacctgtccaattcgataagatcactgcccgtatatcacgcttatgttatggtctagatccgaaacatgttgacgccgttaaggttacacaacgtattatttctggtgtctatgaaggtgttacaacgatcgagctagacaatttggccgctgagacatgtgcttacatgaccactgttcacccagattacgctactttggctgctagaatcgccatttctaatttacataaacaaaccacgaaacagttttctaaagttgttgaggatctttatagatacgtcaaccctgctactggcaaagccgctcctatgatttccgacgatgtttacaatattgtcatggaaaacaaggataaactaaactcagctattgtctatgacagagactttcagtatagttacttcggtttcaaaactttggaacgttcttacttattgagaatcaacggtcaagttgctgaacgtccacagcacttaatcatgagagtcgccctaggtattcacggtgaaaacattgaggccgctttagaaacctataacttaatgtctctaaaatactttactcatgcctctccaactttattcaacgctggtactccaaagcctcaaatgtcctcctgtttcttagttgcaatgaaggatgattccattgaaggtatttacgatactttgaaggaatgtgctttgatttctaaaactgctggaggtattggtctacatatccacaacattcgtgcaaccggctcttacattgctggtacaaacgggacttctaacgggttaattcctatgatccgtgtcttcaacaatactgcccgttatgttgaccaaggtggtaacaagagacctggtgcctttgctctatatttggagccatggcacgctgatatcttcgacttcatcgacattagaaagaatcacggtaaggaagaaatccgtgcgagagatttattccctgctctatgggttccagatcttttcatgaagcgtgtcgaagaaaacggcacttggactttattctctcctacatctgccccaggcttgagtgactgttacggtgatgaattcgaagccctatatacccgttacgaaaaagaaggtcgtggtaagactatcaaggcccaaaaattatggtactctatcttggaagcacaaacggaaactggtacaccatttgttgtttacaaggatgcttgtaacaggaaatccaaccaaaagaacttgggtgttatcaagtcatctaatttgtgctgtgaaattgttgaatactctgctccagatgagactgctgtttgtaacttggcttctgttgctttgccagcatttattgaaacatctgaagacggcaaaacttctacatacaacttcaaaaagctacatgaaatttctaaagttattactcgtaacttaaacaacgttattgaccgtaactattatcctgtcgaggaagcaagaagatctaatatgagacataggccgattgctttgggtgtccaaggtttggctgacactttcatgttgttgcgtttgccattcgactcagaagaagcacgcttactaaatattcaaatcttcgaaactatctaccatgcctccatggaagcttcttgtgaattagctcaaagagatggcccatacgaaacctttaaaggctccccggcttctcaaggtatacttcaattcgacatgtgggaccaaaaaccatacggtatgtgggattgggacactctgagaaataacatcatggagcatggtattagaaactctttgaccatggcacctatgcctactgcatccacatctcagatcttaggttacaacgagtgtttcgaaccagttacttccaacatgtattctcgtcgtgtcctatctggtgaatttcaagtcgtcaatccatacttgttgcgtgatttggtcgatttgggtatttgggatgatggtatgaagcaatatctaatcacacaaaatggttccattcaaggtttaccaaatgtgccacaagaattgaaagatttgtataaaactgtttgggaaatttcacaaaagacaatcattaacatggcagccgaccgtgccatttacatcgaccaatctcactctttgaatttattcttgcgtgccccaactatgggtaagctaacaagtatgcatttctacggctggaagaagggtctaaagaccggtatgtattatttgagaacacaagccgcttctgctgctattcaattcaccatcgaccaaaaggttgctgatcaagctaccgagaatatcgccgatatctctaacttgaagcgtccaatatacatggcttcaagtgcaagttacgctgccagcgattttgtgcctgcagccgccgctgcaaacgttaccattccatctctagatagctcttcagaagtttcaagagatgcatctccagctccagtaggcaatgactcgttggctaaaggcatctctgaattgaaggttcaagaacctagagtggaagttcccgagatacccacaccagtaaagaatgaggaaaaagctgctcccgttgcgggcgaaaaagaaagtgaatttgacatttacaactctaaagttatagcatgtgccattgataacccagaagcttgtgaaatgtgttcaggttaa

SEQ ID NO: 748 - DNA, 381 bp, Saccharomyces pastorianus
atgaacaccgaaattgagatccatgatggaaggagtgataactctcctctgccccaagaaaagctaatttcgttcattcaagaaagtcatgatagcataagggatgataatgagaccgatctttcgaccaagtcattttcgaaccctttgataaaatcggtcctggagaaattggaaaagcattcttccttatacaagtacatagtctcagtaactacgttggacttaaaagaacccactgaggggggctctaatttttcattcaagaatgatataggcgcatcatggcagtcaaagaaagatgggatatttaattataaattagaggatgtagacagcaagaagtgttacttgattacgattctctggctacacaaatag

SEQ ID NO: 749 - DNA, 390 bp, Saccharomyces pastorianus
atgtcttcagcaccattattgcagagaacacctggaaagaagattgctttacccacaagagtggaacctaaagtcttctttgccaatgaacgtacctttttgtcatggttaaacttcacagtgatgctgggtgggcttggtgtaggtttactgaatttcggtgataaaataggtagggtcagtgctggattatttacatttgttgccatgggcacaatgatatacgcacttgtgacataccattggagagccgccgcaatcagacgtagaggttcaggtccttacgacgacagattggggcctactttgttatgctttttcctactagtcgctgtcattattaactttatattaagattgaagtacaatgatgccaaagttaaattatga

SEQ ID NO: 750 - DNA, 1563 bp, Saccharomyces pastorianus
atgttttcccgtacaagaaccacagctttgaaatccaactcatttgcaagaaatttgttgcgtctttattcgcaggcgccattgcgtgttccaatcaccttaccaaatggtcttacgtatgaacaaccaactggtttattcatcaatggtgaatttgttgcttctaagcaaaagaagacgtttgatgtgattaacccatctaccgaagagaaaatcaccaccgtctgcaaggctatggaggacgacgtcgacactgccgtcgcagctgccaagaaggcttttgagaccaagtggtctattgccgaacctgaggaccgtgccagggccttattcaatctggctgacttggttgaaaaaaaccaagagacattggctgcgattgaatcaatggataatggtaagtcactattctgctctcgtggtgacgttgctttagtgtcgaagtatttgcgttcctgtggtggctgggctgacaagctaaatggtaacgttatcgatacaggtaaagaccatttcacttactcaattaaagaaccattgggtgtttgtgggcaaattatcccttggaatttcccattgttgatgtggtcatggaaaatcggccctgctttggctactggtaatactgtcgtattgaaacctgccgaaacaactccattatcagccctttttgcttcgcagctttgtcaggaagctggtatccccgcaggtgtggtgaatatactgccaggctccggtagagttgttggtgaaaggttgagtgcacacccagatgtgaagaagattgccttcactggctccactgccaccggtcgccatataatgaaggtggccgctgatactgtcaaaaaagtcactttggaactaggaggtaaatcaccaaatatcgtgtttgctgacgccgatttggataaagctgttaagaatattgcatttggtatatttttcaactccggtgaagtctgctgtgcaggttctagaatttacattcaagatacagtgtacgaggaagtcttaaaaaaattgaaagaatacaccgagacattaaaagttggtgatccattcaatgagaaagttttccaaggtgcccaaacatctgacaaacaactacacaagattctggattacgtcaatgtggcaaaatcagagggagctcgtcttgttactgggggagaaaggtatggcgataagggctactttgtcaagccaacgatttttgctgacgtcaaagaggatatgagaattgttaaggaggaagtatttggccctatcgtaaccgtttccaagttctctactgttgatgaagtcattgctatggcaaatgattctcaatacgggctagctgccggtattcacacaaacgatattaacaaggctatcaatgtatctaatagagtaaaggctggtacagtttgggtaaatacttataacaacttccaccaaaatgttccatttggtggatttggccagtcaggtattgggcgtgaaatgggtgacgctgctttgagtaattacactcaagtgaaatctgtcagaattgccattgacaagccaattcgttga

SEQ ID NO: 751 - DNA, 1533 bp, Saccharomyces pastorianus
atgctacaaagaatttatttatcacggtatacagtaccttcttgcaggaggcacttttcgaagttgatgtcctcgttggaacaacaaaagagtaaaacatttaccgacagggttagaaaccctatagaggcgggccaatcattgcacgaaacaagaccattcctcatcaagccaggcgagttgacacctggtatttcagcattggaatactatgaaagaagaatcaggctagcggaaatattgccatccaaaagttgcgtcattctagccggtaacgatgtccagtttgcatcgggggctgttttttatccttttcaacaaaataatgacctgttctatcttagtgggtggaacgaacctaattcagttatgattttggaaaaaccaacagacaatttgagtgatactgttttccacatgttggtcccatcaaaggatgcgtttgctgaaaagtgggaaggatttagatctggggttaatggtgttcaggaaatctttaatgcggatgaatctgccgcaattgatgatctgtctaaatacctgcccaaaataattaataggaacgactttatctattttgatatgctgtcagctcctaattcaagttcttcgagttttaagcacattcaaagtttactgaatggtgggaatggtaaccgatcaattaactccatagcaaacaagactatcaaacccattagtaaaaaaattgcagaattccgtaagattaaatcccctcaagaattgaggatcatgagaagagccggccaaatatcaggaagatcgtttaatcaagcctttgcaaaaagatttaggaacgaaaggactttagactccttccttcattacaagtttatatccggtggttgtgataaagacgcttacattccggtggttgccacaggttcaaactcactatgcatccattacaccaggaataatgatgtgatgtatgatgatgaaatggttcttgttgacgcagctggttccttgggtggttattgtgctgatatttcgagaacgtggcccaataatggaaagtttactggcgcacaaagagacctttatgaagccgtattgaacgttcaacggggttgcattaacctttgtaaagctagcaataattattctctccatgacgttcatgaggaaagtatttcgttgatgaaaaaggaattaaaaaacttgggtatagacaaagttaccggatggaacgtcgaaaaattataccctcactatatcggccataatttaggtctagacgttcacgatgtgcccaaagcttccaggtacgaaccattgaaacctggtcaagtgattactattgaaccgggcttgtacattcctgatagtgaatcattcccatcttattttagaaacgttggaataagaattgaagatgacatagccattggggaagatagttacactaatttgacaatcgaagcagttaaagagatcgacgacctggaaaatgtcatgcaaaatggcgtctctacgagattcgaagaagatgaagtagcaccattgtaa

SEQ ID NO: 752 - DNA, 639 bp, Saccharomyces pastorianus
atggccgactcttctcattcaataagttcaaaggacattgcctcggctatctctctctacgaccaatccatatataccaataatagatccaccaatctggacctagaccagaggtcaatgagcccttccaatatcgcttcgggtgaggacaggataacaagaaccaactctggtggctctatcacttcaggagcttctatgattgccactaaggatgggattcaagggtgtaacgttaaaagagatgggattccgaaatactctttaaatctgctgaactctatggttcgcaagcaatatgagcatagtaatggtaacaagtcccctactccaagtagcaacaataaactcgatccgaagaacgaaaagaagaataaaaagaaaagtaaaggtaaagatgggacaaatacggtcgcccatgaccagaacgaaaaattttacaaactgaaccccgcttccacttcaaattcgaatgtgatttctaactcttctacttcattatctgaccagttttatttccagaaaagtaacgccgaatcagcgccattaagtaatgcgaactacccacaatccaatcattccccttctttgaactcaatggataatagtacaaagcatagcagtaacgtacatacttga

SEQ ID NO: 753 - DNA, 1884 bp, Saccharomyces pastorianus
atgattagatcaaccgttattggctcctccagtaggtgtgtagcaaggatttccaaaagagtaggtacgatcaaatgtatcactaatacccccattaccactaaaagattcatttccggtaaaccaaatgaagtgtttacaaaactaacagacgataacgatccaaagagggatgctttctttaagtacacttggggttcctggctgaagaatgacaaacaacagaaggagaaaagatttactaagttttccattgaaggtttgaaccgtattcttaatgatatgtatattcaatccagcgaaatggccaaagttccttcggataagatcttaccgccaacgtttaacaagaatctaaccgtctctttggttaataacgttatacctaaaaacataggaaagatcaacccaaacgaaaaagttcaagtaaccacaatgtccagtattcacgaaggtaaacatcacagaatatacaaggtcgacactaatttgaacaaagcgtttgttttgagaattccgtatccgttggaaaatgaaaacactctagcttacagaattagaagtgaagtggctaccatggatttcgctggtttgaagctgggcatcaaagtgcccaagattttttgctatggtgtcaattccttaaatcctgtaagacagccctttgttctacaagaattcattgaaggtgatctattgatgaaagattgggatccattgatggaagatgactctccaaaccaaggaaaattcgagaacgttatcaaacaggtttctgatttccagtcaaagttgatatccttaaaattaaatgcattcggctccatatattttggtattgatctgaaaaatacggacgataatgaatttgcaaacgtatacgatggcgaaactaatccggatttacaaaatagatggaaaattggcccatctgtggaaagatgtctttggagactaaaatcccatttagattttcagaagcaaatcaaaccgttcttaggaccatggtctaacaagtcgccaatggacattatcaaaaacaccggtctattggaagctgagaacgcaaaaatcagattggcgctaaaagaagcaggtagctcgcccgaggtagtggaacctcaaactttaaaagaacaagtgactacttttgaaaatttggctaagattgcgcccagcttattcaatgcgaagaccaagtctatcccaaacatacaagagttattgtcaccacgtttattccatcctgatctagacccaatgaatattattattactaaagaatcacaagaagcttatttattagattttgaaggtgcgtgcaccaagccattcattttacaaaactcaccacaatttattgcttatgaagggcccaaaatttatgacataaaagaagatataaaggactttgacaagctatccgaaccagagaaggtgcaatatcaattcatgtataaacggacccgtaaccaacaccaatgggaaaagaaattgaacgaaaacaattctcagctgattagtgcagtggccccgcccgttaagttactaaggagtccatatattgcagctgttgagaggaaaacggaggaagaatatttgctagtggacgaatcgctgttgcagttgaaagaagtctgggacatatttgcccaaaacgatttagtcaagcaaaagaaattcccattggactacacaaaggaagacattgaaaaacatgttaaggatttgcaaaaattacatgaaaagctaatctctacgccatttgccgccactcaaggctgggttcctcaagacatgtttgaccaattactaaaatctggtattatcgttaaacaggaaaacggggattatactgtgaaacagcctcagcctactaagtaa

SEQ ID NO: 754 - DNA, 1731 bp, Saccharomyces pastorianus
atgtctgctactctactaagacagcccttaagtgcggtttctcggcaaagtagaagttcgagagtctctggacttaaccttttgaaactaaaggctcaattacatagacaccatttatcaccttctttaataaaactacactccgagttgaaactggatgagctgcaaaccgataacactccggactatgtccgcttggtattgagatcgtccgtgtacgacgtaattaatgaatcaccaatctctcaaggtgtaggcttgtcttcccgtttgaacacgaatgtcattttgaaaagagaggatcttttgcctgtgttctctttcaagcttcgtggtgcttataacatgattgccaagctagacgattctcaaagaaaccaaggtgttattgcctgttcagcaggaaaccacgcccaaggtgtggcttttgcagccaaacacttgaagatcccggctaccatcgtcatgcctgtctgtacaccatctatcaagtatcaaaacgtctccagattggggtctcaagttgttctttttggtaatgattttgacgaagccaaagcagaatgtgccaaattggcagaagaacgtggcctaacaaacattcctcctttcgatcatccttacgtcattgcaggtcaaggtactgtagccatggaaatcttgagacaagtacgtaccgttaacaagatcggtgctgtcttcgtccctgttggtggtggtggtctaattgctggtatcggtgcgtatttgaaaagaatcgctcctcatatcaaagttatcggtgtcgaaacttatgacgcagccactctacacaactctttgcaacgcaaccaaagaactcccttacaaactgtgggtacttttgctgatggtacctctgtccgtatgatcggtgaagaaacttttagagtcgcccaacaagtagtagatgaagtcgtcctcgttaacactgatgagatttgtgccgcagtgaaagacgtttttgaagatacaagaagcattgtggaaccatctggtgctttatcagtggctggtatgaagaaatacatctctaccgtacaccctgaaatcgaccatactaaaaatacctatgtccctatcctttcaggcgctaacatgaactttgatagattaagattcgtttctgaacgtgctgtccttggtgaaggtaaagaagtcttcatgttaattactatacctgacgtcccaggtgcattcaagaaattgcaaaagatcattcacccaagatctgtcactgaattctcctaccgttacaacgaacatcgtcatgaatcctctagcgaagtccccaaggcttacatctacacctcctttagtgttgttgacagagaaaaggaaatcaaacaagtgatgcaacaactaagtgcccttggtttcgaagctgtggatatctccgacaacgaattggccaaatctcatggtagatacttggtcggtggtgcttctaaagtgccaaatgaaagaatcatctcttttgaatttcctgaaagaccaggtgctttaactaagttcctaggtggtttaagcgactcttggaatttaactctgttccattatagaaaccacggtgccgatattggtaaggtattggcagggatttctgttccaccaagagaaaacttgaccttccaaaaattcttggaagatttgggttactcttaccatgacgaaactgataacaccgtttatcagaaattcttgaaatattga

SEQ ID NO: 755 - DNA, 1728 bp, Saccharomyces pastorianus
atgttgaagtatcgtgtattatctcgatcatgtcatatattccacccaaagtctctctcgaataatacccttaaatcagaatccacccaagaactacttcagacactggggtttataagacgctcgcaagctggactcttccaatggctaccgcttggcctgcgatcactaaataaattgacaggtatcatacgaaaccggatggacaacgactgtggggctgtggaagtttcgctgagtgctgtctcctccaaatcactatggcaaacgacgggccggtggactaatagcgagctgtttaaatttaaggattccaaagggaagcagtattgtttgacagcgacatgtgaagaagatattacggatttgatgaaaaattacgttactagttacaaagatatgcctatcacggtgtatcaaataacaagaaaatatagagacgaaattaggcccagaggtggtcttttacgtggacgagaatttttaatgaaggacgcgtattcatttgccagtaccaaagaagaggcatttgccagtttccaagaattagacgaaacctacaataaaatatttaaagatttgaagataccttttgttagtgcatgggcagacagtggtgatataggtggtgaatttagtaaagaatttcatttgattcatgaatctggtgaagacactctgatgagttgcaaagattgtggcgacatttcaaccctagatatgtctcaatcatttcctgaaaaagatgggcaatatcttggcgatgtcgattgtaagtatgccttgaccaaagatcactctactttaatatgcttttattatccaaaaaacaggcaattgaattggaacttggcattaaacgtaatggacaaggatatcgatttggcattaagggacaagccaaatgatcttgttctggaagcttatcaaaacgataatgaagacattatgttcagtaaaatattgagagttatggactgtagactgaactcaaaatcaaatttccctgatttcccactgaaggaatatttgaagaataattttggccaaattgatgatgtttctatagtggatgcacaagcagatgaaatatgtggtaaatgtgaaaacggaaatctacaatcgttcaaaagcatcgaagttggccacatatttttactgggcaacaagtattcgaagccactgaacgtcaagtttgtagataaagagaataaaaatgatacgtttgttcatatggggtgctacggcatcggagtaagcaggctaactggatcagtggcggaactgggccgtgatgcaaatgggtttagatggccagccataatagcaccatacaaggtgtctatatgtaccgggcccagtaatgaagagaacctacagcggataaaagatattcggtccaaattattggataattcctctatagatgtccaaaatgatatgctggaccaattcaacgaaaaattggggataggcgctaggataaagttatctcatgccatgggcataccattatgtgtcatcgtaggcccaaagaactggcccaatgtggaaattgaagttcgtggcatcaggtggggcaaaagggatcaatggaaaacggagttcgagaagaagactcaagagtggaattggaagtgcactgaaaatgaaaacggaattgaaaaacacgttgtcccgattgagcacttggcagaagtcgtcgacattctgctaagagatatgtag

SEQ ID NO: 756 - DNA, 249 bp, Saccharomyces pastorianus
atgtcaagcccaactcctccaggtggccaacgtactttgcaaaagagaaaccagggcagttcacaaaaagttgcagcttccgctcaaactaagaacacgaagagcaacaactcgatcttgaagattttttccgatgaagccacggggctaagagtcgatcctttagtagtgttattcctagcggtcggttttattttctctgttgttgcattgcatgttatttctaaagtcgcaggtaagctattctag

SEQ ID NO: 757 - DNA, 2304 bp, Saccharomyces pastorianus
atggttcaatctgctgtcttagggttcccaagaatcggtccaaacagagaattaaagaaggccactgaaggttactggaacggtaagattaccgtcgatgaattattcaaggtcggtaaggatttgagaagtcaaaactggaagttgcaaaaggaagctggtgtcgacatcatcccatccaatgacttctcattctacgaccaagtcttggatttgtctttgttgttcaatgtcatcccagaccgttacactaaatacgatttgtctccaattgacactttattcgccatgggtagaggtttacaaagaaaggccaccgaaaccgaaaaggctgtcgatgtcaccgctttggaaatggttaagtggtttgactccaactaccactacgtcagaccaactttctctaagaccactcaattcaaattgaacggtcaaaagccagtcgacgaatatttggaagctaaggaattgggtattcaaaccagacctgttctattgggtccagtttcttacttgttcttaggtaaggctgacaaggactctttggacctggaaccattatctctactagaacaattgttgcctatatacgctgaagttctatccaaattagctgctgctggtgccactgaagttcaaattgacgaacctgtcttagtcttggacttgcctgctaccgctcaagccgccatcaagaaggcttacacctactttggtaagcaaagcaatctaccaaagatcactttggctacttacttcggtaccgttgttccaaacttagacgttatcaagggcttgccagtctctgctctacacgtcgactttgtcagagctcctcaacaattcgatgatgtcgttgccgctattggtgacaagcaaacattgtctgttggtattgtcgatggtagaaacatctggaagaacgactttaagaagtcttctgctttcgttaacaaggccatcgagaagttgggcgccgacagagttgttgttgccacttcttcctctttgttgcacactccagtcgatttgactaacgaaaccaaattggacgctgaaattaagggcttcttctcttttgccacccaaaagttggatgaagttgttgtcattaccaagaatgtttctggtcaaaatgttgctgccgctctagaagctaatgccaagtctgtcgaatctagaggtaaatccaagttgatccacgactcttctgtcaaagccagagttgcctctatcgaccaaaagatgtctaccagagcttctccattcgaacaaagattgcctgaacaaaagaaaatcttcaacttgccattgttcccaactaccactatcggttctttcccacaaaccaaggacattagaattaacagaaacaaattcaacaagggtaccatcactgctgaagaatacgaaaagttcatcaactctgaaattgaaaccgtcatcagattccaagaagaaattggtctagatgtcttggtccacggtgaacctgaaagaaacgatatggttcaatactttggtgaacaaatcaacggttacgccttcactgtcaacggttgggttcaatcttacggttccagatacgttagaccacctatcattgttggtgacttatctagaccaaaggctatgtctgtcaaggaatctgtctacgcccaatccatcacttccaagccagtcaaaggtatgttaactggtccaatcacctgtttgagatggtctttcccaagagacgatgtcgaccaaagaacccaagccatgcaattggctttggctttgagagatgaagtcaacgatttggaagctgctggcattaaggtcattcaagttgatgaaccagctttgagagaaggtttgccattgagagaaggtgctgaaagatccgcttactacagctgggctgccgaagctttcagagttgccacttctggtgttgctaacaagactcaaattcactcccatttctgttactctgacttggatccaaaccatatcaaggctttggatgctgacgttgtttccatcgaattctccaagaaggacgatgccaactacattgctgaattcaagaactatccaaaccatatcggtttaggtttgtttgatatccattctccaagagttccatcaaaggacgaattcattaccaagatttctgccatcttgaaaacttatcctgctgaaaaattctgggttaacccagattgtggtttgaagactagaggctgggaagaaactagattgtctttgactcatatggttgaagccgctcaatacttccgtgaacaatacaagaattaa

SEQ ID NO: 758 - DNA, 375 bp, Saccharomyces pastorianus
atgccaagcaaagacgcagagagtcatatcgataaggacatacgaaagatatcgtcgaggaacgatgagttgatcaaacaggacgctacactgaaaagagaatataccactttgttgagaaaagtgtcgagtgtgataacggtgctgaatagcatagataccgaaggcggggttggcagtacagaaatcccacgtttgatatcagaaacgacggttaagaaggtgcccgaattgaaatggtacaatgaacaaatatcgctactgacggccaaactggagaataacgaagatactgacgttcccgaagagttgatggacgcttatactttatacaaggaaacaccattgttatataatgatacccacatgccatga

SEQ ID NO: 759 - DNA, 618 bp, Saccharomyces pastorianus
atgtccgatccaagttctataaacggtggtattgtcgtcgcaatggcgggtaaagactgtgtggccattgcctgcgatttgcgtctcgggagccagtcgctgggtgtgtcgaataagtttgagaagatcttccattacggccatgtgtttttgggaattaccggcctagcttccgacgtaaccacgctgaacgaaacattccgttacaagaccaacctatataagctgaaggaggaaagggctatagagccggaaacgttcacgcaattggtgtctagttcgctttacgaaaagagatttggcccttactttgtgggccccgtggtagccggtattaattccaagtccggaaaacccttcattgccgggttcgacctaatcggctgtatcgacgaggccaaggacttcatcgtcagcggtactgcgtccgaccaactgtttggtatgtgtgagtccttgtacgagccaaatctggagtctgaagatctgttcgaaaccataagtcaggccctactaaatgctgccgaccgtgacgccttgtcgggctggggtgccgtagtatacatcattaagaaagaccaggtggtgaagaagtacttgaggatgagacaggattga

SEQ ID NO: 760 - DNA, 1194 bp, Saccharomyces pastorianus
atgtcgcaagttcaagaacaacacatatcagagtcgcagctgcagtacggcaacgcttcgttgatgtctactgtaccagcagacccttctcagtccataggtaatggaaacggcagcgatggcatcgctgccaccgatgcctccgccgatggaggcggctcgcaagagcaagagcaagtgcagggcgaagtggaggaggaagaggacgatgagtctgccttgggttcgtttgtgcctatagaaaagttacaggtgaatgggatcaccgcagcagatgtgaaaaaactaagagagagcgggctacataccgctgaagcggtggcatatgctcccagaaaggctttgctggagatcaaaggtatatccgaggcaaaagctgacaagttgctgaacgaagccgctaggctggtgcccatggggtttgtcacagcagcggatttccacctgagaagatcggagttgatttgcttgacgtccggttctaagaatctggacaccctcttgggcggtggtgtagaaacgggttctatcactgagctgtttggtgaattcagaacaggtaagtcacaactatgtcacactttagcagtcacctgccaaattccactggacattggtggcggtgagggcaagtgtttgtatatcgacacagaaggcactttcagacctgtgaggttggtgtccattgctcaaaggttcgggttggatccggacgatgccctaaacaacgtcgcctatgcaagagcgtacaacgctgaccatcagttgaggctcctggacgctgcagctcaaatgatgagcgagtcccggttctccttgattgtggtggactccgtcatggccctttacagaacagacttttcaggccgtggtgagttgagtgcaagacaaatgcatctggctaaattcatgcgtgccttgcaaagactagctgaccaattcggtgttgctgtcgtcatcaccaaccaagttgtcgcccaagttgatggtggcatgtctttcaacccagacccgaaaaagccgatcggtggtaacatcatggcccattcatccactacgcgactaggcttcaagaagggtaaaggccctcaaagaatatgtaaagtcgtggactcgccttgtttacccgaagctgagtgtgtctttgccatctacgaagacggtgttggtgaccccagagaagaagacgagtag

SEQ ID NO: 761 - DNA, 1599 bp, Saccharomyces pastorianus
atgttcacaggtgtttatccaaacaccccaggcacataccctgaagtcacagctcgtaaatatatggacagacagtcggaactgaacatgttctccaccgcttcttccttggcattgaatgaattggacgcgcgccaatattggtctgtttcctctcatatttcaggttcaagtagcatgtactcagctggtggagaggaaaatttacgctccgcaagtaccgatccaatcgtttgtttaccagggtttccaacagatgacagggatagcgaattgatatcctctgccgttggtgaagattcagtggatagtaatccttcatttgccgagaaattcaatactttccccaccaaaggttttctttctgaagacaatgggtttgctgaggttatcccttcctcgccagaggagaaatcacgagtatcttttgaaagcgaaatatcgtctgaaatttcaaagaccactcctccaaacgggacttcggtttacgaagctttggtagagccacctccctctcaaaatgagtctgttgctctgtctttcggacattcaaacgatttggactttttgaacaacccaagtggatcgggctcttcaaatgacgttaatagaagctcgggttccatatcccttcccaaaaatgtgtctttagattttaacgttgacaataatcttttttttacaaacgagctggtagcatctgaatcacataagatggccaaattccaccttggtaagagaaatgcaaaaagcttgctaacaagatggaaaaccattgaaatgtatggagaatctgtcaaaaggactgatgacacatattccaatttccaatttgcgcaatatattttgaaggttggtttgaatttggaaaacttacaagaattggttgaagagcaagaattggctgaagaacaagagggcaagagtggttcctttactgttgacagcttgaaagaatcgttactgatggacgcaaaaataattttgaagaaattaagtgctgtcggatatccggatgcgcagtacctgttaggcgacgcttactcttctggagtttttggaaaggtaaagaatagaagggcatttctcctgttcttagcggcagccaaaaggttacacattgaaagtatattcagaacagctatctgttatgagtgcggattaggtgtgacaagaaatgcatcaaaggcagttaactttttaacctttgcagcaactaaaaatcaccctgctgcaatgtataaattgggtgtatattcttttcacggtttgatgggtcttcccgaagatattttaacaaaactggatggttatagatggttacgaagggctacatccatggccaatagtttaatttgcggtgccccttatgaattggctaatatctatatgacaggattcaaagaccttattatttcagatccagattatgcaatggtactttataagaaggcagcaattctggggcacactgaatctgcaagaatattggcagaagcttgtggaaatagaggtatttcttctcgtagaaatcatcgactatcacataaattacccaaagcttccgacaatgttctcgtgtccaggaaattgatttaa

SEQ ID NO: 762 - DNA, 2271 bp, Saccharomyces pastorianus
atgataaaaagatggctatctgtgaccaagaagaagtctgatccagaaaagggtacacatagtaatgatgaaatcagccgaaaagcaattaatatgaagaaggccggagcttttcgagatccgactatagggaaaccaacgagcactaagagtagctcctcaagtgcaccttctaacccagcaagccatgaaaagaagaacagatccagcagtcaagcggataacatcattgatgaaaaacatcatcaccatcatcaccaccaccatgatatgacgaacaatttaaatgaagtagagagttattttcctagcacatatgaggatggtgcattagaagcagagtcccaaattcttttcactagcatgacagatctaatgccttatggggacggttcaaacaaggtgtttggctacgaaaattttgggaatacctgctattgtaattccgttttgcaatgtctttacaatatacccgagttcaggtgcaatgtcctgcgatatcctgaaagaatacctgtaacaaacagaattcgaaaaagcgacttaactggctcaaaggtgagagtatttactaatgaaagttttgagacgtctgccaacggaggaaattcgaattcagggagccaaatctgtgataatgaagacgtacacaaccacaaccaccatcataatcagcgcagtgatctggataactcttcttcatctactcaagaaaaacagaacaacaatgaaagaaaaaggaattcctttatgggctttggaaaaagcaaatcgagtagcaaagactccgcaaagaaagatgatagcagtgaggttgaacggcctcggcctgtgcatacagtggttatggcatcagaccagctaacggaaaagcttcacgaagggtgcaggagaataattgttggaagatctcttccaattcagggtggctcctccttgataactgcacatgcagaccaccaagtcaattcacaacctcaatcgaaagtgtctgccggtagtaacgaaccaatggatgacgataaccacttcaactcggagggtatccgtcataccgtgaacgtgcccaaccttaacaaagaaaccacttttccgacaagcgagcaaagaaaaaaggcagcattaattaggggccctgttctcaatatcgatcacttgctctatccttctgagaaggcaacgctttacaatggtctaaaggatatatttgagtctataactgaaaatttggcactgacagggatcgtttcacctactgaatttgttaagatcctaaaaaaagaaaatattttgttcaacactatgatgcaacaagatgctcatgaatttttaaactttttactaaatgactccagtgaatacattgaatgccatacctccagtgtaaatagtatgcctcaagagaacatgaatgacaccagcgataatttcataaccgatctgttcaagggtacgctgacaaacagaattaagtgcttaacttgcgacaatatcacctcaagagatgaaccgttcttagatttccctatagaggtacagggcgatgatgagactgatattcaaaaagttttgaaaagctatcatcaacgcgaaatgttgaatggcgttaacaaattttactgcaacaaatgctacggtttacaagaggcagaacgcatagttggtttgaagcaggtgccttatattctgtcgctacacttaaaaagattcaagtactcagaagaacagaaatcaaatatcaaactgttcaataagatacgctatccattgtacctagacgtttcttctacatttgatacgtcagtatccaaaagatacgaattgagtggcgtcgtaatgcatatgggaagtggtccccagcatggccattatgtatgcatttgcaagaatgaaaaatttgggtggctgttatatgacgacgaaaccgtagagtctgttagcgaagaaacggtattgcagtttacaggccattcgggtgatcaaacaacagcttacgttctgttttataaagaaattaatgcaaattacgccaacaaccaaatgagagacactgtgacttcagatcaaaaccgaaaccaaattgagaacaatattgaacaattgatgaagtgtgatgactggttaagaaatcgcgcattgaaagcgatggccaatgtggaacgtaaaaaaattctaaaagatataccagaagttaaggcacctgtaagaactgttgatagaaaacgcaataaacaaaagagaagatccagaatactgagttttatcaaataa

SEQ ID NO: 763 - DNA, 753 bp, Saccharomyces pastorianus
atggctacgaagcaagcccataaaagactaactaaagaatataagttgatggtggagaatcctccaccttatattcttgcccgtcccaatgaagacaatattttggaatggcactacatcatcacaggtccggcggatactccctataaagctggccaatatcatggtaccttgactttcccatcggattacccatacaagccacccgccatcagaatgattacaccaaacggacgtttcaaacccaatacacgattatgtctttccatgagtgattaccaccctgatacctggaatcccggttggtccgtatcgaccattttgaacgggttgttgagtttcatgactagtgatgaagctacaactggatccattactacgtcggatcatcaaaagaagctcttggcaaagaactccgtgagttataatacttttcaaaatgtgagattcaagctgatttttcctgaaattgtagaggaaaacgtacaaatattagaaaagagaagattaatagaaggggacggtgctgaaacgaaggaagagacagaagatgcttttacaaaagctgctaaggagaaagtgatttctttagaggaaatactagatcctgaagatagaatacgtgcagaacaagcattaagacaacaagacaataattcaaagaaaaatgacaaagagccgaacggcagttcttccatggtttatattggtattgctgtttttttatttttggttggtgcttttatgaaatga

SEQ ID NO: 764 - DNA, 1293 bp, Saccharomyces pastorianus
atggcagaaaaaattttgcaaaatcagaatcccaggttagaagcgatgacagtggaccatgaaactcctgcaccaaaggaaattaccgttaatgaacccagattgactagagttgccagaccattaaggcatgtaaggcatatacccgtgaaatcgttggttttccattccaagcacggacccgtcactttttcatacgaaaataaaataaaactgccaataagtaagaataaactggcagtccaggtaaattatgtaggtttaaatcctattgatatgaaaatcaagaatggttacaccaaacctatctatggtgaggccggcatcggaagagagtatagcggggtagtaacacatgttggtagcaatctgacagatagatggaacgttggagatgaggtatatggtatttattatcatccaaagttagccatcggtgctttgcaaactgcactgctcatcgaccctaacgtcgatcctattttgatgaggccaaaacataccttaacaccagaaaaggcggcgggttcattgttttgtttggggacagctttgaatctattatctaagctaaaggaaaagggccaattagatgcggagtctaacattttagtaaacggtgggacaagttcagtggggatgtttgccatccaactgttgaaacgctactataaagtttccaagaaattggttgttgtgacgtctggtaacggttcaacggtattgtctgaacacttccccgacctaaaggaagaaatgattttcataaattacctctcatgtagagggaaatcgagtaaaccgcttagaaatatgctgaactcaggtaaaattgtagattatgatgaccctaatagtcttaaagaaaccgaagcttacacacagggtaaattcaacgccgtattggatttcattggtggttatgatattttgagtcattcaagttccttaattcgtgctaaaggcgcttatattaccactgttggtgactatgttggaaactataagaaagacatctttgactgttgggataatcctagtgctaatgcgaggaagatgtttggctcaatgttgtggtcatatgactatactcatttttatttcgaccctaatatcaaactcatttccaagaaaaatgaatggatacatgaatgtggaaagctactgaatgaaggggttgtggactgtatcgtagataaggtttattcttggaaaaaactcaaggaggcgttttcttatatggccacccagcgtgctcaaggcaagttaataatgaaagttgaagatttttga

SEQ ID NO: 765 - DNA, 603 bp, Saccharomyces pastorianus
atgggtatttctcgtgactctcgtcataaaagatcagccactggtgctaaacgtgctcaattcagaaagaagagaaagtttgaattgggtcgtcaaccagccaacaccaagatcggtgctaagagaattcactctgtcagaaccagaggtggtaacaagaaatacagagctttgagaatcgaaaccggtaacttctcctgggcttccgaaggtatctccaagaagaccagaatcgccggtgtcgtttaccatccatccaacaatgaattagtcagaactaacactttgaccaaggctgctgttgttcaaattgatgctactccattcaagcaatggttcgaagctcattacggacaaaccttgggtaagaagaagaactccaaggaagaagaaactgttgtcaagaccaaaaactctgaaagaaagtgggctgctagagctgcttctgccaagattgaatcttctgttgaatcccaattcagcgctggtagattatacgcttgtatctcttccagaccaggccaatccggtagatgtgatggttacattttggaaggtgaagaattagctttctacttaagaagattgactgctaagaaatag

SEQ ID NO: 766 - DNA, 1929 bp, Saccharomyces pastorianus
atgtcaaaagctgtcggtattgatttaggtacaacatattcatgtgtcgctcacttctcaaacgatagagtggagattatcgctaatgaccaaggtaatagaacgacaccttcgtacgttgcatttactgacaccgaaagactaattggtgacgctgctaagaatcaagctgcaatgaatccacacaatacggttttcgatgccaaacgtttaataggtcgtaagtttgacgatccagaagtaacgagtgatgctaaacattacccattcaaagtgatcgacaaagaaggcaaaccggtagtgcaagtggaatataaaggggaaacgaagacttttactccagaagaaatttcctccatgatcttaacaaagatgaaagaaactgctgagaactatttgggtacaaaagtaaacgatgctgtggtaacggttccggcttatttcaacgattcgcaaagacaagcaactaaggatgctggtacaattgccggtttaaatgtcttacgtattattaacgaacctaccgctgctgccattgcctacggtttagacaagaaaactcaaaaggaacacaacgtgttaatatttgacctgggtggtggtactttcgatgtctctctattatcaatagatgaaggtgtttttgaagttaaagctaccgcgggtgatactcacttaggtggtgaagatttcgataataggctggtcaacttcttagctgatgagtttaaaaggaaaaacaagaaggatttgacaactaaccaaagatcattaagaagacttagaactgctgccgaaagagcaaaaagaaccttgtcttcatctgctcagacgtctgtagaaattgactcattatttgaaggtgttgatttctacacttcaatcacaagagctagattcgaggaattatgtgccgaccaattcagatctacattagagccagttgagaaagttttggctgattcaaaattggacaagtcacaaatcgatgagatcgtcttggtcggtggttcaacaagaattccaaaagtgcagaaactagtctccgatttctttaacggtaaagaacctaatcgttcaattaatccagacgaggctgttgcttatggtgccgctgttcaagctgctatattaacgggcgatcaatcttcgacaactcaagatttgctattgttagatgttgcgccattatccctgggtattgaaactgcaggcggaatcatgacaaagttgattccaagaaactcaactattccaacaaaaaaatcggaagtattctctacttacgccgataaccaacctggtgttttgattcaagtctttgaaggtgagaggactagaacaaaggacaataatttgttgggtaagttcgaattgagtggtatcccacccgctccaagaggtgtcccacaaattgaagtcacatttgatatcgatgcaaacggtattttaaacgtatctgctgtcgaaaaaggtactggtaaatcgaacaaaattacaatcaccaatgacaaaggtagattatcaaaggacgatatcgacaaaatggttgctgaggcagaaaagttcaaggctgaagacgaagaggaagccggacgtgttcaagttaaaaatcagctagagtcatacgcctttactttaaaaaattctgtaaatgaaagcaactttaaggaaaaagtaggtgaagaagatgcgaaaaaggtagaaacggctgctcaagataccattgattggttagatgcttcacaggcggcctccagtcaagaatacaatgagaagcaaaaggaattagaagctattgccaaccctattatgactaaattttatggggctgcgggtggtgctccaggaggaggtcctgtcccaggagctggtccagacccaaccggtacaccagataaaggcccaacaatagaagaaatcgattag

SEQ ID NO: 767 - DNA, 630 bp, Saccharomyces pastorianus
atgtacagcaaccacgctttgaatccagatggtacttgttttaattgggaccaaatgaggctcgaagaacaatctgactcgaatctttcctccaatgggagcataacaccaaaatctgtaggttattccatgcattctaggttatcagaaaagagacaacaagaaaatgacgctttgaatattcaagattctccttccatagtttcaagtgtgatatcaaacaggcgagatcgggcacaagaagtttttggacctcattcttcatctcctattgccacctcggaacagcaacgaataaatcagagatcacaattagtatcgatgagatcatctaaacgtcaacagagaatgacagagaaacggggcggtttagaaaaaatggaacagatgatcatgcaaggtgagcgtcttcgagagattgaaagactgaaacaggaagctcaaagaaatgcggtcccttcagacatggctgagttcatggagtgggaaaataatgaggatctggaagacgatgatttgcttgcctttatcgagaagcaggagagttataaaaaagagctagaacagcttttgaacaaccctaatagaaatgctcacgcgaataattcgttttcagattatcacacgtaa

SEQ ID NO: 768 - DNA, 4182 bp, Saccharomyces pastorianus
atgtattccacccccttgaagaagagagtcgattacgatcgcgaggcttttaaatttgccggcacttcaggacgaaattacttgccggatcgattaagagatggccaagaccagcataatcctaatttgtcgaacagcccgttacaaaccagcagactagacaacaacatacggaagaagtatgacgaagcggcgaatgctgttggatcagattttcttgatattagcacgcatgtcgaagttagtgcttttacttcttctgaccgtttgcaattggcaagtaaatttgtccaggatctgagccttgcagatagaagtacaccagtactggacaatccctcatactatagtaacggagtgaactacaactttacaaatgaagtcggtggattaggtgcatttactccttttcaaagacaacaagtgacaaatataccagatgaagttgtgtcagaggtttctaacacagaaataaaaagtgatatgggtatatttccggaattgggctattgctggatcacttctgataataaattaattctgtggaacatcaataatagttcagagttccattgtattgatgaaattgaacataccattttaaaagtgaagttagtgaagcctagattaaacacatttgtttcctctgtcgaaaacctattgattgtagctactctttttgatatctacatcttgacaatatcttttgacagcaccactcataaactgaatatcttcaataccggattaaaggtgaacgcgaccggccttaacgtttctaatataacaaactatgaaaaaactgcacaaatattctttaccagttcatctgatggagttaacgtatgggagttgcaatacaattgcttagagaatttgtttaatagcaaatgtagcaaagtatgcttaactaaatccaacttagcaaatttgctacccacaaggttaatacctagtgtacctgggagtagaatgatactaagggtactggagggagacgctaatgttgaagaagagaccatattacagcttatagttgaccaatcaagaggtgtcttgcatacgttatcgacaaaatcaatcgttagatcttacctaataactgctgatgggttagaaggcccagtcttgattgatatccctcatatcaggcgcagcttgggtgcactggctgcaaaaggttctccgctactcaccagtcggcttttaaaaattgtcaaaattatttccatctctaaatgggagaataatgatatatttttagctttgataactacagccggggtccgcttgtattttaagggctccacttctaagaaatcaattagttccctaaagctagtctctttaaaatgtcctcctgctaatccatctgacaagtttcaaaaaactggtttttctgccgtcaatcagaagtcactatactcaaagggtccaagtccactctcggcgcacaaaaatagttccgtctacatcgataccactgatgcaagtaccataatatcgccaggggtatttttcacatccgtacgtaagactaataattccgagatattatcaaacaacctttcccaagcacatttgctggaaaataaggaggaacacaagctttatgtgagtgtaccagactatggtatattaaaaaattacggcaagtatgttgaaaatactgcactacttgacacaacagatgaaataaaagaaattgtttccttgaccaaatgtttcaataatactttgactccacatggttactctaatgtgtttgcctcacaatataacgcggagcccttaaaaattgctgttttaacaagcaatgccgttgaaatatatggatatcgtaagcctgatgaaatcttcgaaagcctgattgagaatcctctaccctttattcacaactatgggttatctgaggcttgctctacggctctttatttaacttgcaggttcaataagtccgaacatgttaaagcaagcgccttaggtttcttagcagccggtatccctggggtaattgagataaagccaaaatattttggagatagtggcagtttatcgtcaaccacaccaaacgaacttaatgaatccaatgacggtaatggaattgtgctgtctcctagattctacggttctgcactattggttacaagattatttagccaaatatgggaagaaaaggtattcacctttaaaatgattcctaaaacagaaaaaattaacacgtttggtatttccataactagaccacaagttgagtactatttatcatcgatatccgttttggctgacttctttaacattcaccgctcttcctttgtttcatttttggctccaagtgatgccaatgttacaacggcatcggacgcagagtcgattgctatggatgctcttatcgtgttgatcaactctataaaagatgtactctccctattaaatgtgttttatgaagagatggacgcttttaaatctttgttatatacactaatgggtgaaaggggtatttatgactcaaaaacacgtgattatttttttaacttacggttccatgatctatttacacctaatacagagacaaaacaaataataaaagagtttttaatagaaattgtcaatgccaatattactagaggatcatcagcagattatattatgaacgttttaaaggagcgttgcggatccttttgccgtggtgtggacattttatgtttcagagcaggagaacatttggaagcagcacagaaatttgaagtgctagattctaaattatcaaggaaccacctagattctgccgtagatctttatgaaagatgttctgagagtatggaaataaacgaactgaaacgtatagttgatgttatggtaaaattaaactaccagcctagtactgctgaatttttgctaagagttgcagacagaattgataaagaaaatcaagcccaaagatacgcaactgaaggttgcagaattaatgatcccaggaaaaaattttatgacaaacgtatcagtgtgtataatttgatctttgacatattaaagaccgttgatgaaaatacttttattgaacattctagttcagtgggaaagattacggtttcttctccagcgatgtcattgaaggaaagagtttattcgacgatattgaacagtaataacggatttttccattactgtttctacgattggttagtccaaaatggaagagaaaacgacttactccaattagattctcaatttattttatcctacttgaaagagaaagcagaaaagtcgttggaaacttctaatttattgtggatttacttatccaaaaaaaaacatttctttgaagctgccactgttttatatgcattggctaattctgatttcgatttgaagttgagtgatagaatcgagtgcctagcgagagcaaatgggttttgtgacagttcttcttccttcgaccagaagcccgcattggtccaactatcagacagtattcacgaattatttgatatcactgctattcaggacgacatacttactctggtggaaaatgaaacgaggattaacgaagatcacaagaaggaattgatttctaaactcaatggaaaagtgcttcccctttcctatcttttcaatgattgtgcagatccgttaggataccatgaaataaatttaagaatattcaaggcttcaggtttaagagatgaaagtgtcattcgaagagaatgggatctactgttcgatgctattaaaatgaaacttttgcctgatggaaaatgtggggacccagaatctttcatttctgaaatttcaagcgctctgattcgagttggtaagataacacacgatacagagataatatttccagttcatttcctaatgaataaggtattcgcatttatttctgatgagacaccagctaataatattccagatagatctgtccggtcaatttttatatcagcaggagtatcctatttgaaaatttattacactttgaaagatatcataaagaactcagaaggaagcaccgaattggcaaagaatgagatggtattgttaatcaaggaatggtatcaaaatgatacagagttacgtggttctattccgttggatcaaattaaaggattggagaaatacgatctagacgccgatcctgttcagaattatgtgaaaaacagtcaacatagcaagaaataa

SEQ ID NO: 769 - DNA, 1098 bp, Saccharomyces pastorianus
atgtcttttttcaatcgagcaaacacgacctccacaataggagcgggcactgcaatggctaacgaaaaggacatagctaatgacattgttattaataatccagcagaagactcgatatcggatattgcgttttcgccgcaacaagatcttatgtttagtgttagttcttgggatggtaaagtacgtatttgggatgtccaaaatggtgttcctcaaggtagagcgcaatacgaaagctcaagccctgtcttgtgtactaggtggtcgaatgatggtgcaaaagttgcttcaggagggtgtgataatgccctgaagttgtatgatgttgctagtgggcaaacacaacaggtcgggatgcacactgcaccaataaaagtattacgttatgttcaatgtggcccttcgaacgcagattgtatagtaacggggtcttgggataagactataaaatattgggatatgaggcagccccagccggtgtcgacagtaatgatgcctgagagagtgtattctatggacagcaaacaatctttattggtcgtagctactgcagagagacatattgtcattattaatttggcgaacccaacaagcatattcaaagcaaccacatcgccattgaaatggcaaacaagatgtgtagcatgttataatgaagcagatgggtatgcaatcggttcagttgaaggcagatgttccataagatacattgatgatgtaatgcagaaaaaatcagggttctcatttaagtgccatcgccaaaccaatcctaatagggcgcctggttccaatggtcaatctctggtttaccctgtaaatagtatagcatttcatccattgtatggtacttttgttacggctggtggcgacggtacctttaatttctgggataagaatcagagacatagactgaaaggctatcctactttgcaagcatctattcctgtatgtaacttcaataggaatggtagcgtatttgcgtacgctctaagttacgactggcatcaagggcatatgggtaacagaccagattatagtaatgtcatcaggctgcatgctacaagtgatgaagaagttaaagagaaaaagaagaggtga

SEQ ID NO: 770 - DNA, 2394 bp, Saccharomyces pastorianus
atgagttttaaagcgaacagttcatatccagattcaattcctttcgccgacacaccatactcgtcaaaccattatcgacacggcttgcagaataacattccaatggcgacgaatagcgagcaacagcagcaacagcagcaacaacagcaacagtggagagatcaggctatatcagatagtccaggtttcagagaaaggacgaacagtaagaaagcgcttaatcaatacatattcgatttcctttcgaaatcatctttaaaaaacacagctgctgcgtttgcccaggatgcgcaactaaacagagatacgaatgacgaacaattgggcaggaacaattataaagacaaaacacccggccaaagtccgatgctagaggtagtagacgcgccccaaggctttttgtttgaatggtggcagattttctgggatattttcaatactagctcttccaggggtggttcagagtctgctcagcaatactaccagcttgttctccaggaacaaagacaggaacaaatctacagaagcttggctgtccatgcggcaagattacaacacgacgcagaacgaagaggagaatatattaacgaagaggtagatcccatgcacttggccgcaatgatgctggggaactccatgtctccagcagcttcaatgcagaatgttaatgtcaatcctatgccgattccaatggtgggcaatcctatcgtcaatagttttccgattccgccatacagcaatacaaatcttgcaactggagcaacaacggtgactgcagccgcaccgccttccagtgatttttctaacacagcatcaatccagaatcgaaaccaaaacgttactggctggccagtttataactatccaatgcaaccctcgacagagaattcagcggggattccgtgtaacaataataccacaaataccacaagtaataacaaatctccggtgaacctacctaaaaacttaaaaaatatgcattcgtcatcaactgataaacccattaatgtggcaatgccaaaatccacaagaagcaggtccgcgacttccaaagctaaggggaaaacaacaaatggcacaggcactagaaagagacgaaaaattactgcaacagcagtttctgcaggatctgcaaacgccgcgtcgccgaatattaccacgccaggctccacaacaagcgagcctgctatggtaaattcaagacttaataagactccaaaatccgacacggctgctactcaccgcaaccaggttatggtatttggagatgaagacgcgtactcgaataagaaagtcagccccttaatgagtgctgtctctccttctaccatagtcgccaagcaaccagcaaaagcaaggaaaaattcaaaaaaggcatcgacgtcggcattttcagtagaatcgacccagtcaacaaataagagcaatagcaataacggaatctcaggtaaaaagcgcagtcctcctaatagtagagtttcaagaaggaaatctaccccgtccgttactttaaatgacaatactgccaaagacgcaaacgatatgttcaggacgcgttcgaataacactaccccaaacattcattcggctccaccaagtagaagcacaaatcccctacctttttctaatgtaaatctaggaagtttcaacaagccggctgtatccagtccattatcatcggtcaccgagtcctgttttgatccagacaatgggaaaattgtgacgaaaggtgggcccaaaagagcagtgaactcgaaagtctcagcatcatctcctttaaacatatcaacgtctccatctggtgatgctcaaaagcaaagaaattctaagccaacaggaagtgcggtcataaagcctccgcaagggttctcaactactaacttgaatattacattaaagagctcaataataatcccatcacagaacaatattataccacaagaattgccgactgcaaactctctggaagcacagatggctaaggatctaaggagcaataaaggtagtcataatgcttttactccagaggggacaaagacaccaaataacactaatcaagtatgtgagtttgagaacgtcaaaaatccgaattctttgatgcttccaaatcagatattcacgtcaactaatgggacaccaaatgaaaattcgaaccttgttaataccacatcttcaaataaaggtaacagtgatagtgcatcggttcagcctgcatccaatatcggtacaactttggggcctcaccaagccagtactactgaacaccaaaattcacagcctcaagagatgaaactcggtaatattggtataggggaaggtcaaggaacggatttcggtctaaacttactggacacaaatgaaaatgactttaatttcatcaattgggaaggttga

SEQ ID NO: 771 - DNA, 3342 bp, Saccharomyces pastorianus
atggatcaaaattttctaagtcaacttgagcagactttgaacgccatcacttctggtacaggcttgaaggaagctacaaaaactttgcaaggccagttttacactcagcctacaaccttgccagctttgattcacattctgcaaaatggtgcaaacgattcattgaaacaattagctggtgttgaagccagaaaactagtttctaagcactggaacgccattgatgaacccacaagaacttctatcaaggcctcccttctacaaactgcattcagtgaaccaaaggaaaacgttcgtcattccaatgctcgagtaatcgcttctattggtactgaagaattggatggaaacaaatggccagatttagttccaagcttgattcaagcagcatctggtgaagacgttcaaacaagacaaactgccatttttatcttgttttctttgctggaagatttcacctcttctctaactggatacgttgatgacttcttgactttgttctcacagaccattaatgatcccgcttccttggaaatcaggtcattatcagctcaagctttgaaccacgtctctgcgttaattgaggaacaagagactatcaaccccacccaagctcaaaagtttgctgctttgattccttccgtggtcagcgtcttagatgccgtcattaaagctgatgacaccatgaacgctaaactgattttcaactgtttaaatgatttcctgctactggattcccaattgaccggtaatttcattattgatcttgtcaagttgtctttacaaatttccgttaacactgaaattgatgaagacgtcagagtttttgctcttcaattcattatttcttctttgtcctatagaaaatccaaggtgtctcaaagtaagctgggcccagaaattaccatggctgctttgaaggtcgcatgtgaagagatcgatgttgaagatgaattaaacaatgaagacgaaactggggaaaacgaagaaaacactccatcatcttccgctatcagattgttggcttttgcgtcatctgaattgccaccatctcaggttgcttctgttattgttgaacacatctcagctatgctacaatctgcgaacgtttttgaaagaagagctatccttttagctatctcagttgctgttactggttctccagactacattttgtctcaattcgataaaatcattcccgccactattaatggtttgaaggacaacgaaccgattgttaaactagctgctttgaaatgtattcatcaattgactactgatttgcaggatgaagttgccaaattccacgaagaatacttaccattgattattgatatcattgattctgctaaaaacattgttatttacaactatgcgactgtcgccttagatggtctacttgaattcattgcctacgacgccattgctaaatatttggaaccattgatgaacaagttattttacatgttggaaagtaacgaatcatccaaattaagatgtgctgttgtttctgccataggttctgctgccttcgctgctggttctgctttcattccatacttcaagaccagtgttcactatctagaaaaattcattcaaaactgttcccaaattgaaggtatgagtgaagatgatattgaattaagagctaacacatttgaaaatatttctaccatggctagagcagttagatcagatgcgtttgctgaattcgctgaacctttagttaactctgcttatgaggctattaagacagattctgctagattaagagaatccggttatgcgtttattgcgaacctggctaaggtctacggtgaaaattttgctcctttcttgaaaaccattttaccggaaattttcaagacattagaattagatgaatatcaattcaacttcgacggtgatgctgaagatttggcagcatttgccgattccgccaatgaagaggaattacaaaataaattcactgttaacactggtatttcctatgaaaaagaagttgcctctgcagctctatctgaattggcgttaggtactaaggaacactttttaccatacgttgaacaatccttgaaggttttgaacgaacaagtcgatgaatcatacggtttgagagaaactgctttgaataccatctggaatgtcgttaagtctgtcttattggcttctaaagttgacccagaaaactatccaaagggtatcccagcttcttcatacgtaagtgcagatgttttagctgttattcaagctgctagagaaacttctatgggtaacctaagtgacgaatttgaaacctcaatggttattactgttatggaagactttgccaatatgatcaaacaatttggtagtatcattatcatggataacggtgactcttccatgttagaagctttgtgtctacaagttctaagcgtcttgaagggcactcatacctgtcaaaccattgacattgaagaggacgtaccaagagacgaagaattagatgcctctgaaactgatgccactttacaagatgttgccttggaagttcttgtcagtttatcccaagctttggctggtggttttgccaaggtctttgacaatttcagaccagttgtttttgggttgttccaatccaagtctaagaacaagagatcttctgctgttggtgccgcctctgaattggctttgggtatgaaagaacaaaatccatttgtccatgaaatgctagaagctctagttatcagattgacaacagacaaatctctggaagttagaggtaacgctgcttatggtgttggtttattatgtgaatatgcatcaatggatatttctgccatttatgaacccgttttgaaggcgctttacgaattgttgaatgctgccgaccaaaaggctctagctgctgaagacgacgaagccaccagagaaatcattgacagagcatacgcgaacgcaagtggatgtgttgccagaatggctttgaagaacagtgctttggttccattggaacaaaccgttccagcattattggcacatttgccattgcacactggttttgaagaatacaatccaattttcgaattgatcatgaaactatatcaggaaaataaccctgttgtcacaaacgagaccccaaggatcattgagattttcagcgttgtgttcactaaagaaaatgatagagttaaactagaaaaggaatctactctaggcagagaagaaaatatggaaagattgaagcaatttcaaactgaagagacgaaacacaaagtcgttgaactattgaagtatctgaacactacttacaatggaattgttgcccagaacccggtattagctgctgtcatcgcttga

SEQ ID NO: 772 - DNA, 3291 bp, Saccharomyces pastorianus
atgccctttgatgctttgctatcaagccaaaaagatagtgtcaattcccagaacattaccccaatatctaaatctgttcttttggcccctcattccaaccaaccgataattgaaatagccacgtattcagaaactgatgtgtacgaatgctacatacgcgggtttgaaaccaaaatagttatgagaagaactaaagatgattggattaacattacgcaagtattcaaaattgcccaattctcaaagactaaaaggactaaaatattggaaaaggaatcaaacgatatgcaacatgaaaaagttcaaggtgggtacggtaggtttcagggaacttggattccattggattcggctaaattcttggtcaataagtatgaaatcattgaccctgtggtaaattccattttaacttttaaattcgatccaaacaaccctccaccaaagagaagtaaaaatagtatcttaaggaagacttcaccaggaactaagataacatcaccttcgagctataataaaactcctagaaagaaaaataacagcgcatcaacatcgactaccacaacaactacgagcaaaaagggcaaaaagattgtttcagtcaaccagccaaatccaagtcctttacaaaaccttgtcttccaaacccctcaacaatttcaaacgaatccatcaataagtataataactagtcacgataacaacaccatgatgaatttcaacaatgacactagacacagcttaataagtaatattacgaataataatagcaaccaatctaccattattcaacaacaaaaacctattcacgaaagctcttttagtaacaattattccgctactcaaaaacctttgcagtttttccctattccaacaaacttacaaaacaaaaatatgattacgaacaagactaatagtattgaaaacaacacttataatcataacaatgaaaatagcaacagcaacagcaataacaatttgataatagtaccagatggacccctgcaaaatcaacaacagcataacgaatatatgacaaataactttaatcactcgatgatagactctaacacaaacggtaatagcaaaaagaaaagaaaaaaattgaatcaaaccaatgaacaacaatttttcaaccaagagaaaatacagagacactttaagtcaatgaaacagcctttactatggcaatcatttcaaaatccgaatgaccatcataacgagtacagtgacaataatggtaacaacaacaacaccgtagtttccaacggctcctctattgaagtcttttcttcaaacgaaaatgataacagtatgaatgtgtcctcacgctcaatgacaccatttagtgcaggaaaccattcatcccaaaataaaatggaaaacaaaatgtcagaccaggaatacaaggaggcgatattgataatattatcgtcagaaagatcttccgatgttgaccaagcattgttggctactttgtatccaacacccaaaaatttcaatataaatttcgagattgatgaccaaggccatactcctctacattgggctacggctatggccaatattcctctaataaagatgctgataactttaaatgccaacgcattacaatgcaataaactaggtttcaactgcatcacaaaatcgattttctacaataattgttataaggaaaccgcatttgatgaaataatctctatcttgaagatctgtctaataactccggatgcaaatggaagattgccgtttcattatttgattgaattgagcgttaataaatctaaaaatcccatgataataaaatcctatatggattcaatcatattaagcctgggccaacaagattacaatttattgaagatctgtttaaactatcaagataacatagggaacactccattgcacttatctgctttaaatttgaacttcgaaatctataacagactagtatatcttggggcctcaacagatattttgaacttagataatgagtctcctgcatcaataatcaataaattccactcaactaccaacgcgactaacgataacgatactaaaaccgatcaaaaagaagctcgagaattttcccagaagcacaattatcagcaacaacagcaacagcaacagcagcagcagcagcaacagcaactacaacatcagccacaggagccaccacaacgacagaacaacatcaaaattcccaaaatcattaaaacccaacaccatgataaagaaaatcctgctataaatgttactgtaatcaaacaagactcagaaataagtgaaagtcattatttacattccaaccaaccaaattcaacaaacattaacactataatggacgacctgtcaaatctcaattcttttgtcacttcttcagttattaaagatatcaagtctacaccatccaagattcttgaaaactcccccgtcctatatagaaaaagatcacagtcatcatcaagtgagaaggagaaagaacatggacaagagaatcaaaataaaaagaaaagggagtcttcaagtataaaagaaaacgctttgccatcattagactcgccttccacattattacccatacaaacatctccgttgagaaagtattccaaaccacttgcgcaacaaattgacaaattaaatgcaaaggttacttcgattcaaagattaatgggtgaggatatcaagaatctagacagtgaaatagttaaagccgaatcctctatatctaacaatcatcaaagattgaccacaatatcacatcaaataaaggatgctttcaattccgtgtcaacgaaagtttccatagattcgatatcagatttacagtctagaatcaaagaaacctcttcagaattgaattcgaaaaagcagaattttattcagagtttggagaagtcacaggctttaaaactggcaacaattgttcaagatgaagaatcgaaggttgacgtagatcccaattcacaatcacatccggaaaatcaagaaaataaagacacaagtccaatttcgaagtcgagctcttcttcgcccaataataccgaagtgaaaactaaattttctaaggacaagcaacattcatatgataaaaacgaaatgttagagctagccactgaactgacattcttacaattcaaaagacggatgacaacgctgaaaataagtgaagccaggagtaaagtaaattcgtcggtgaaattagataaatacaggaacctaatcggtatcaccatcgaaaacattgattccaaattagacgacattgaaaaagatttaagagcaaatgcataa

SEQ ID NO: 773 - DNA, 582 bp, Saccharomyces pastorianus
atgctacctttatatcttttaacgaatgcaaagggacaacagatgcagatagagctgaaaaatggcgaaatcatacagggtacattgaccaatgtagataactggatgaatttgactctatctggcgtaaccgaatatagtgaagaaagcctagtcagtggcgaagatagtgctgacagtagtaaggctgtgaaactgaatgaaatttatgtcagaggaaccttcattaaattcatcaagttgcaagataatataattgataaagttaagcagcaaattaattccaacaacaattcaaacaataacaattcaaacaacaacggtcccggtcaaaaaagatactataataatagagattcaaacaataacaatagaaataactacaacagaagaggtaataataacaacagtaacaataaccgccgcccatactcccagcatcgtcaattcaacaacaacagcaacaacaacaacaacaacaacaacaatgccatcaatagcaatccaaatatgaacagcggtttaggtggatccgttcaacataatttcaacgcctcttctccgcaaaacgtcgaattttaa

SEQ ID NO: 774 - DNA, 3117 bp, Saccharomyces pastorianus
atgagcagtgaaagagaaacacctgctctctcacagctcaatacgtctgttggtgagaacaaagatgcgtcccaaactctgtcaccggagtatgataataaagggagtataagcgggcgtgagggtggcaatttccccacgtacattgccatcaacgagtattataagcgaatggaagatgaactagatatgaaacctggtgacaagatcaaagtgataactgacgatgaaatatacaaagatggctggtattttggacgtaatctgagaaccaacgaagaagggttatatccagttgtattcacccaaaagataacggtggataggaccccaacgctaatgagagccaagtctaccaagagagtgtatagcccattggcacacgaagatcctcttctctctagcacgtttatcaatgaaaacgactccaccagtgaattacccactccacaaccaattgaaactgctgcctccatttcaagaaatactaatggcaaacttgacagaaacctgtccttgaaaaatacaatgagtgatatagataatgccttacgggagtttaatgaaggctccgagggcgctccggatcgctctatcgcttcaagcagggacgaagctcatagcataactcatgaaacaattttatctacgaccgatgggctggacgtgatcgaagcgaacaacaagccaacaaccagcggatctactaagcctttaagcaacagtatgggcacacaagctactttcattaatggcatcgacactaccaaactgaaccctgttgaagcggaaatgtggacacctgaagaaataacagcatattttatcatggaaggatatgatgtccaatccgcctctaggtttcaaaaacataagatatcaggtagaattttattagaactagaactagtccatttaaaagagctagatataaattcctttggtacaagatttgagattttcaaagaaattgaaaaaatcaaagaggcaattaggacaaatggtcactcatttaacagagttagcaaggctaataataacactaacagttacaaccaattgatgcctcctgcgaacgtcgaccagagggtatcctacaggggccatgtcagaaaaacttcacagtcgttagatgaccttccatcacaacagaattttactgctacccctcaaggtaacagaaattcttcaacaggtaaacatagaccgaaatctttaactcttgatactcaagaaggcgattccagtgctactccaaaaattcagattcctcaagttgtagaagaaattgctagtaatgaatatttgtttgtttccccaagaagggcacccaaacctccatcttatccaagccctgcacaacctcccaagtcacccctcctaagtaatagaaaggcctcaccgtctcccacccaattacattcatggcaatcaccaagttcatcttactcggactcaaaaaaaaatttgtataccgaccaatcttcatcgaattctaattcaaattcccgttttgcactttcaaaaaacaaccaagggaacgggaggccattgtctcctattcctccccccactcttaaagcaatttcaaattctgcagacaaaacgaaagacacaaatacagtatctgcaaatagaaattccgttctttattcaggatatgctgttgactctttcaacagaaaatcttcttattccagtggtgaggaagagcacttccaagaaacgttggatacactcgaaagacccacatccagcatatacgccgatgggtctacaatcgcatcaatgagtaatgctaggccaatacaagacaatgaaaagaagaaaaaaccgacgagacattcttccttgttatcttcaaaatccaaaggtgatcccaaaaggaactcttctttaaagagaagcagtagcgcatcaagaaccagttcattcagaaaaagcacttttatgctaagtccctttagacaacagttcactgaaaatgcggctcgttcttcaccaagtcctgaaaaaaattctatggcttcaacgccactatccccaaccgataacaaatcttccaaggacaaatcaaaagcaagatctgtcagcgccaaagacgctattcatgaggattttacagaagttgtaaaggatgataaaaacaagaggtctgttagtgaggctgtcaagggtgagaccctcaagggaaaaagtttgcgccaaatgactacgagacctttggcaaagaaaaaacaaacatcggcgtttgtggaagggctaagaaacattggcgtcaaagaagcaatgaaaaatgcagacttttcaggttggatgagcaagaagggaagcggcgctatgagtacttggaagacgagattcttcacactgcatggtaccagattatcctatttcagttccacaacggacacaagagaaaggggtcttattgacgtcacagcgcaccgtgttatacccgctaaggaagacgacaaactggtttcattatatgctgctagtacaggtaaaggtcgatattgttttaaactactacctccacagccaggttcgaagaaaggcttaacatttacacagcctcgcactcattacttcgcggtggaaagtaaagaggaaatgaggggttggatggctgcattgatcaagactactattgacattgacacttcagttccagtcattagttcttatactactccaacggtttccttgagcaaagcacaagaaatgctagcagaagcaagagaggagaccaagataagagaacagcaaattttggaaaacgaagaagacgaggaccaattgttatgggatcaacaacagcagcaacaacatcatcaagatggtaaccaaagtcaagctgaccgtacaatttctgcttccacccaacggacttccgatgaagacaataccatatctactccaaatctgtcctccgctaccaatacaaccgttggctcaaatgggttttctagtcctttcttactggcttctgggatgttatctcctggactggctcgcaacaacagtatgcgggggccagataagaagaataaactcgtaacggaggaggactacttcgggcaaaattttgaacacaagggtggcaaaatatag

SEQ ID NO: 775 - DNA, 576 bp, Saccharomyces pastorianus
atggttgtttcatatttatggcaatcatactcttcctccaatttccagtggatttacccattgcataccggtaactgccttcaaaatgcaaagtctccctttaccgcggaactattgctcaagaggaaaagcgatgatatccaggatatccaaaatagcagaatgattgagttgctactgcagggcgcatatgatacgaagagacagcaaacatatatacagggatacattccgagcaggaagaaaaagactcacatcaagaaattcctaaagaagcagaaaaaatcaaggaaaccggtcacgttagaacaaggctgcttgtccggccccgtaactctgcgtttcggaaattttgcaggaattagagatttgagaggtgcgagatgtccgctccacggcataaaacatggcgttcaccccaaacctggagagagatgtgcgtgtcaacaagccactctcttcccaagcccactgactaaactcagtcatgaccagtcagttgcactcgattggcttgggtcctcttcacgctttcttgacaatattgccgatgatttttcatccttgtatttttga

SEQ ID NO: 776 - DNA, 813 bp, Saccharomyces pastorianus
atgacaagtgggcctgataaccaaggtttagaagatgaaaacctacgaatcaagagggcgagaatagaaccgatagagcataacggtgatgaggatgagagctgcttatcaagcatagataatggggtagcagaaaaccgtgaagaagactcagaagcagcagttgaagttgtcggagaaagatttttcgataatgtttccgaggacgatgacacatctctgttcagggcactcgaagaaggctctggtaacagtactgcaagcgccgctccgaacattaccaccaggaatgatgggagaacagcagataacgggggatcggatgcgaacggcaataatgctgccacaacacacgatggggaggcgcatacagtagaagttccttcacaaacagcagacccttcaagtgcttctctcatctctcaagaaataccaccattaatagaatctgctacaaatatcaagggacgaactgtcgacttgactgcagaagccatagacttagacgccgaagagcagcaagtgttggaaatatcagataaggattttcaagacgaaaacaaaacgcctcccaaggaatatggtgcggccaaggactatcggtgcccgatttgcttcgatccgccagagactgctctcatgaccttatgtggccatgtattttgttgttcatgcctttttcaaatggttaacagttccagaacctgcaggcagttcggccactgtgcactttgcagaagtaaagtgtatttgaaagacgtaaggatgataatactaaggaaaaaacaagtcaagaagaaagcgaaaagctag

SEQ ID NO: 777 - DNA, 1356 bp, Saccharomyces pastorianus
atggtgactagtattagatctggcgtattgacgctgttgcacacggcgtgcggtgctggaattttggccatgccgtatgccttcaagccgtttgggctagtgcccggagtggtgatgattgtgatttgtggggtgtgtgccatgcagagtctgttcatacaagcccgtgtagccaggtacgtagcgcccgggaaggcttcctttagtgcgttgactcggctgatcaacccaagcttgagcattgtgtttgatttggcaatcgcggtcaaatgttttggggttggggtttcgtacatgattgtggttggggacttgatgccccagatcatgtccacgtggaccgggaatgcgtggctgctgagtaggaacgtgcaaatatcgctgatcatgcttttcttcgtggctccgctgtcgtttttgaagaaattgaactcgctgaggtacgcctcgatggtggccatctcctctgttgcgtacctgtgtgtcttggtgctggtgcactatgtggctccctcgaacgagatcttaaagttgaaaggccgggtctcgtacttcttcccacgtcaatcgcacgacttgaacatgctgaacactctacccattttcgtcttcgcctacacatgccaccacaacatgttctcgataatcaatgagcagaagtcggtccggttcgagcatgtgatgaagatcccgcttatttctatctctttggccctcgccttgtatatcgccatcggttgcgccggctatctaacgtttggtgacaacatcatcggaaacatcatcatgctttacccacaaagtgtctcgagtaccgttggcagaatagcgatcgtgctgcttgtgatgctggccttcccgctacagtgccatccagcgagagcctccatccaccagattttacaatactttacagaggagaatgctactacaagtactacatcggtggctggccccactggtctcgctggccccaacgaaagctccccgttgatccttaacaatagcctggacatcaacgaggtcatcgaagaagagccgatttaccaacccaaggacactcccttgaggggcaagagctttatcatcataacgtgtggtatcctggttgcgtcgtactgcgtcgcaatctcagtatcatcgttggcccatgtgctagccatcgtgggtgccactggttccacctctatctcatttattttgccggggctatttggctacaagctaataggaacagagcacaaggcggatatgcccctcccaacgagacttttcaagtattccggtcttgccctctttattttggggctactaatcatggttacctgcctgacggcagctcttaaactaaactag

SEQ ID NO: 778 - DNA, 735 bp, Saccharomyces pastorianus
atgtcagctgttgaaatctcccccgatgtgttggtgtacaagtctccattgacggagcaatcgacggaatacgctagtatttccaacaactcagaccagaccgttgcattcaaggtcaagaccacagctcccaagttctactgcgtaagacctaacgcggcggtcgtggcccctggcgagacgatccaggtccaggtcatcttcctgggtctgactgaagagcctgccgcggacttcaagtgtcgtgacaagtttctggttattacgttgccttctccttacgacctcaatggaaaggctgtggcagacgtttggtctgacttggaagctgaattcaaacaacaggccatctccaaaaaaataaaagttaaatacttgataagtccagacgtacgtcaaccatcgaaccaaaatacacaggatagcaaggatgtcgttgagcccgtggcccaagaaagtgcgccaagggaagatttttcaatggtagacgaaaaagaaagccctgttgaactggaaaccgagccacctgttcaaataaagaaagaagaagttccacctgccatccaggaaactgtttcccaagaaaatgagaagcacgcctctaacagcgctccaactacaaagagccaaataaaggaacctgcaaccctgcctgcagaaaacgaatcctccagcatgggtctattcatattggttgcgcttcttatcttggttttgggttggttctacaaataa

SEQ ID NO: 779 - DNA, 1479 bp, Saccharomyces pastorianus
atgagtagcgatgaaggagaatccttcgccacagagcaaaccactcaacaagttttccagaaactaggtaacaacatggaaaatcgagtttgctttgattgtgggaacaagaatcccacctggacatcagtcccctttggtgtaatgctgtgtatccaatgctctgccgtgcatagaaacatgggtgttcatataacttttgtaaagtcttctacgttggacaaatggacaattaataatctgagaagattcaagctaggtgggaaccataaggctcgtgacttttttttaaagaacaacgggaaacagctattgaacactgcaaatattgacgccaagacaaaatacacgagccctgtggccaaaaaatataagctgcacctggacaaaaaggtccaaaaggatatggaattgtacccatcggctttggtcttgaatggccaagacgatacggattctccattggacaccgattccgatgcctctagatcgaattctaaagaaaacagcgttgatgactttttctccaattggcaaaaaccaaactcaaattccaattctagttctaagattaatgtaagttcaggttcactagcctccaataataccccaaagactacagcgaccaaggcaagaagctcaatcttaacagcaagcagaaaaaagccggtattgaactcttcggacaaaaaaaaacactcgattttattatcagcaagaaagcccacaagactaactgctaagaaagtggacaaatcgcaagctgatgatttgttcgaccagttcgaaaaagacgctcaacaagaaaaggatgatgaattcaccaatacatcttctaacgccaaggttagacaaaatgattacgattcccaattcatcaatagcggcagcaaaagcaacaataatgacagtatagatgatatgaatacacagcctgatgaatttagtgacttcttgaatgacgctccaagcaactctgatacaaatagaaaccagcatcaagatactctaacaccgaagtttgctaaattaggatttggtatgaccatgaatgacgctaacgatttagccaaacagcaaaaggaatctcaaaaagtagcccagggtccaagatatacaggaagaattgctgaaagatacggcacacaaaaggctatatcttccgatcagctttttggtcgtggttcatttgatgaggtggtcaacaaggaagcacatgataagttaaagacgtttgataatgccacatcgatctcatcatcctcgtattttggcgaagaagtagacgaatatggtaacccgatcaatggtgatgtgggcgggatgggatccagttcattcgatggtcgcaataccaacggtaatggattcattgatttcaatgctactacagatgatgaattacaaatgttaaaagacgttgttgaacaaggtgcggaaaaattaggaagttatctgagagactacttaagaaagtga

SEQ ID NO: 780 - DNA, 1566 bp, Saccharomyces pastorianus
atgtcccaacgttcctcgcaacacattgtaggtattcattatgctgtaggtcctaagattggtgaaggttctttcggggtgattttcgagggggagaatatactccattctggccaatcccaaactggcagcaagagagactccagcataataatggcgaacgagcccgtcgcaatcaaattcgaaccgcggcactcggatgctcctcaattgagagacgagttcagagcctacaggatattgaatggctgtgtcggaatccctcatgcttattatttcggccaagaaggtatgcataacattctgatcatagatttactggggccctcgttggaggatctttttgaatggtgtgggagaaagttttctgccaaaacaacttgtatggtagccaagcagatgattgatagagtgagagcaattcatgagcatgatttgatttatcgcgatattaaacccgataattttttaatttctcaataccaaagactatcaactgaagggaaggtcaccaagtcatgcgcctcttcttctaataatgatcctaatttaatttatatggtagattttggtatggcaaagcaatatagagatccaagaactaaacaacatataccctaccgtgaaaggaaatcattgagtggtactgccagatacatgtctatcaatactcattttggtagagagcagtcgcgtagagatgatttagagtcactcggtcacgtttttttctacttcttaagggggtctttgccatggcaaggtctgaaagcaccaaataacaaattgaaatacgaaaaaattggtatgaccaaacagaaattgaaccccgatgatcttttatcaaacaatgctattccgtatcagtttgccacatatctaaaatatgcacgttctttaaaatttgaggaagatcccgattacgattatttaatatcattaatggatgacgccttgagattgaacaatttagaggatgatgggcattatgattggatggaattgaataatggcaaaggctggaatataaaagtcaacagaagggctaacttgcatgggtacggcaatccgaatccaagggctaatggtaacacgacaagaaataacactaatatgaactcaaaaacccgaaatactacgccagtgccgacagctaagcaacaagctcaaaacagcaataaggacaattcgaaatctagaatttcatcaaacccacaaagttttattaaacaacaacttttgaagaaaaatgagcccaatagtaaatatattcctgaaacacattcaaatcttcaacgaccaatgaaaagtcaaagccaaacgtacgactctatcagtcatccccaaaattcaccatttgtaacatattcaagcttaaaacccaatcctaaaagaagtactaacgagcataacttaccaaatcactattcaaatttcgcgaataagaatatcaattaccaaagccaacactacgaacaagaaaacgatgtttattcaagtaacgaaaatgaggcattttgttttaggttttataactactgttgctgctgcttttgttgctgttaa

SEQ ID NO: 781 - DNA, 1722 bp, Saccharomyces pastorianus
atgcaagataccaagtattacgaaccaacaaacatttttcgtcaaccagccattaatatcaaaaagcggtcagagaaaaagaaagttttacagtcaattacaacctcatccacatataaaaaatcgtggcaaaataatacttcaaaaatgaactcacccattttacgaaaggcatccgataacttcaatgacttttacacaacaaaaaaattaagatctgattactggaaattatacggtattgatgaagaggagcagttcataccttcagatatctctatcgtggacaacatagtcctagtatccacaatgagcgataaagataacttgaaactcttcgaaatttccagcgttaaaaaactaaaggagttacaaacaatcagtgttcctggcacacccattacttgtatttgcttattacctatggcagatttctcacctagtgttttccgtaaccctcggataaattctagccatgatcaattgatcttgacgggtcatcaagacggtgtggttaatttgatatctacttcgatatataagggttgtgcgaagataataaaaaggtttaaccataataagttcctgaagtctaccgtgtcatcatcaacgccgattctagagatatcaccaaagacagcaccgattttaaaggtttcgccatggaacaaaactggttttgtttcccttttaaatgattctttattcatatacgatttgaaatcgaatacgaattcaatgaaaacacctatatttttgcagtcatacccaggtataaattcctttgctgttaacgacttttacgatccattcttattggctttggttggttcaaagtttggcccaaacggtgtctcgctgctcgatctaaggacaaacttatacattccagatattttagataataacactgtgactggaacaagtgaagaccacttgcaaaggaaaaacacgagtttggattgtgtctggatagataatcattacgttgcgcagggtttgaacgataaaattcaaatttgggatattcagtcttgcgacagcaaacctgtttgtgaactgaatgcgaataaagggtacgttgaaagaataaaatttgataaaaagacaggtttgttgtatagcagtgacgaccaggggtttgttatttgctgggatttgcaaaatttacacaatatgaaatatggggaattaattcatgggtttaactcaattaacctagacgggataaacgaaacattgttaaccaaagaagtctttcaatgtggtaatattattgtaagcggtgtagataataaaaaaatatgcttagagagcaatgagatttcgctcaagggaacagggtgtggttttttgttcttggagacgacgaatgagggaagtttaataactctcgacaacttctgtgaactgggattacatcaaatctgtcaagtgaaatacaacgtcaacactggtaaaccaatcgacattgacgatactgcaaataacgaaatttctgattcatccgttttattatgttgtaatgaaagcgatcaaagtctcacggataattcagacgatatgttctcaaataatggtaattgggattgctcttcagcaaatactattggtgaaggtagattgcacagtgaccaagaagatgttgttcttacgaaaaggatatattccatgaatgacatgtatttaagcgggtctactattgacgccactgctatataa

SEQ ID NO: 782 - DNA, 2430 bp, Saccharomyces pastorianus
atgccttcatcaatatctgtcaagctagtggccgcagagtcactgtataagagggatgtgttccgttctccggacccctttgctgttttgaccattgatggttaccaaaccaaatctacttctgcagcaaaaaaaacgctaaatccttattggaacgaaacctttaaattcgatgacattaatgaaaattcaatcttgaccgttcaagtgtttgaccagaagaaattcaaaaagaaggatcaagggttccttggtgtcgttaacgttcgcgtgggcgacgtcttaggccatctggatgaagatactgctacatcaagtggcagacctcgtgaggaaaccattactcgtgacttgaaaaaatctaatgacggaatggcagttagtggtagattgattgtcgttttatccaaacaaccttcttcaaactcacattcacaaactgcctctggtcatgctgcatcatcgagtacaggcacaagttccactcctcgagctaatggccatacttcgtctgctacccgtaatcattcatcttctcatgcctcgaggggtaccgctcaagcagtggaatcaactttacagagtgggacaaccgctgccactaatacggctgctacaaacaaccgtcccgccagttccgcttctagcggcacaagacagtactcctcattcgaagatcaatatggtcgcttaccacctggttgggaaagaaggactgataattttggtcgtacatattacgttgatcacaacacaagaacaactacttggaagcgtccaacactcgatcaaacagaagctgaacgtggtaaccaattaaatgcaaataccgaattagagagaaggcagcatagaggaagaactttacctggtggatcctccgacaattcctctgtaacggttcaagttggaggtagctctaatataccccctgttaacggtgcagcagcagcagcatttgccgctacaggcggcaccacatcaggtttaggtgaactaccctcaggttgggaacaacggtttactccagaaggtagagcttattttgtcgaccataacacaaggacaactacttgggtagatccaagaagacagcaatatatacgtacttatggtccaacgaatactaccattcaacaacaacccgtatcccaattgggtcctttaccatctggctgggaaatgagattgacgaatactgcccgtgtatatttcgttgatcataacacaaaaacaacgacttgggatgacccaagattaccatcatcattagaccaaaatgttcctcagtataagcgtgatttcagacgtaaggttatatacttcagatctcaacctgctcttagaatattgcctggacaatgccatatcaaagtacgtagaaagaacattttcgaagatgcctatcaagaaatcatgaggcaaacaccagaagatttaaagaaaagattaatgattaaattcgatggtgaggaaggtttagattacggtggtgtttccagagaatttttcttcttactatcacacgaaatgtttaatccattttactgtttattcgaatattctgcttatgataactacaccattcaaatcaaccccaatagtggtattaacccggaacatttgaactacttcaagttcattggtagagttgttggtctaggtgttttccatagaagatttttggatgcattctttgttggtgcattatataaaatgatgctacgcaaaaaagttgtattgcaagatatggagggtgttgacgctgaggtgtataattcattaaactggatgcttgaaaatagtatagacggtgtcttggacctcacatttagtgccgacgatgaaaggtttggtgaagtcgtaacagtggacttgaaaccagacggaagaaatatcgaagttactgatggcaacaagaaagagtatgttgaattgtatacacaatggagaatcgttgatagagtacaggaacaatttaaggcatttatggatggtttcaacgaactaatccccgaagacttagtgaccgtgtttgacgaacgtgaactagaattgttgattggtggtatcgcagaaattgatatcgaagattggaaaaagcatacagattatcgtggttatcaagagtcagatgaagttattcaatggttttggaaatgtgtcagtgaatgggataatgaacaaagggcacgtttattgcaattcactactggtacttctcgtatacctgttaatgggttcaaggatctacaaggttccgatggtccaaggagatttaccattgaaaaggcaggtgaagtacaacagctgccaaagtctcatacatgtttcaacagagttgatttaccacaatatgtcgattacgacagcatgaaacagaaattaacattggctgtggaggaaactataggtttcggtcaagaatga

SEQ ID NO: 783 - DNA, 786 bp, Saccharomyces pastorianus
atgcctcaaaacgattatattgaacgtcatattaagcaacatggtaaaagattagaccatgacgaaaggaaacgtaagagagaggcgagagagtcccataagatctctgtacgtgctcagaatttgactggttggaagggtaaacaatttgccaagaagagatatgccgaaaaggtatcaatgagaaagaagatcaaggcacacgaacaatctaaggttaaaggttcatctaaaccattggataccgatggtgacgctttgcccacatatttgttggacagagaacaaaccaatacagccaaagctatttcttcatcgattaaacagaagagactggaaaaggctgacaagttttcagtaccactaccaaaagttcgtggtattagtgaagaagaaatgtttaaagtcattaaaacgggtaaatctagatccaagtcatggaagagaatgataacaaaacatacttttgttggtgaaggattcaccagaagaccagtaaaaatggaaagaattattaggccaagtgcattgagacaaagaaaggcaaatgtgactcatccagaattggccgttactgtcttcttaccaattctagctgtaaagaaaaatccccaatctccaatgtacactcaattgggtgttttaaccaagggtaccattatcgaagtcaacgtttcagaactggggatggttaccgccggtggtaaagttgtctggggtaagtatgcccaaattacaaatgaaccagatagagacggttgtgtcaatgcggttttgcttgtatga

SEQ ID NO: 784 - DNA, 1344 bp, Saccharomyces pastorianus
atgtctttatatcctttacaaagattcgagtcgaatgacacggttttcagctacacgttgaactccaagcctgagctggtcagcgagggctgtaataatgacgaccaacgcttcactctccaactcataccaaacgcaaacgccaatgctaaagaaatttataataacaatatcgaaatcatcaatgatctaacaggcaacactattgccgatggatcagcaatcgctacgacatcgaaccagcaggaaaggaggctttcaatatcggattatcgtaccgagaacggcaactattatgaatacgagttttttggtaaagcggaatttaacgagccactatttagtaacaatgtcgtggaagatgacggggagaatgacgtcgacgtgaacaacaacaacgacagtgatgtattgatggtaagcgatgatgatttggaactcgacgaaagattctccttccataaacagcagtctcttgacggactaaatggggtcactagcactaataccttaaagaatctagaaattcatgagtttataatagctccaatcgataataacgatgatgatctcgaggattcatttactaatgcgcctcaatcaaagaagaaagtaaaggactacttcaaactaaacatatttggcacaaatagtagtagcaatagcaacaacaatagcctgggtcccgaacttacttcaaacgaagtctctccctcacaaaaaatgttcaagaatagatttttcagaagcaggaaaagtactcttatcaagacccattctcttgaacaagaaaacgaagtactaataaactccgcctttgaatcgtctttaagtgacgataacgatgaagatgatcatgccatcataaatcctttgaaattgcttggtaataataaggaagcttctactcacatcgcaagtaaaatctcaacgaatccgttcaagtcaaacaacgattttgaagtacccgaaccaatctcagatccaagcgatgattcaaagaaagatctactatctgttatatcagggtcttcctctccttcttctccttctgcaccatcaccttcaatgtcgtcctccttctcgtctcatagtctaatatcaagaaagaaggcaggtagcacgcaaaagacccgtggaagaaaaccctctttaatcccagatgctacaaaacaattcggttgtgaattttgtgatcggagattcaaaagacaagagcatcttaagagacatgttagatctttacatatgtgcgagaaacctttcacttgccacatttgtaataagaatttcagtagaagtgacaatttaaaccaacacgttaaaactcacacctctttataa

SEQ ID NO: 785 - DNA, 360 bp, Saccharomyces pastorianus
atgccaaaaaagagagcttccaacggtagaaacaagaagggtagaggtcacgtcaagccagtcagatgtgtcaactgttccaagtccattccaaaggacaaggccatcaagagaatggctatcagaaacatcgttgaagctgctgctgtcagagatttgtctgaagcttccgtgtaccctgaatacgctctaccaaagacctacaacaagttacattactgtgtctcttgtgctattcacgccagaatcgtcagagttagatctagagaagacagaaaaaacagagctcctccacaaagaccaagattcaacagggataacaaggtttctccagttgccgctgctaagaaagctttgtaa

SEQ ID NO: 786 - DNA, 5262 bp, Saccharomyces pastorianus
atgatcgtgttacagccatcatccagtgtttgttatccattaaacctgcctatcgcgcccggaccgcatcttgatgaagcaacaagaaagaaactcacattggagtgcaggaccggtgctgctgtagaactagcccgttcaggtgtattcgtacatggcggtctcacactgcctctaaatctgacagttataaactctctgcaattgcaaaaagaattaatattgtattttggcaagcataaaaatagaaatatagattttaaaacattagctgattggataagccctgagatattcttcctcgatttgatttcaagaacatggcaaagagtattaaccacaatagatacaactacaggaggcgactcgaataaagacctgcacttcaaagagaggttgctccattcgatgtgctttacagaatcaaacatctatatttttggtgggctcatagtatcaccccaaaatggctatgaactggtagggacaaacgaattatggaggctagatctcaagacaaagtgttggtctttggtaagtaagaaccctcaaataacaagacgctttaatcataacatgcacatcctaaacgaaaacaacgaaaaccaagatacaaagctagttgtagtaggtgggttgaataatatggatattccaataaaaaaaatcgatatatttaacctacgaacaaacacctgggaatcagaatcaaaatcagaaacgttaccggatttaaaacggtcgtccaagatttgggttaacattgacggaatgccaatttctttatctcatgattctaatttttctgttttaatcgagaataacgaagccgaagttccgacgttagcattatattatcctcaagacacgaaaaagacatccaggaggggaaccaacgatgacagcttttcgaactacattcatagtgtagatgaacaatcaagcgtaccaaaacatccacaccatggtcacggtgatctgaggtactttgaaggggaagacgcagaaagcgattcaattaaaacactaatgtcaccaattgtaatcttaccattgctcgcaaaatccgagggtgctagaatgacatcgaatcctactcaaaacaacaaaggaaattctatcctgcaaataccgtttcatttacaatatccttcgggtagttacttcaactacaatattgttgtcatagggttctatccagaccctcatccctcaaatttgcattgttttatttataatattgctagtggcaaatggattaaagtaaacataagctgcactgaatgtagtacgaatacgcatagattttggaaactgttaacctggaaatcacatcatcaagctttattgcttggtaccaaatccaacgatttttgttcacctagcgttcaaaaattcgatcacattttagcattttcgttaccaatgttaaatgggtacaataagttaattaatgaaaaaaataatggtacaaataatagtacagccatcaatcgtaaccccaagttgaacttgagtctctatgaccacctcccattccctacttcaccaataactgatcaggaatgctcgcacaccataactaaagcgcacgccgcagatgactctaggctcccagactctgcctcaagcgcaacctcacaatttgaaaattattctcgctatatcactgttccattggaaatggaatcaacaagctcgatatttccatcatatgctatggttttaggtaaagatgccttagaaatatttggtgaaacgttatccgattttgaattccttactgctgatggtgattcgatcggtgttccagtatacttgctgaggaaaaggtggggaagatattttgattcccttttatccaatggttacgccaatacgtcattcaactatgaaataaatggagacccttctaatattattagtttttctcctcaccctgtgtcaaaggccgcaaagtttgattactcaaaccaatcgtctaatggatccttggaaaaactcttttcaaaaacagaaaatagcaaatcaaacagtaatataaacattaaaaaaccacatagcgtagattttacatcatcaaggtcctcacctaaacaacgggccctttcgcatagcaaaacgtctcctttagaaccaacattcttaacgaatgatgaggggaatagagcaaacacaccaaagcaggaagaaattgccaatagtgacctgcaaaacaacagcacttccaacagtaggccaatatccaccacttgttcttccacaggtatggtatttagggtcccattccaggatataaagaattcgaagttggggctttctgaacattctagccacactacgcgggcaaactctgcttcacctccccccgtacgtgaaaagtcaacattcgataacactagtaatgacgtgctttccaatacacgcccatcatatcgaggggcctcaactgtaggagcaactagaaataactcaatagatgacgtcttttcatctattcgtcgcgcctcacatcctcttcaatctcatatcatggcgaaatcttcgcccaatagcatatcaaatcccagcccagaggaagagtcttcgtcgcgtagaaaatcgtctgcattaagattcatagctagttcacacaagtcgagacaaccttcttttgcctctaccaatagcactgcttctattgtaagttccacttcaggaagaagacgaaactcaaatcaagtctctcatttgggaagttcatcaagttcatctattttgcctgtgttaaatattcagctacctccacaagaaaagattccgctagaaccgccgccgccggttccgaatttaccttcaagaagaagtagctctttggcagattatgtccaatttagcagagatagcccaatcgcgtcaagaggctcttcccattctactagaaaatcaagttcttcggatataaggcgcatatcaaactcctctttactgaggagtactctagattcacaattactgaataattcatgtggtaacgatattccttatgaagcaagcattgaagaatatggtatgattaatggaagaggtgaagaagatgacaaagacaatggagactataactgttttttaccttccaatataaggcctgtattttctacaataaatgcagtaagtataaacggtgattttaaggaaggtgagcttatttctgcaaagtcgtatataaatagcgaaaagggtagacgactttcttatatttcgaaccctgaaagtgttgaaagtactaattcgaacaacaacgcaatcattgaactagagcctttattaacgcccagatcgttatacatgccctggtctactgcttccgtaagagcatttgcagaatttttttacaccgcacggattaatggtaagtggctattagcaccagtgactttggacttactcattatggccaaaatttatgaaattcctattctatatgaattgattacagaagtactatacaaaatagccagcaaaaaggaggaaagtcttcttgttacttgcgaggcgttacttaatttatttcagtcaaaaatctcgagatattgcaatgaaaatgaaggcaaaataaggaggatgttagattctaatgaatcatatcaagatattctggaaataaaaaaatcgctagtaaacatagacaacggatacattgatccataccttttacgaaacacgtctatggcacattcaacagacgacagtaatgtggataccgaaacgaccgatatgcaccgtacaagagtttctagtttaggatctcttgccagcagggccgttcccactgtttttgccggtggccccagagacagccataattctattggttcaattgcttttcctaacagttcaagtgttcaaaatttccggcgctctgtatctttattcagtccaacagcgaagaagaaatctagcttaagtaaagaaccaggcccgctagatagctatgatgaagctactggtgatatccgcaatgacgagacggtaaagcaacattcaaaccttccaaggacaaatagcatcaaccctttcattcataggacatctttggaacccacaaataaattccctaatgaaaatgatgtcgggagcagttcaggcaaacctttttacgacaaaaaagagcaaatcgagcaaaccacgcttcagagcatatcaaatccagataaaagtaagatttctacatcgcaaaaggggagcagtagcgatgaaaaagatttgcaggggtctaattatgcatcgaaaagcagggatacgcagggggtcggaagttcatccaatttgaagacaaacacatttgttcgtgatgaatttgatagtgactcgggctcctcctctcactccgattcagatgatcttgattcacagctaggtattttgccttttacaaaaatgaataaaaaactacaagaacagacatcccaagaatttgatgattcgattgatcctctctataaaatcagttccagcacaccaggctcttcgagattacatggatcattttccaaatatattaagcccctttcgcaaagagaggatgctccagaatatattaatatttcaagtttggaaaacatggtggcaccaaatgcattgccacctgttgattatgtcatgaaatcaatttatagagtttcagtgttagtcaatgacaaaaacttgatgatacgtactaaagaagcaattggattgtcaaaaattttgaaaagattgaaaaaaaaagtactgcaagatatttcacagatggacgatgaactgagagaggctggtaaaccagtggatattttcccacgaggatcctcgtctcctaccttgagcagacagcattctgatattacagtactttcaagacaacagggaaatgcaagaccaagcttgaaattggcgacaagttccccgatttcagaagcattcaagaagacctcgagcaagtttatccagccgggttcggctcaaatttctcctagaacgtctgtgagtgattatactgcatctcaacaaaggagacaacatatgaataagcgatttagtacccagacgacacactctacatccgctttattcatgaaccctgcaatcatgccccctgcagtaaatgctgggcatagggagagtgaaggagagaatggggaagggtttgcttccactaccaaaaataacaataaggaagacgcagcttcaattgataaagataatagcggagccttgtttcccttttttggcaaacgaaagtaa

SEQ ID NO: 787 - DNA, 1356 bp, Saccharomyces pastorianus
atggatcaagagactattgatacagactacgacgtgattgtcctaggtaccggtattaccgagtgtatcctatcaggtttactctctgtagatggaaaaaaagtattgcatatcgacaagcaagaccattatggtggtgaagctgcttctgtgaccttatctcaactgtatgaaaaatttaaacagaatcctatcagtaaagaggaacgggaaacaaagtttggtaaagatagagattggaatgtcgacttgattcctaaattcctaatggccaatggggaacttacaaacattttaatacatactgatgtgactagatacgttgacttcaagcaagtgtccggttcctacgtgttcaagcaaggtaaaatctacaaagttccagctaatgaattagaagccatttcatcaccattgatgggtattttcgaaaagcgtagaatgaagaaatttttggaatggattagctcttataacgaggacgaaatgtcttctcatcaaggtttggatttggataagaataccatggatgaagtgtactacaaattcggcctaggtaactctaccaaagaattcatcggccacgcaatggctttgtggaccaatgacgactatttgcaacaaccagctagaccatcattcgagagaattctattatattgccaaagtgttgcccgttacggtaaatcaccatatttgtatcctatgtacggattgggcgaactcccacaagggtttgctcgtttatcggctatttacggtggtacttatatgctggatacaccaattgatgaagtgttgtacaaagaaaatacaggtaagttcgaaggtgtcaaaactaaactcggaactttcaaagctccattagtaatcgctgatccaacttacttccctgaaaaatgtaaatctactggccaaagagtcatcagagccatttgtattttaaatcacccagttccaaacactagtaacgcggattctttacaaatcatcattccacaaagtcaactgggcagaaagagtgatatatacattgccattgtttcagatgcgcacaacgtttgctctaagggtcattatctagccattatttccacaatcatcgaaactgataaaccacatatagaattagaacctgcctttaagcttctaggacccattgaggaaaagttcatgggtattgctgaattgtttgaaccaaaggaagacgggtccaaggataacatttacttgtccagatcttacgatgcatcttcccactttgaatccatgactgatgatgtcaaagatatctactttagagtaacaggccatccattagttttgaaacaaagacaagaacaggaaaaacaataa

SEQ ID NO: 788 - DNA, 444 bp, Saccharomyces pastorianus
atgtctaaggcgtcaaacaagacagatgatgatattgtcaggttgtcgcaggctatggatgtcttagccaagttaattatttcgaagcaaaaggatggatctcagttacaggtggagtataagcacaagttaaaagaattggaaaaggtcattaatctactgttaagtctgaatgacagcgccggcaccagcgtgatggacgccaatggtcttgacacagtgctgcggaacggcatcgaagttctggaaagagacgatcggagatacgctctgatacccataaaacccaaatatgaaggcgattcaacggatacaccacaggatgcagccagcaagaagagtgataagaagaaaaagaataagataaagtgttctttctgtcaccagcccggacacacaagagcacgttgcgaaacgagattggcacaaccgccaaaggaataa

SEQ ID NO: 789 - DNA, 681 bp, Saccharomyces pastorianus
atggcgacgattgaagatataaaggaagcggcgttaatccctttccaaaagcacaggcaactttccatacatgaagcagaggtaataactctagagatcatcggtctactgtgtgattcagagtgtaaggatgaggaaacattgaagtatttgagtcgatttctcactcccgatatgtatcaagacctcgtggacgagaggaatctaaacaaaaggtgtggatatcccctttgtgggacagcaccagaacggatacgtgatcccttttcaatgaatgacactaccaagaagtttttattggaaaataacccatatgcatatttatcacactattgtagcaaatttcactttagatgctcccagttttaccaagtacagctatcagatgaagcattatttgcccgtacggggattcatttgtttgaagaccccgaacaggacaagcatgatgtagatttcaaaataaccttgttcgaggagttattaagggaaaaggcatctgaagatgacatcaaatcgttgatatcaggtctaaaaaaattagggttgaatcctgatgatgataatacagataaaagcgatgcagaattagaagacgatctatcaaaatggttagcccaaattaagattgttgaaaatgataatccaagcgttttaggcgatttcaccagggaggaatga

SEQ ID NO: 790 - DNA, 1671 bp, Saccharomyces pastorianus
atgcaaaacaaggatacgggagtagcgaaggacacagttaaaaagcgtttacatagaaggaatagtgcaccgtcagctatacacataatatctcaactggacagaaaatggtccttcctatggaacactattgatagacgcaagagtgttgaagggaaagaagataggagtgaagcggaacgtgaggatgaacaggaagatgattatgaattagagcaattgctaaacatggtaaggatacccatgtttttggagaaattcatgctctttgcacttttgacaagtttggactgtttcttgtattactttacagtgttaccgataagattgattaaggggtacgtaaagcagtttaagaagtatcgtcaacattaccgcttgcaacaaagatctggacacataccaaacgtaccatttagatacgagataacctcaagggaatataaagaaaggtgtatgattttcatcataacaatttcgtctattttgttgagcaaattggatacctcaaaactgtaccacaggataaagcgacagagtacgatgaaactgtatatgcttttcagtgtgctggaaatggcagacaaaatgttggcaagcttaggtcaaagcctgctaaccgttatgctttccaaaaaaagttctacacgcatactgccgcataaatgcttattgttgtcaatatgcttggcatatgttacagtacatggttatgtactggtttaccaagcgatctcaataaacatagccgtaaattcatattccaatgctttgttaactttgttactatctatgcaattcgcagagattaaatcatctgtattgaaaaaatttgataaagaagggtttttccaaattactattgcagacgtggtggagagatttaaactaacactgttattgtcaataattggtgtgagaaaccttcgatcatggacatcttcactatcaagtacaagtaccaatttatggagtctagggtcaccagtaacagtagtcatcaacatcctctgcgggccaatggttagcgtcgttggaagtgaagtaatagtggattgggccaagcacgcctacatcacgaagttcaatcggatccgtccacagatatacgataagttctattacatcatatacaaagactactccacaagaacgcacaagctagaagatagattaggattgtctttacctgcgtttgttgtactattcattgtcatggtcaggccgacgcttttcaaatcaccggagtcctcttaccttccattattattcagggttttcttcataggtgcatcggtgttttcgttagccttactgaccaaatttgtgctggatcttatcctaatcaaatggggcaaacgcatcgagcaacagtccaaatatcaaaatctcaacacagcggtcacagaaaatgaatacgtcccggggctactctcgggtggcatgggcaagatcgacatcgctacacgaattacattgcattcagaacacaacaaagaaaatcaactagggaccccgccaacgtctccaatacggaaaaaggaaaatattttgcctggcctacgtactcctcccagtatcaatgacattagaagacaaaaggactccaaaagcccacggtcactcgagaatgtcgctcgttataagatggtttctaaaagaatatggtag

SEQ ID NO: 791 - DNA, 1461 bp, Saccharomyces pastorianus
atgctttttagaaacatagaagtaggtagacaagcagccaggttattaacgagaacctcgagtcgtttggcctggcaaagtgtcacgacctcgagagccctttcttctattaaacaacaggtgaggaaggttccatcatttagttttaagacatctacgagcacccgtcctttttccttttcttcccctgttttgagaccacacgttgcttcagagtcaaaccctatggaatcgcgtttgaaaacttcaaagaatgtcgcttactggttaatcggaacttctggactggtttttggtatagttgttcttggtgggttgactaggctgacggaatcagggttgagtattacagaatggaagcctattacaggtacgctgcctcctatgaaccagaaggaatgggaagaagagtttatcaagtatagggagtcgccagaattcaagttattgaactcccatatcgatttggacgaattcaagtttatcttttttatggaatggattcacaggttatggggccgtgccattggtgcagttttcatcttaccagccgtttattttgccgtgtccaagaaaacctcaggccatgtcaataaaaggttgtttggattagcaggtttattggggttgcagggattcgttggctggtggatggtgaaatccggtcttgatcaagaacaactagatgcgagaaaatcaaagcccactgtttctcagtacagattgactacacatctaggtaccgctttcttcctgtacatgggtatgctttggactggtttagagattttgagagaatgtaaatgggtcaaaaatcctgtccaagccttaagccttttcaaaaaattggatagcccggcaattggcccaatgagaaagatatctttgggtttattggcggtgtcttttctgaccgccatgagcggtgggatggttgccggtttggatgccggttggatctataacacttggcccaaaatgggcgaacagtggttccccagttctcgtgaattaatggacgagaatttctctcggagagaagacaagaaagatttatggtggagaaatttgctagaaaatccagttacagttcagttggtacatagaacctgtgcctacgttgcattcacatctgtgttagctgcccatatgtatgccatcaagaagaaggctgttattcccaaaaacgcagtgacttccttacatgtcatgatgggcgtcgttacattacaggccacccttggtattttaactatattgtatctagtcccagtttcattagcctctatccatcaagctggtgctttggcattgcttacaagttctttggttttcgcctctcaactaagaaaaccaagagctccactgagaaacatgatcattactttgccacattcaagcaaagtcacaagtggcaaaattttaagcgaagcttccaagctagcctcaagaccattatag

SEQ ID NO: 792 - DNA, 1275 bp, Saccharomyces pastorianus
atggatttgacaatttcaaacgagattactggtgaaatatacgggccaatagaagtaagtgaggacatggctttgactgatttaatagcgttactccaggccgattgcgggtttgacaaggcaaagcacgacctatactataatatggatatcttagactcaagcaaaactcaatctttgaaagaattagggctcaaaactgatgacttactattgattagaggcaagatttctgattctattcaaacagatgctaccaatatgtccgacgaggtattcgttgaacaattcagacaggagttgctgagtaatcaaatgctcagatcacatcttgtatctcaaatccccggattgaatgatttagtaaatgaccaacagctctttaaggaacgattgggcccgctcatcttgcagagacgttatggtggtcaaagcaccgcaatgaacccgtttggcattccgcaagatgaatataataggctaatgtctaatcctgacgaccctgacaataaaaagagaatagcagagcttgtcgaccaacaagcgatcgatgaacagttgcgcaatgccatcgaatatacaccagaagtattcactcaagtccccatgctttatattagtatcgaaattaataactatcctgtcaaagcatttgtagacactggtgcccaaacaaccatcatgtccaccagattagcggagaagaccggcctaacgaaaatgattgacaagaggtttattggggaagctcgtggtgtaggaacaggtaaaatcattggtaagatccaccaagctcaagtcaagatagaaacgcagtatattccatgtagttttactgtcctagatacagacattgatgttctaattggattagacatgttaaaaagacatttggcttgcgtagacttgaaagataatgttctcaagatagctgatgtggagacaaagtttctaagtgaagcagaaataccaaaaagttttcaggaggaattaccaggaccaacgtcggtcgcatcttcgtctaacaagcctgcttcacctaccaagacaagctctagtttgcagccgcaacccggtgctgtaccggcgcttgctccaaagacaggcgtaagaccaacggctacaggaagaaccacagctggtgttacgagaatgttccccgaaaacacaatcaaacagcttatggacttgggattttctagggacgctgttgtcaaggccttaaaacagactaatgggaatgcagaatttgcagcatcgctccttttccaatga

SEQ ID NO: 793 - DNA, 2376 bp, Saccharomyces pastorianus
atgggctcagagcaaccgtacagcgaggccggagaatccaccaaagatcggttcagcaggctgacgcatctcgtgcaggagttcctgcaagatgacgacgtgccacaagagttcgtgcccttgctccaagagtgcgcagagatatgggccagctatacagacgcatgccacgacatagctatgcaggctcccagagaggacgctggccatttgtcgaaggcgtacctccggttgaatgaaacggcgttcatttactacatgattgtgcacacgatcttgaacgatagtgttcctaagctaggcgggttctcgaacgccgacgacaagaatgcttggcatttgtatactgagaggcttcgcgctttacagaacgaccctaatattgggaaaatacgtagcgttattggaaactaccctaaactggcgcccttgcaatctatagaccccagcaagttgagctcgttgttgcatttccatgacgacgcattcttgctcgtcgatgtgcggcccagacccgaattcgtcaaggcccaaatcaaatgcaaacatattatatgcatcgaacctgtttcgttcaaggactcttatacagaccagctggtggaaagggtctccttgaccacgtcaccacagctggaaattgaactcttctccaaaagaaacacgttcaaatacatcgtactctacactgatacgcaatcgcaaggagacttccagcaaaggcaaacacgcattcttgccaacattctgtcccaacattctgtagcgaaggtgctcattttggaaaaagggttttccaactgggtcaaactaggtggcgcctaccaaacgttttctgctggacaaactcaactcgcatcgccgtctccgttgccatcctctgccattccaggcacatctgcaggttcatttagccagacttctcgctctccgcccagggggaaaagtcccactttagtgtcaatgaaggcgcaatctcaacctttacaagcaaccgtccagactcctcaagtgcccttatactacccagaaatggccaccttatcacattttaataaagactcttccgttttgcacaccctcagccctcatcctttaattgccgtccccaaggaaaagccatcaacgtttgtccatgataaggttaccagcatagaaacgctgtctccaggtccccagctacatcaggccaatgtgattccgccgcgtattccgcctttaccgcaacagaatttgtcgctctccaggccgcctgttcagaacagcccacagatttttgacttggattttattgtggggttagaaaatatgggcaattgctgctacatgaattgcatacttcaatgtatggtaggtacgcacgacttgactcgaatgtttttggacaacacttaccttaattttatcaacttcgataatatgagaggttccaagggattgttagctaaaaactttgccaatttggttcatactatgcacaggcatggtgcgttcaagtctccgaatgcgagaatagccccggtccagaccatccaattcaagaagacttgtggccatatcaactttatttacagcgattcgatgcagcaggattgtcaagaattctgtcagtttttacttgacggattacatgaagatttaaatcaaaatggtggcaaaaaacatctgaaacaactgtctgaagaagaggaacggatgagagaaaacatgtctatacagaaagctagcgctcttgaatgggaaagatttttgctaactgatttcagcgcagtaatagatctgtttcaaggacagtacgcgtctagattacaatgccaggcctgtgaacatacttctacgacataccaaactttttctgttctttccgtccctgtcccacgcattatgacctgtaacgtgttggattgttttagagaattcactaaatgtgaaaaattaggcatcggtgaacaatggtcgtgttctaaatgtctaaaaaagcaaccttccactaagcaacttaagattaccaggttgcccaaaaaactaatcattaatctgaagagatttgataaccaaatgaataaaaacaacgtgtttgtacagtatccttgtttcttggatcttacaccatactgggccagagctttcaatcatgaagccataattgatgaggacattcccaccagaggccaaattccgccattcagatataggttatacggggttgcgtgccattcaggaagcttatatggtggccattacacatcatatgtctttaagggtcctcagaaaggttggtactttttcgatgacacaatttatcgacctataaggtttaataatgaatttattacaccaaatgcatatgttttattttacgaaagaatcttttga

SEQ ID NO: 794 - DNA, 1221 bp, Saccharomyces pastorianus
atgcctaacaaagtttttaacgtggctgttttcttcgttgtgttcagagagtgtttggaagccgtgattattatctccgtgctgctgtcgtttttgagccaggcgatcgggcacaaggacccggtgttgtaccgtaagttgaagatccaggtgtggaccggggtggtgctcgggttcatcatctgtctggccatcggtgctggtttcatcggtgcgtactactctttgcaaaaggacattttcgggactgccgaggatctgtgggaaggtattttttgtatgatcgcgacggtaatgatctccatgatggggattccgatgttgagaatgaacaagatgcagagtaagtggagagtgaagatcgcgcggtctttggtcgaggttcctcaccgtaagagagactacttcaagatcgggtttttgagtagaagatacgccatgtttattctgcccttcatcacggtgatgagagaagggttggaagcggttgttttcgttgccggtgccggtatcaccacacagggctcgcacgcctccgcgtacccgctgcctgttgtggtcggtttgatttgtggtggtttggtcgggttcctgttgtactacggtgcctccaaatcttcgctgcagattttcttgatcctgtccacctcgattttgtatctgatttccgccggtcttttctcccgtggtgcttggtactttgaaaactatagattcaaccttgctagtggtggtgacgcctccgaaggtggtgacggtaatgggtcttacaacatcagaaaggccgtgtaccacgtcaactgctgcaacccggaactggacaacgggtgggatatcttcaacgctttgctcggatggcaaaacaccgggtacctgtcctccatgttgtgttacaacatctattggctggtgcttattatcgtgttgagtctgatgatctttgaagaaagacgcggccacttgcccttcgccaagaacttgcagatgaaacacatcaacccaggctactggatcaagaacaagaagaaacaagaattgaccgaggagcaaaagaaacaattgttcgccaaggtggacaacattaacttcaaccaggacggtgaaatcaacgtgcaagacgacgaggaagaagtccctgaacaaaccaccaccagccgttcctcgtccgggaacgtcgtcatggacaaggaggccccacacgtcaaaatcgaatccatttaa

SEQ ID NO: 795 - DNA, 723 bp, Saccharomyces pastorianus
atggccgatgaggaacgtttaaaggagttcaaagaggcaaataaaatagtgtttgatccaaataccagacaagtatgggaaaaccagaatcccgatggtacaaagctagcaactacttttcaaagtgaagaagacataaagagggcggccccagaatctgaaaaggatacatctgccacatctggtattgttccaacattgcaaaatattgtggccactgtgactttgggttgtaggctggacttgaaaacagtggcactacatgcgcgtaatgcggagtataaccctaaacgtttcgctgctgttatcatgcgtatcagagagccaaaaactacagctctgatttttgcatcggggaaaatggtcgttaccggtgccaaaagtgaagatgactctaaattagccagtagaaaatatgccagaatcattcaaaaaattgggtttgctgccaaattcacggactttaaaatacaaaatattgtcggttcgtgtgacgtcaagtttcctatacgtttggaagggttggcattcagtcatggtactttctcctcttatgaacccgaattatttcctggtttaatttatagaatggtgaagccaaagattgtgctgttaattttcgtttccggtaagatcgtccttaccggtgccaagcaaagagaagaaatatatcaagcttttgaagccatataccctgtgctgagcgaatttagaaaaatgtaa

SEQ ID NO: 796 - DNA, 250 bp, Saccharomyces pastorianus
gccgatgaggaacgtttaaaggagttcaaagaggcaaataaaatagtgtttgatccaaataccagacaagtatgggaaaaccagaatcccgatggtacaaagctagcaactacttttcaaagtgaagaagacataaagagggcggccccagaatctgaaaaggatacatctgccacatctggtattgttccaacattgcaaaatattgtggccactgtgactttgggttgtaggctggacttgaaaacag

SEQ ID NO: 797 - DNA, 250 bp, Saccharomyces pastorianus
tggcactacatgcgcgtaatgcggagtataaccctaaacgtttcgctgctgttatcatgcgtatcagagagccaaaaactacagctctgatttttgcatcggggaaaatggtcgttaccggtgccaaaagtgaagatgactctaaattagccagtagaaaatatgccagaatcattcaaaaaattgggtttgctgccaaattcacggactttaaaatacaaaatattgtcggttcgtgtgacgtcaagtt

SEQ ID NO: 798 - DNA, 1266 bp, Saccharomyces pastorianus
atgcagaaatttgatttagagctttcaagaaaggcaaaccctctgctcttcagtccggaacgatacgaagaatatccactaaagtacgatgaactaaaggaatatctcttttcacaaaacccatctcatcctcaccataacaataggccatacacctcagttgattactttgattatctattatatacaagtaaaaatgacaactcagaaatagacctcgatagaaagctggtatctgaatttgcattatattacgttcagaaaaatcgccgcaactctgatgattcagcgcccacgcttaatgatttattgaaattaaaacttggctctaaggaatggtacgaaatgatgctagaaattcttgaatctatcaacaccacagggatgaaccagctaaccagagaaaacaaaaataacagtttccccaattctaaaagggccaactcctccaccaacacggccggtgttgacaacttcaatagcagtaccaatcacgctgctgatgctaccgatgacacggatgaagtgctgcaagaattgacctcctttttgatgtcaaactctattcaaaaaggtatcgatatcaaacccatcccattagacgaccctgtgaattttttgaaaaatggtataaattcaatcttgaacacttgtgtcaacctggaaaagactacaccgttactatccgcttcatctaactcttccgcagatcaagagaaaaatacttctaacaaactagatgagttggagacggcgtttaatgatttgcaactggcacataattttttgaccaagcaatttgaaaacgatcgtgccgaatacgtacaagacattgaaaaactgacacgaactaacagggagttgcaagatagactactgaactatcattcgaatttgaataaaacagaaaaaaaaatatacgacttagaacaaatgaataaagaattagaggaagcaaacagcaagttgagttcaaacaaaagtaattttagtatatcatcaccggtgagctcgccagctacgtgggatccggcttctccctcttctataggaagtccaacaggtggctctggatcacgctcactttcaataatgacaggtgaatttaaaaaagtgttgacgagtacgcaaagaaaatatgaaagggaactggccgaagaacgtgaacatagatacaaactagaaaaggaattagctatgctgaaaagtgaaaaggaaaacacctcattcgcactcagtgatgcgcaacaatcagatatgctataa

SEQ ID NO: 799 - DNA, 432 bp, Saccharomyces pastorianus
atgttgtctaacgcaaagttcctactaccattggccatggcctctaccgctttcgggttggtatccaactctagctcctctgtcattgtggcgccatcgagcgacgctttcatcggcggtaacggcactgctacctcttcttctgttccagttttctacaactctactgctaccacaacacaatatgaagtcgttagcgagtttactacctactgtcctgaaccaaccacattcgtaacaaacaacgctacatacactgttacagccccaacgactctgacagtcaccaactgtccttgtactatcgagaagccaacttctaaaaccacagcttcctctacacatgacgtggaaacaaacgtcaatgctgctaatggaaaggtaattccaaacgccttgggtttggccggggcagttatgatgctattataa

SEQ ID NO: 800 - DNA, 783 bp, Saccharomyces pastorianus
atgctgagtattacgagaagactgatgggcaccgacgtgcgctcgcggctcctgctgagcagtctcaacggagacatgccgggtgcgctgctgctgctgcgccagcagcagcaggccagcatggacgtggagctgctacacacggtgctggcgcgggcgacggcgctagcacacgtcgaaaccatagcgtacgtgtggtaccaccacgtgcagccgcggcggctggcggtggagggccgcctgttgtgcgacatggcgggcgtggccctgcaccaggacaagctgttcctgccggcgcagttcctacagcaccaccagacgatggggctaggccgtggcaccagcgccagcgccagtgctgaggcccaggcggtggagttcgagctccgcagggtcaaagtggaggcctttgcgcgcggaactatgcactccacggctcttagcgagaagtggaaggtgttcttgcaggagatggacacgctgccggggcagccgccactgcggctgcgggacttcccgcagttggccagggcggtgggcgtagccgcccagctacagcagccgcaggagcaggcagccgcgctggcgctgtttgggcggcaaccgctggtcgtgaagaacgaatggtcgctgccgctactgttgagcgcggtcctgtggcatgtgcccggcccagcgcaggcgcgacgcgttctagcggagtttcggcagtgttatcgcgggctgccgctgacggatgccgaggtggtgataaagagaagaggattcgagattgatacttga

SEQ ID NO: 801 - DNA, 1209 bp, Saccharomyces pastorianus
atgttcaaactcacctctcgactcgccacgtctaggctcgctgtctcctccagactgggctttgcccacaccgtagtgtcgccccgagccatcccgccatggatctctttaccggttaaaagattcaactccacaggcccgaacggcaacgacgtgtccgaaatccagacccagttgccctccatcgatgaattgacctcgtcgtccgcgtctctttctgcttccacctcggaccttatcgccaacaccacccaaaccgtgggcgagctgtcctcccacatagggtaccttaacagcatcggcctggcccagacctggtactggccctccgacatcattcagcatgtcttggagagcgtccacgtgtactcgggcctgccctggtggggcactatcgctgccaccaccatcctcataaggtgcctcttgttccccctatacatcaaatcctcggacaccgttgcgagaaactcccacatcaagcccgagctggacgccctgaacaacaagctgatgtccaccacggacctgcaacagggccaactggtcgccatgcaaaggaaaaaactgctctcttcgcacggcatcaagaacaggtggctagccgcccccatgctgcaaatacctattgctctcgggttctttaacgccctgagacacatggccaactacccggtagatggattcaccaaccaaggtgccgcctggttcccagatctgactctcgcagacccttacttgggcctgcaggtcattaccgccgcagtgttcatttcattcacgaggctgggtggcgagaccggtgctcaacagttcagctccccaatgaagcgtcttttcaccatcctgcccatcatttccatcccggccacaatgaacctgtcgtccgccgtcgtgctttacttcgccttcaacggggccttttccgtcctacaaacacttgtcttgagaaacaagtgggtccggtccaagttaaagattacagaagtggccaaaccaagaccccccatccctggcgcttcatcaacggaaaatatgggcattttccagtccatgaaacataatatccaaaaggcaagagatcaggcagaaagaagacaactaatgcaagacaaggaaaaaaaattacaagaagattttaaggagaaaagattgaactcaaaagttaaaatcgttcacaaatcgaatttcatcaataacaaaaaataa

SEQ ID NO: 802 - DNA, 6507 bp, Saccharomyces pastorianus
atgaagggtctcctctggtccaagaacagaaaatcttctacgccaagtgctagctcaggctcaacttccacgcctcaaaaaacctctgctgcgtccacaacgtcgtcttcttcgtcaccgtcgccctcccagactacacgaaactcgtcaagtggtatctcccaatacatgcattcccaccatcatggtcagggacacagccaccatagaggagaagatagcattagggataagaggaaaagttccatatttgcatcctccaaacagcacttatctaccagtgccagtcaggcaaacctgggaatgtatcgctctgagacaaacgaaactacgtcaaaaagcgttggttctacgctaagagacgattctgcatcagcctattctgaagaggttactagcaattcttctagtcacaaatccaatcctccggatgaaacgcctagcaataagaagagctctcactcgaaagactcgttattgacctcgcactcttcatcttcatctttatctcctcctcaatctcgacgcagcactggaaccgcactggaaagttcctcaaatactccaagtaccgacaagaaccacattaacaacaagcagaacataagcggtggtaacgtgaccgagccaaagcaaaagaatgccattcatttaaatcctgaaaattatgatacaacagttttcaagactggttgggtaaacagatctcatggtcaaaccgtcgcaacgaactacaacagctcaataacggcctcctcctcctcatcttcctcctcgtctcagaacctgcgtaatgatgcgtattcaaggactagggaaagcagattctatactggtgatggttcgattttgaaaaacgatgataataacaataatgcaaccaatgatatggctttatcgagaaatagtatggccttagatccgcagatgctggtgcccgactaccgtctttatagagcccagttgaaaggttgtgttctgaatttgtacaagagtggtttaaacaacagtattaaatttttcgatccgacattaccgattccaaataatggtatagcaaacgaaaatcaacagcaaaagaaacaacaggcaaacgtccaagaacaaggacaagcacaaattccaaagcaaccaattgattctgcaagcgagccgatcaaattagatttgaaatatttatctgaagtttatccacatccagatctgaatctagataaagacggaaaaattacatctggcacaatcgaaagtttatgccatgcagtgttattttaccctaattcgaaacattcagatatatccaatgaaaagtcatcgtcaaaaacccatagaactattattaatttgttgttaatgtttccatgtgatagatcttttttaaatttctataaaatatttaaccaatatgggctttcctttaccaagaataaatctaaattgacaaataattccacccaattttataatataactcctggtatggacgactccatgacccaaagattagctttagtcgcaaaaactatcctcgatgtatttccgggatttctgttggatgagcagatgctcaaggctacaatatctttattagacaccatatccttgcataacgatgaaatttctaatactttgaaaatcaaaatcgccaataagcataacgaattaatgaaactaaccgcatttagtcgatcctcatcatcaacaacaacagtagcatcggcacgtgagttagagagtattttagatccaagccattttctctctttagacattagggcattggctgatgaagttcatcaagtcaatttaaaatttgacaaagtttgggcaccgaaatttgactattctctgctttatgattccaagttcgttaaccaaaaaataatttcattaaacccactagtatttaataataaccaaaacgttcatttcctgggaagactactaatatcacatttattcccaacaaatgccacatcaattaaaaaaatgacaccaaaactaaaagctgaattattaaataaatgggttcaaatcggttgcagatttgaacatttaggtgatatggtatcatggctagccgttgccactattatctgctccgtccctgttttaagatcatcttcatggaaatatgtgcccgatcagtcactcaaaactattttcaaagattgggttcctaccatcattcaattagaaaggcgacaaaggtcatcaaggtccacaagcagtgtcttcattcttgctccacctaacttagatgacgattttacaagggctaatgtcatttcttattttggcgacttactaatccacgctgatgatttaccttctgatacgaaattcaaatacttggagaagaaaattaatagaaccaagaatgctttccataagtggcaacaaaggttacaatcaatagactctatgagaaatacgaccagtttatccaatcatatcaaggaaaatgatccatccaccagccttatttatcagctatggaaattccacttagcgcaatctccgttaaacatagagggaataatgaaattgagtgttcaacttgaacctccaatagttgaccaaaaaggatactccacaatcggtgcccaaagaagtgctttagtgactggaagttatttacccatcttgttcaatgaattactgccaaattattcactgtttcctaaaaatacattagtgggcgctgcaggtgatgcaaaattacctccccccagatcttcggcccgcctctcgaaatcactttcaattagcgaaccaattccaattatttccaacagtcacaccttgagctcgtttatggatggcacttccagtgcgacaaatgacaataataaagttactggtattggtaaaattgatggccctgtgattaaagaaatgtcatcaaaacagtcaaataaacagagattattgaaatccgtaagagatgtatttaatattgacatggatgtgtttcacatatcggatgatctggttttcaagtctgtttacgataatgatggtaaatcccgtcctgctagtatggttatagaaacaccgaaaagattttcacagcactcctctatgatcattaacaataccgccacctcaaaccagacagttagggattccatggataccactggaagattgagtaaaaccttagaaaatatggattttttcaataatattggacaagtatctgattcattaaaggaatcgataattcacgtggtcttaaaatcatcatcactagataagatatttgacttattagtattaactgccaatattttttcaaaattagttgatactaaagaccttgaaaactattattatcatcaaaagcaaagaaatagctctaataaaggacttcctgatgacaatgttgggctattggactatgcatttgttaaactaaccatggacaacgatacttttacggaaacgtttttcaatacatacaaaagtttcaccactacaacagcggtattagaaaacatggccaaaagatacattggtgccaaaagttgtagtgtatcaatatccaagattctggatcgtaatgacgatacaaaactgaaaatgacagaggatgctaacatagcatcttcatcgttaggcctttacaatcaaaattttcctgtatgggacatgaaggttctcgacgaaaaaaatgtaaaccctgtttatatggccaaaatccaaattggcgccgctgaagctatactgcacttggtgaaaaaccattactctgactttacagacgatttgtccagcaactccactctattggacatcataaaaattatggaacaggaggtatctacggaatggaccagaagagtagcgaacctaaagttgcagaacactttaccagaagatcttattattgaaacagagaatttattggttacactaacagatttattttacagtattaagtcagtgtaccaaaagcagctttacagacctattggtgtcaatagaactcaaaggagaataaccgatagtttggattcatttaacactttttctttcacagattttaacagcatccttgaagactcttccttcaatgatgacatgattatatcttttcaaaaattaaattccagtaactatgaagacatacttgaatggatatatcagttagacaatttcatttccaagaagttcaatttagtatcaaaaaaagattgggtggttattttccaggagttagaactgctttccaaagaatcgctggtttcatttttcaattatccattacatttcaaatcaagcaaattgataagctcaggatatttacaattagatgaacttgaaatttcaaatattttcagttggatttctacgttaacttttaaggacaataatggagaaagcactcttttatttaaaagattacctcagtctattcaattattggtgaagctacacatgagtttaaccacatttttcctgatggaatcttcaaatgttaataagagcaataatgaaagattgataacttgtaaagtcattttacaaatattgaattatatccggtggaagaacggaactttggatttatttgattcagaggatgacgaaagccctcacgctatatgcccgcatattccatcttttattgaaacagctatagcgcatgccataacttcacccgagtcaagaaactatgaattttcttggatcaaagcttctgaaagtctttctgatactacggccgggaatcaaaatttaagatcaatcaataacattttagaaaaaatagacgatgcacatataaagagcttcattgagattgataatgtattcagtaataagtctaagaatttatgtccttgtccaggttggtttatttcaagattattagaaatatcgcagtttgttcccaacatgagcattacaaattcaaaattaatcaactttgataaaaggagatttgttaacaatataatttcgaatatcttagatttgatccctaacgaaagagaaattttgtttaattctgagatgaatgacgaaaactcctcgaaaagaaataattttggtcgtgttttgttaaatgacttcgaagattcaaataaaacgtacagaaagaagactaaaattgtatcagtatcagaagctaaatcaaagaggtttcaagagagaggactattcaatgaaatcttagtcagtgaagttgaaaaaattaaaagagaagccagaaaattggagattttatttgatcaagaaagggattcgaaaaactctgccatcttacaacaaactgtgcccaagaaaaatagaggatccgttattataccaggaaatcaaagcccaagtgataacaacgacaacggtaataaaattactggtcaaacatcacctcccgtagttagtgttcttgagagtggtaattcagcaaggaataaaaggggttcaatggcttcattttcgacgaatagatcatcagtcgtatccaattccagtcataatggggtgagtaaaaaaattggtggatttttcagaagaccattttcaattggtggattcaacacctcaagttctaattattcattaaacagcatattatcacaagagatttcaagtaataaatctattttacctagtatattaccagaggtcgattcgatgcagttgcaggatatgaaacccagttatagtttgaaaacatttgaaataaaatcgataatggaaataatcaatcacagaaatattccggcttattattatgcatttaaggtcgttatgcaaaatggccacgaatatttaattcaaacgactaattccaatgatctcaatgaatggatgaagatgatcaaggcctccaagaggtattcgttccattccaagagatataagggtaagacacacaacaagatatttggagttccattagaagatgtttgtgagagagagaatacattaattcctacaattgttgtgaaattactggaagaaattgaactacgtgggttggacgaggtagggctatatagaattcccggttccattggtagtatcaatgcattgaagaacgcatttgacgaagaaggtgccaccgataactccttcaccttagaggatgacagatggtttgaagtgaatgccatcgcaggatgtttcaagatgtatttgagagagctaccggactcccttttctcacatgcaatggtaaacgattttactgatttagccataaaatacaaagcgcatgatatgtcctgtgaagaatacaagggaatgatgaatggactactgggaaagctacctaggtgctactatcaaactttgagaagaatagtgttccacttgaataaagtacatcagcatgttgttaataataagatggacgcatctaatttggctattgtgttttccatgagttttatcaatcaagaagatttggcgagtagcatggggcccaggttgggggcagttcaaaccattctccaggatttcatcaagaatccaaatgactactttggacagtaa

SEQ ID NO: 803 - DNA, 1017 bp, Saccharomyces pastorianus
atgaatagcgtgaaaagagttaaactagattccaagatggttaagcagatttgcacacattccggatcctttcacgcagacgagtcgttggcagtgtacctgttgaggctattgcccgagtataaagatgctaagctcgtcagatcaagaaaccctaaggactgggaggctagtgacatcttagtagacgtcggtgcccagtacgacggtgtgaagttcttcgaccaccaccagcgtgggttttttgaaacattcaatgagaactacaagactaagctttcaagtgccggtttgatcttcaagcactacggccgcgacatcatcaagactattttaaacggcaaatccagcagtgctgacatagacttgctgtacgacaaggtgtacaagcagtttgtagaggcactggatgccaacgataacggtatcaacaagtataccattcctaaggactccaggttagaacccaatttcagggacaacgccatcagcatccccggaatcgtttcaggaatgaaccctaactggaacgaggattcctccgatgagtccttcgacagatgctttgctcgtgccagcacgtttatcggcgaggtcttcgtcacactggtgaaaggctacggcgaatcatggttgccagccaaggcccttgtcgcgcaggcgattgaggaaagaatggacgttgacaagagtggcaagatcattgttttgccccagttctgcccatggaaggaacatctttacgagctagaaagagagaagagcatcgaaaaacagatcgagtttgtcctgttcacagactcctctggcgcctggaggatctccaccgtgcctatcaactccacctctttccaatttagaagaggcctgccagaaccactgagaggcctcagagacgaagagttgagctccaagagtggcgtcccaggatgcatcttcatccacgcagcgggcttcattggcggtgccaagaccaaggaggccgtctacgagttagctaagatgtcgctagcctaa

SEQ ID NO: 804 - DNA, 1008 bp, Saccharomyces pastorianus
atgagctttctttccaagctttcacaaattcgaaaatcaacaacaggatccacacccaaagtacaaaatgtattaccgaagaaaaatgacgaggactattctttactacccaaaaattatataagagacgaggaccccgctgtaaatagattaaaggaactaaggcggcaggagttgctaaagaatgcagccctggctaagaagagtggagtaaaacggaaacgcggtacctcatctggaccagaaaagaaaagaaaagagaggaatgatgaagatgaaggtggtctcgggatcagattcaagagatctattgggtctagtcatgccccacttaaaccagcagtgagaaagaaaccagagcctgtcaagaagatgtcattcgaagagctgatgaaacaagcagaatccaacgaaaaacagccttcaaaaacaaagtcaccggaacctgttgctacggagcgcccacgcctcaataaaccaggttttaaaagttcaaaaaaaccactaaagaaagcctctcctggtttagcatcgcgtgggacaccatcaaggggcgatagcatgaaattaccagagcaacacaggcctgttaagctcaatcttcctacgaatggattcgcgcaacctaataggagattgaaagaaaagttggattccagaaagcaaagatccagatatcaagatgattattacgaagaagataatgatatggatgattttatagaagatgacgaagatgaagaggaagcccatcgtagcagatcaaagcataacgatggccccggatatgatcgtgatgaaatttgggcaatgtttaatagaggtaaaaagcgctcagaatatgcttacgatgatcttgaggatgacgatatggaggctaatgaaatggaaattctagaagaagaggaagctgcaagaaaaatggcgagattagaagataaacgtgaagaagcatggttaaagaagcatgaacaagagaagaaacgtcgcaagaaggacattcgctga

SEQ ID NO: 805 - DNA, 699 bp, Saccharomyces pastorianus
atgactaacgacaacagcgggatatgggttcttggctacggatcactgatttacaagcctccgtcccactatacgcataggattcccgcaatcattcatggctttgcacgtcggttctggcagagttccacggatcatcggggcacacctgagagccctggcagggtggccacgctgattccttacgaggaaatcgtgggccgggcggccttcttgaagaacgtcaatcgatacagccagggcacatctattcagggtccggacgatttgattaccattggtgtggtatactacatcccgtctgaacacgcccaagaggtgagagagtatttagatatcagagagcaaaatgggtacactctgcacgaggttgaggtgcatttggagactgaccaaaaacatgaggtggaattgggtgatgccctagaacagttgccccgccatgacaaaacgggcaagcgggtgttgcttacgacggtgtacattggtactgtcgacaacgaggctttcattgggccagagaccatggatgaaaccgcaagagtcatcgctacgtcgcatggacccagcggttcgaattacgagtacctcgcaaaactgcagcaggcgcttgcacaaatgcccatgataaaggagcagggctccattactgaccactatctgactgccctattagaaagtgtagataagcatagataa

SEQ ID NO: 806 - DNA, 4401 bp, Saccharomyces pastorianus
atggctgccaaggagatatcaaccgaagttctgcaaaaccccgaattgtatgggctaaggcggtcgcatagagctgccactcatcaacagacttacttcaatgatagcgatgacgaggacgacgaagaaaatattaaacggtccaggaggaagagaacaaccaccattgaagatgaggaggacgattttgaagacgaggacaaccaagacgatgctgaggacgatgaagtcggagaggattttgaggaagatgacgattattatggctctccagtaaagaaaacccgtgtgaaacccaaacctaaatctaaatcaaaaccgaaatttcagaccgagaaacatcctgcagtaatcataccaacaagattttccaatcgtcaaagcaaaacagtaaactacaacgtcgattacagtgatgacgatcttttagaatcggaagacgattacggctccgaggaggatttatcggaagaacatacatatgaggtatctgctacgccacaacctgaagactttcacggtattgacattgttatcaatcatagactgagaacgtctctagaaaaatcaaatgtcttggaaaagactgttcccgagctaaaggactgcaaggagagctacgaatttttaatcaagtggaccgataaatcccatctccacaacacatgggagacttacgaatctattggccaagtacgtggtctcaaaaggctagacaactattgtaaacaatttatcatcgaagaccaacagataagattagatccctatgtaaccgccgaagatattgaagtcatggacatggaacgtgaacgtagacttgacgaatttgaagaatttcgtttgccagagagaatcatagatagtcaacgtacttcattagacgatggtacctctcaattacaatatttggtcaaatggcgtcgtttaaactacgatgaagccacctgggaaaatgctactgatattgtaaaattggcacctgagcaagtcaaacattttcagaacagagaaaattcgaagatccttccacaatattctagtaactatacttcacaaagaccacgtttcgagaagttaagtgtacagccacctttcataaagggcggagaactgagagatttccaactaaccggtactaattggatggcatttttatggtctaaaggcgataatggtatcttagcagacgaaatggggctaggaaaaaccgttcagaccgtggcatttatcagttggctgatttttgcacgtaggcaaaacggtcctcacattgttgtggttcctttgtctacaatgcctgcttggttagatacatttgagagatggtcacctgatttgaattgtatttgctatatgggtaaccaaaaatcaagagatacccttagggaatacgaattctacaccaatccacaggcaaaggggaagaaaacaatgaaatttaacgttttattaacaacatacgaatatatcttaaaggaccgtgctgaattaggtggcatcaaatggcaatttatggccgttgatgaagctcatagattaaaaaacgcagaatcatctctttatgaatcattgaacagtttcaaggctgcgaaccgtatgttgatcacaggtactcctcttcaaaataatattaaagaactggctgcattaattaatttcttaatgcctggaagatttactattgatcaagaaattgattttgagaatcaagatgccgaacaagaagaatatatccatgatttacataggaggcttcagcctttcattcttcgtcgtttaaagaaagatgtagaaaagtcattgccttcaaagacagaacgtattttgagagtcgaactatccgacgtacagacggagtactataagaatattttaacaaaaaactattctgctcttactgctggtcctaagggtggtcacttttctttattgaatattatgaatgaactgaaaaaggcatcgaaccatccgtatctattcgacaatgctgaagaccgggttttacaaaagtttggagatggtaaaatgacccgtgaaaacattttaagagggctgatcatgtcttcaggtaaaatggttcttttggatcaattattgaccagattgaagaaagatggacatcgtgtgttaattttctctcaaatggtcagaatgcttgacattctaggcgattatttgtctatcaaaggtattacctttcaaaggttagatggtacagtgccatctgctcaaagaagaatatctattgatcactttaactctccggactcaaacgactttgcatttttgctatccactcgtgctggtggtttaggtatcaatttgatgacagccgatactgttattatttttgattccgattggaatcctcaagccgatttgcaagcaatggcaagagctcatcgtattggtcaaaaaaaccacgttatggtgtatagactggtttccaaagatactgtagaggaggaagttctggagagagcacgtaagaagatgattttagaatacgctatcatatcacttggtgtaacagatggtaataagtacactaagaaaagtgaaccaaatactggtgaactgtccgcaattttgaaattcggtgcaggcaatatgttcactgctacagacaatcaaaagaaattagaagatcttaatttggatgatgttttgaaccatgctgaagaccatgttactacgccggatctaggagaatcacatctaggtggtgaagagtttttgaggcagttcgaagtgacagattataaagctgatgttgattgggacgatatcatacctgtagaagagttgaaaaaacttcaagatgaggagcagaaacgtaaggatgaagaatatgtgaaggagcaacttgaaatgatgaatagaagggacactgctttgaaaaagatcaaaaatagcgtcaatggtgacggggctgccgccaactcagattcagacgacgatagtacctccagatcatctagaagaagagccagagctaacgatatggattcaattggcgaactagaggtgcgagccttgtacaaggccattctaaagtttggtgacctaagcgaaattttagacgagctgattgcggacgggacattgcccgtcaaatcgttcgagaagtacggtgcgacctatcatgaaataattgacaaggctagagaatgtattcaagaagaagaaagaaacaggaaacagactttagaaaaacttgaaaaggatgctaccatttatagaacaaagctgaaaaacggtgaaataaaggccgaaaatcaaccgaaggataatccattaacgagattatcactgaagaaaagagaaaaaagagccgtacttttcaactttcttggcgtgaaatcgttgaacgccgaatctctattaacgagagtggacgatttgaaatatttgaagaacttaataaattcaaactacaagaatgacccgttgaaattcaacctcggcaatagtgcacctaaacctgtccaaaattggtcatcggactggacaaaagaagaggacgagaagctattgattggtgttttcaagtatggatatggttcttggacacaaataagagacgacccatttctaggtcttacagataaaatatttttaaatgaggctcaaactcccgcacctaaaaaaacgacaggtccatccgatgcgacaccaacggctgcatctgcaaagaaggggaaaggtataaccggatcttccaaaaaagtacctggcgccatccatttgggcagaagagtggattacctactttccttcttgagagaaggtccaaatgcaaagagtccaagtactgagccaagcatgaagaaactccccactggaccctctaagaaaagacaaagaaagactgccaaccatagcaagtcgatgacgccagaaaccgccaattccgagtcagcgactgccccgccaaacaaacgtatgaaagctctgccaaaaggccctgcggctttgataaacagcgcaagatcctccccaaacagccccactccatcatctaagttcaaggcctccagggacaatggcacaagacaaacaagcaaccccagtagtggtagtgcccacgaaaaggaatacgacagcatggacgaagaagactgccgacatacgatgagcgctatacggacttcattaaagcgcctcagaagaggtggcaaaggactggatcgcaaagagtgggccaagatccttaagaatgaattaaccaccatcggcaagcatattgagtcgcaaaagggctcgtccaggaagacaaagccagacaaattccgcaagcacctctggtcatacagtgctaacttctggccagcagacgtgaaaagcacgaagctaatggcaatgtacgacaagataactgagtctcaaaagaaatag

SEQ ID NO: 807 - DNA, 1734 bp, Saccharomyces pastorianus
atggctgatattactgacaagacagctgaacaattggaaaacttgaatattcaagatgaccaaaagcaagccgccactggttcagaaggccaatctgttgaaaactcgtctgcatcattatatgttggtgacttagaacctgctgtttctgaagcccacttatatgatattttctctccaatcggttcagtctcctctatccgtgtttgtcgtgatgccatcaccaagacttccttgggttacgcttacgtcaacttcaacgaccatgaagccggcagaaaggccattgagcaattgaactataccccaatcaagggtagattatgccgtattatgtggtctcaacgtgacccatctttgagaaagaagggctctggcaacattttcatcaagaacttgcatccagatattgacaacaaggctttgtacgacactttttctgtctttggcgacatcttgtctagtaagattgccactgacgaaaacggaaactccaagggttttgggtttgttcacttcgaagaagaagttgctgccaaggaagctattgacgctttgaatggtatgttgttgaacggtcaagaaatctatgttgctcctcatttgtccagaaaggaacgtgactctcaattggaagagactaaggctcactacaccaacctttatgttaaaaacatcaattctgaaaccacagacgaacaattccaagaaatgtttgtcaaattcggcccaattgtttccgcttctttggaaaaggatgctgatggccaattgaagggtttcgggttcgttaactacgaaaaccacgaagacgctgtcaaggctgttgaagctttgaacgaatctgacttgaacggtgaaaagttatacgttggtcgtgctcaaaagaagaacgaacgcatgcatgtcttgaagaagcaatacgaagcttacagattggaaaaaatggctaaatatcaaggtgttaacttgttcgttaagaacttggacgacaccgttgatgacgaaaaattggaagaagaatttgccccatacggtaccatcacttctgccaaggttatgagatccgaaaacggtaaatctaagggtttcggtttcgtctgtttctccactccagaagaagcaaccaaagccatcactgaaaagaaccaacaaattgttgctggcaaaccattatacgttgccattgctcaaagaaaggatgtaagacgttctcaattggctcaacaaattcaagccagaaaccaaatgagataccaacaagccactgctgccgctgctgccgctgctgccggtatgcctggtcaattcatgcctccaatgttctacggtgtcatgccaccaagaggtgttccattcaacggtccaaacccacaacaaatgaacccaatgggcggtatgccaaagaatggtatgccaccacaattcaggaatggcccagtttacggtgttcctccacaaggtggtttcccaagaaacgccaacgataacaaccaattttatcaacaaaagcaaagacaagctttgggtgaacaattatacaagaaggtttctgctaagacttcaaacgaagaagcagctggtaaaattactggtatgattttggatttgccacctcaagaagtcttcccattgttggaaaacgatgaattgtttgaacagcattataaagaagcttccgctgcttacgaatctttcaagaaggagcaagaacaacaaaccgaacaagcttaa

SEQ ID NO: 808 - DNA, 2550 bp, Saccharomyces pastorianus
atgccgaagaataaccatcaccatcgttccagttcggtaagttccacaaagaaccgctccacggaatctacgaacaaatggaaaattccgcactattaccgtagatccgcaagcggtagtacgcaagcttcgccaaatagaagctcttcaactgaggcatgtagcacacctatactgcctaccatgaacgtaatgtccagcccgaagaaagttttactggaagagcccagggacaacaaagcaaagaagacaagcagaaagaaatcgggagaaatggtctttgtcaattatactgtacaagacacagccaatgaagaggacacagatctgaaaagtgagcctgcgcctgtcccagcaccaaaggcgaagttaaagaagaaatcttctaaaaggagaatgctaaagatatttggatcgtcaaaaaacgagcatatcgaagacatcgtcgaagaacagccgatggtcctccagaccgatttacagccacagtcacagtcacaatcgggaattcccacttcagaacatggttttgatccctcatcattgacttccaaaagatcctacaattcgtttttgaaacacaatagactgcatggtaaaacttcattttctagcggcctgtctttcccatctttaaacatgatgggaaatgctagtgatatcagtattgagaagagtggatttggttgcgtaaatgaagtggttccgaaatcaactcacaatccttccttggcgaagccgccatctaggtttgatgagaatgaaaggaactcacccaacttatcaaatataccccttttgaacacaaaaaatacaagactgaagtataataaagtcgcgtctcagaattcggaccaacaaagattacaagaaagtggcttgtatcattctaacgaatcattcagtttcaaagatcatagcacaagtaccaataagtcttctttgagtttaaattctgactctggaacttcccacttcacaaagcattcacctgattcaccaagaacttcaagatccttcaactgcggagactcacaaagtagagccaagttgccagaggaaaatgacgcttctattgcatttagtaaaatgtttactagaaaacgagctaacactggcgggtccacgtgttcgctagcctcgccaaccatttcacaagccattcaacaatcaaacatgaaagtcaataaactaccgactcaaagaacaacctcagtaagctctttgtcatctatgtcaaaccgttactccccaataagagttgcgtcccccgggcgaccaagatctggaacacgcgggtcttccctttatagattatcgagggatttgaactctttaccaagtgtcactgacttaccggaaatggatagtacaaccccagtcaatgaaatattcttagatagccaactgcagtataaaaacagcggtggaaaacatgggcacaggaaaaaacaagagtctatttctgatgctcaaagaaaccaaaatgcaaattcacacatctcaacaccatcctcttccctcgtgacgcccccttattacatgacggggtttacactaccaagttcggcgtcagcatcttcaacgccaaatgtgctcgaaacaaataatatgaatttagttcaaagtgccaacgttgctacaagctctcggccctttagtaacttctcctcttttgaaaaagaatacaacaacgagaacgacggaactgcggaaacatcggcattcaataccccattggaaaatataccagctttaaagggtatacccagatccactttggaagagaatgaagaagaagatgttctagtgcaagatgttcagaccactactaattttcgaagaagagacgctatagggatggacgctcataggaaagaggacagtttagattttagctctttaatgccacatggcagtacaactaatagcagcatcgtggattccgtaatgacaaactcgatatccactaccacaagcaatgcaaccggcaactatttccaagatcaagagaaatatacactggtgaatacgggactgggtttgagtgatgcaaatctcgaccattttatcagaactcaattcaagcaagcttctaaattagattcgaacagtatggggaaccgtgtttcttataatggttcaattcctaataataatgatccaacaagggccaatttgcaagtatatactgaattcgattttgaaaatccagagtcttttttccatgaacaatcaaaattactgggtgaaatgagccatggtaataataatggcgataatgacatcagtatgaatgagccaaaatcggcagacactttcataggcaatatatccccagacacctccgcaaccgtttcattgggcgacttgatgagttcaaacgtctcaaataatagtgaaagaaatttctacgacggccacacctttgttccacaatttcaacaaaactcgtctatagaagattcaagcaatcaaaatatggcaccagttacgaataacgacatcgacaataatctacagtctttttattttgataataaccactaa

SEQ ID NO: 809 - DNA, 1641 bp, Saccharomyces pastorianus
atgctacgatccactatacccctactgatgaaaagtatcccgcagaaggcaatgactaaccctaccttcgccttacaggcacccaagatcactttgaccaaagtggaacaaaatatctgcaacttgcttaacgactatatggatctgtacaacggagagcaccagaataaacccgagccattgacgcttcgaatcacgggcggatgggtgcgcgacaagctgctgggccaaggttctcacgatctagatatcgccatcaatgtcatgaccggtgaacaatttgcgactggtttgaacgactacttgcagcagcattatgccaagtatggagtcaagccacataatatccacaagattgacaagaaccctgagaaatcgaagcatctggagaccgctaccactaagctgtttggtgttgaagtggattttgtaaatttgagatctgaaaagtacactgaactttctagaatccctaaagtgtgcttcggtacacctgaagaagacgccttgagaagagatgctacattaaacgctcttttctataatattcaaaagggtgaagtggaagacttcacccggaggggtctgcgagacctgaaagaaggtattctgcgtactccgcttcctgccaaacaaacgtttttggatgaccccttgagagtgctaagattaatccgttttgcctctagattcaacttcgccatagatccggaagtcatggctgaaatgggcgacccacagatcaattctgccttcaattccaaaatttctagagaacgtgttggtgtagaaatggagaaaatcctaataggtccaactccactattggctttgcagctgattcaaaaagcacatttagataacgtcatatttttttggcataacgacaaatcagtggtagaattcaacgagaaaaactgccaagatataaataaaatcaagcacgtctacgatgataacatactgaactcacacctgcaaagtttcatagaattatatccaatgttcttggagaagcttcccattttgagaaaaaagattggtcaatcacatagtttccagcagaactttatactaagtgcgattttgtcccccatggccaatttacaaatcattggaaaccctaagaagaaacttaataacttgttatccgtcccagaaagtattgtgaaagaagggttaaagttgagtaaaaatgacgcagtgatcattgcaagaactgtagattcattggggtcgtacgaggaattggtttcgagatttacaaatggctcgctgttgcaaaaatcggaaatcggtatattcttgagaagtttcaatggcgaatgggaaatcgctcatttcacgtccctcttagatgcatttttaaaaattcccagatctgaaaccggaagaactgagtctcttctccacaattacaacgcattttattcttatatatacgacaatagtttggaagattgccacgaactaaaacccatagtggacggcaagcaaatggcaaaagtactggaaatgaaacctggcccgtggttaggtaagattaataatgaggcaatcaggtggcagtttgataaccctgaaggaaccgatactgagttaataacccatttgaaagccatactaccaaaatatctataa

SEQ ID NO: 810 - DNA, 2334 bp, Saccharomyces pastorianus
atgaagttctatatagatgatttaccagtgctctttccttacccaaagatatatcctgagcaatataactatatgtgcgatatcaaaaggactttagatgtaggtggaaacagtatcttggaaatgccttcaggaacaggtaaaactgtctcattattatcgctcacaattgcctatcaaatgcactatccagagcatagaaaaatcatatattgttcacgtaccatgtccgaaatcgagaaagctttggtagaactggaaaaccttatggattatagaaccaaggaaatgggctaccaggaagattttcgaggtcttggcttaacatcaagaaagaatctgtgtttgcatcctgaagtcagtaaggaacgaaaaggtacagtagtcgacgaaaaatgtcgtagaatgacgaatggccaggcgaggagaaaagcagaggaagatccggacgccaatgtagaattgtgcgaataccatgagaatttatacaatatcgaagtggaagattatcttccaaaaggtgtattttcctttgaaaaacttttaaaatactgtgaagaaaaaaccctttgtccatatttcattgtccgtcgtatgatttctctttgtaacattattatttattcttaccattatctattagaccctaaaatcgccgaaagagtctccaatgaagtttccaaagacagtatagtcatttttgatgaagcgcacaatattgataatgtgtgtatcgaatctttgtccttagatttaacaacagatgcgttgagaagagctacgagaggtgccaatgcgttagacgaacgtattaccgaagttagaaaagttgattcacaaaaattacaagatgaatacgaaaagttagttcagggtttacactctgctgatatccttaccaaccaagaggaactatttgtggaaacgccagttttacctcaagatcttttaacagaagcaatcccgggaaatatacggagagctgaacatttcgtttcgtttttgaagagacttatagagtatctgaaaaccagaatgaaggtactccatgtcatttctgaaacacctaaatcatttctacaacatttaaaacagctgacatttatagaaaggaaacctcttcgattctgttccgaaagactgtcgttacttgtaagaactttggaagtcgcagaggtggaagattttaatgcattgaaggacatagcaacatttgccactcttatctcaacgtacgaagaagggttcttgctaattattgaaccatacgaaattgaaaacgccgccgttccaaatccaattatgagattcacctgtttggatgcatcgattgccatcaaaccagttttcgaaaaattttcttctgttattattacttcagggactatatcgccattggacatgtacccaaggatgttaaacttcaagactgttcttcaaaagtcttacgctatgacgttggctaaaaagtcgtttttaccgatgatcattaccaagggatctgatcaagttgcaatttcttcaagatttgaaattagaaatgatcctagtatcgtccgtaattatggttccatgctagtagaatttgccaaaattacacctgatgggatggttgtgtttttcccctcgtacctgtatatggaaagtattgtttcgatgtggcagacaatgggtattcttgacgaagtttggaagcacaaattaatcttagttgaaacaccagatgctcaagaaacatctttagctttggagacatacagaaaagcctgctcaaacggacggggggcaatattgctttctgttgctagaggcaaggtttcagaaggtattgattttgatcatcaatacggaagaaccgtactaatgataggtattccctttcaatacacagaatcacgtattttgaaagctcgtttggaattcatgagggagaactatcgtattagagagaacgatttcttatcttttgatgccatgagacatgctgcacaatgtttgggaagagtcttgagaggtaaggacgattacggtgttatggtattagcagaccgtagattttccaggaaaagaagtcaattaccaaagtggattgcccagggtttatcagacgctgacttaaatctttctactgatatggctatatctaacaccaaacaatttttaaggacaatggcccaacccacggaccctaaagaccaagaaggtgtatctgtatggagctatgatgatttaataaagcatcaaaatagtaaaaacaacaagggggggtttattgaaagcaaaagtaaaggggaacaagaacaagatgaagacgaggatatagatatgcagtaa

SEQ ID NO: 811 - DNA, 6480 bp, Saccharomyces pastorianus
atggtcgatcatgaatcaaaggataaagcaaagaaaatcaaagagatctatcgttacgatgagatgtcaaataaggtgttaaagctagataggcggttttttaataccaaccagaacccccaaaaagatgcagaaatttcacagccaaagtccatgagtggcaggattaccgctaaagatatgggtaaggacgtccgcagcgatactcctggaaagaaaagagatcttgatagtatagtaggtatgagagagaaaaggccctcatcaagaaaaattcagcaggatagtactattttggacgcctcttccaactttaggttgcattactacccaaagaattcctccagcattgaattatacgagcaaattttgcaatgggtcacagaagttttaggcaatgatataccgcatgatcttattgttggaactgcagacgtactcatcaaaatgctgaaggaagatgaagaaaatgaagacggaaattttgataaacgaaagaaaaacattcaggacgaactgggtattgacatcgaaacttcaaaactcatggagttggtcaaacttacgaaagacattaccgattatgaaactgactcaaacgaaaccgttgaacgagcggtggcaattcttgctgataacgaagatatggatgcagaagaagaagaaaataattccgacaacacgaatgttctcgagagacaaattgatgatgatgaagaggattttgaagaggataacgttgatcctaactccaagattcggactaacaaagcattaccaaatgttgaaaatgacacaatcaaactttctgattataagataagtggcattgaggctattccggtatactcagtcgatgagttttttttacaaagaaagcttcgatccgagcttggttataaggatacttcaatgatccaagaactttcagaaaagattttaaatgagatcaaaaccctcgaagacaatccaaaagctctagagcagaagctggttgatttgttagattttgaaaatatatcgctggctgaatttattttcaaaaatagattagcaatcttttggggtatacgcctagcaaaaagcacagagaacgacgtaccaaatttgatagatgaaatggtcgccaatggtttaaactatctcgtggaacagtacgaggctagaggaacagtaaactcgaaacgtcagcttggttctgatgatgaaaagtttaagtattcagctgcaaaaaggacaaaatttcacagtacctccattttaccgcctattgtagatttggaaaaggtcaaatttgacgaaagctctaaattaatgactataacgaaagtttctctgccagaaggatcattcaaaagagtcaaaccgcattatgatgaaatacatattccggctccaaagaaacctgttattgattacgagttaacagaaatttcctctctgccagattggtgccaggcggcatttccttcgtcggaaacaacatctctaaatcctatacagtcaaaggtttttcctgcagcatttaacggtgattcaaacatgttaatatgtgcacccactggttcaggtaaaactaatattgccatattaaccgtattaaaaactttatcccgcttttataacacagaaacgaaaaaactgaacctttcagcgtttaaaatcgtttatatagcgccgttgaaggccttagtgcaagaacaagtcagagagtttcaaaggagactagctttccttggtataaaagttgctgaattgactggtgactccaggctcagtaagaaacaaatagaagagacgcaaatcttggtttctacaccagaaaaatgggatataactactagaaaatcgaataattcggctcttgttgaactagttcgtttactgatcatagacgaaattcatttactgcatgacgggagaggccctgtattagaaagtattgtcgccagaacattttgggcttccagatacagccaggagcgtccgaggattatagggctgtccgcgacattgccaaattatcaggatgtcggcaggtttttaagagttcctgaggagggactgttttatttcgactcttcatttaggccatgccctctatcacaacaattttgtggtatcaaagagcaaaactctctcaaaaaattaaaagctatgaacgatgcttgttatgaaaaagtattggaatcaattaatgaaggaaatcagataatcgtgtttgttcattctaggaaagaaacctcacgtactgcaacatggttaaataataagttcattgaagaaaaccttgctcacaaactaatcaaaggtgatgcaggatcgaaacaaatccttaagacagaggcttctaacgtacttgaccctaatttaagaaagctgatcgaaagtggtatagggacacatcatgctggactagccagaaatgacagatcattatctgaagacctgtttgctgacggattactgcaaatattagtgtgtacggcaacgctggcatggggtgttaatctccctgctcatacagttattataaaaggaacagatgtctattcgcctgaaagggggtcctgggaacaactctccccacaggatgttctccaaatgttaggtagagctgggcggcctagatatgacacgtttggggaaggtatcataataacaaaccaatcaaacgtccagtattatctatcggttctcaatcaacagttgcccatagagtcacaatttgtcgcgaaattagttgacaatttgaatgctgaaattgttgctggtaatatcaaatgtagaagcgatggtgtaaattggctggcatacacttatttatatgttagaatgtcagcttccccggacctttataaaatacctgatatctccgaagataaggacttgaaaaagtacagagaaagtttaattcattcggctctttgtgttttgaaagagcaagatttagtcttatatgacgcggaaaatgacataattgaagcgacagatcttggaagtatagcatcggcattttacattaatcatacctccatgaatatctacaatacagagctagatgagtacacaacgcagatagatctctttagaatatttgcaatgtcagaagaatttaaatatatatcagtaaggtatgaagagaaaaaagaactgaaacaactactagaaagggctcctattcccattagagaagacatcaacaatcatttagcaaaagtgaatgtgctattgcaatcttacttctcacaattaaagttcgagggttttgcactaaattcagatatggtgtttatccaccaaaatgcaggaagattattgcgtgctatgtttgaaatatgtctaaagaggggctggggacgtccaacacggatactacttaatctttgcaggtctgctacgacaagaatgtgggcgacaaattcgcctttgagacagtataagagatgtcctgctgaagtagttaaaaggttagaggcttccacagcaccctggggagattatctagaattggagtcgcctgcagaggttggtcgtgcaattagatctgaaaaacatgggaaacaggtttatgatttaatgaaaaggtttcctaaaatatctatgaaatgtaacgctcagccaattacccctagtattatcagattcaatgtcgaagtactggcaagttggatgtgggatatgaatatacatggtgctcttcaacccttcttgcttttgctagaagacacagacggtgattcgattctttttcatgacatattgttaatcactccagaaatgatagggcaagaagtttcgttatcctttacctatgaattaaaccagcaagatcaaaataacttatcaccaaatttttttcttacagtaatatccgaaaattggtggcacagtgaattcgagattccagtttcctttactaatttcaaacttccaaagaagtttccagctcctaccccactcttagaaaatatcgaaatttcgacgtcagaggttggtaacaatgatttctccaaagtgtttgaatttcaaactttcaatagaattcaaagtcatactttcgaaactatttacaactcaaatgactcagtctttgtaggctcagcaaaaggcacaggtaaaactgctttggctgaattagcattattaaattattggagacagaataaaggaagagctgtttatatcaatccgtcacaagaaaaaattgatgttgtgctttcgagttggaataaaaaattatcccatcttgctggtggaaaggttattaacaagctggggaatgacccttccttgaatttgaagctattagcgggaagccatgttctcttggccactcctgcacaattcgaacttttgtcgcgtcgatggaggcaaagaaaaaatattcaaagcttggagttaatgatatatgatgacagtcatgaaattagtcaaggtgtttgtggtgcagtatatgaaactttgatatccagaatgatctttatagctacccaacttgaaaagaaaattcgattcatttgcttatcgagctgcctagcaaatgctcgtgattttagtgagtgggttggtatcacaaagtcaaatatattcaatttctctccaagcgaaagagttgatcctcttgaaataaatatacaatcattcaaagacgttgagcacctgtcattcaactcaccaatgcttcatattgcatttgaaacggcgttagctactgcagcaaatgggaattgcagttcaattatcttgccctccagaaaggattgtattgaagttgcgtctacatttatcaaattttctaaagcagtagagtgggatatgctaaatgttgaagaaaagcaggtcacaacgttcgctgaaaagctgaccgacagtcaactaaagaccccattaaaacatggcataggtatactatatgatgggattgtgtcaaatgatgagagaattataagaaggttgcacaaatataacgcactttcaattttattcattacgaaggattgtgctgctctagctcctaggtctgatgaagtaatcgtactaggaacgaacttttacgacggtagagagcataaatatatgccatacaccgtaaacgaactatcagaaatagtaggattaacaaagagcagtggtgcagcggtgggtaaagctttgattttgacgagtcataacatgaaagcttactacaaaaagttcataactgaacctttgcctacggaaagttttctacaatatactatccatgataccttcaacaatgagattgcaaactccattatacagagtaaacaggattgtgttgattggtttacttactcatatttttatcgtcgaatccatggaaatccgagttattacggtgtgaaggacgcgtcttcatatggcatatcggtatatttaacagacttagtcgagaccagtctgaacgacttagttgagtcttcatttattgaaaccgaagaccttgaaataaatgcagaagcggatggggaagatgaagaatcttctgaagcaatttcttccttgaacaatgggctgatcggttctcattatggtgtctcctttttcactatccaattatttgtttcttctttatcaaatagttcaacactcaaagacatactgcatgttttgtccacagcaacagaatttgaaaacatctcactaagaaaaggcgataaagctttactttctaaactgagtaaaaagcttccaataaagtttgctggcagtgtctctactgagtctgtgaattttaaagttttcttattgttacaggcacatttctcgcgtattgaattacccatcgatttccaaaatgatttgaaagagatcctggagaaggttattcccctaattaatgtaatcgttgatattctctcagcaaacgggtatctaaatgctactacagcaatggatttgatgcaaatgctcattcaaggtgtctgggatgttgataatccattgagacagattccatatttcaacaatgaaatgttagaaaaatgcagagctatgaacgttgaaactgtttatgatataatggctcttgaggacgaagagagggacaagatactaactctcggtgattcacaacttgctcaggttgccacatttgttaataactatcccaatgttgaacttacctattctttggaaaatttgagttccttaatctcaggtgcaaaacaaaaaatttcaatacagttaacaagagactttgaacctgacaacctacaagtaacatctgaaaaatatccattcgataaattagagagttggtggttagttttaggtgaagcttctaagaaggaactttacgctatcaaaaaagttagtttaaataaagaaattcagaattatgaattagagtttgatattccaccaactggtaagcacaacctaactatttggtgtgtttgtgattcataccttgatgcagataaagaaatatcatttgagatcaatgtgagataa

SEQ ID NO: 812 - DNA, 735 bp, Saccharomyces pastorianus
atgaccgtaatagaaataacaaaccaggaccaattcactcaattaaccactataaatactgtcaataagctcattgttctatattttcaaactcaatgggccgagccatgtagaagcatgagcgaggtgctcgaagccatcagtgaagaagttagccaagagaatgtgcggtttttgtcaatagatgcagacaagcatactgaaatatcagaccttttcgaaatagcagctgtaccatattttatcttcattcaaaacggcactatcgtgaaagaaatatcaggggcggatccaaaggagtttgtgaaaagtttagagactctctccaatggttccgcctcaatatccaacaatgttagtggacccagatccacttcagatgtagaaaacagtgggtcttctgatgacgaagacgaagagacggaagaagaaataaacgcgaggttagcgaagctagtacaggcggcgcctgtaatgctcttcatgaagggaagcccatcggaacctaaatgcgggttttctagacaattggtgggtatcctaagagaacatcaaataagatttggatttttcgatatactgagagatgacaacgttagacagagcttgaagaagttttccgattggcccacattccctcagttgtatattaacggggaatttcaaggtggtttggatatcatcaaggaatccatagaagaagatcctgaatttttccaacatgcccttcagtag

SEQ ID NO: 813 - DNA, 900 bp, Saccharomyces pastorianus
atgtctaccttttctgcctctgatttcaattcaaaaagatactcctcttcaagaccttcctacccttctgaattctacaagatagtagatgaataccacgaaggtgatagaaaactactcgttgatgtcggatgtggtccaggcactgctactctgcaaatggtcgaggaattaaaaccgttcaaccgaatcattggaagtgatctttctgccacaatgattaaaactgccaatgctataagggaagataatcccaacatatacaagaacgtttcatttgaaatctctcccagtgatagttttgaatttttgggcactgattcagctgacaagcaaaagattgacattattaccgcggtggaatgtgcccattggtttgatttcgacaaatttcaaagatctgtccatgccaatttgagagaagacgggacaattgctatttgggggtacgcagaccccatctttccggactatcctgaatttgacgatttgatggatgatgttccatatggcaaggaaaccctaggcccttactgggaacaaccaggtagatcacgcctccacaacatgctgaaagacttcaccctggatccgaagcttttccgtcatattcaagtgtcatatttttatgcaacagacatgagagacttggaaaaaattcgccaatataaagaaaaaccactcttaataagaaagcaaatcactttgctggagtttgcagaatacgtcagaacctggagtgcttaccaccaatggaagcaggatccgaagaacgaaggtaaacaggatatcgcggactggtttattgaggaatcgttgggaagaagaccggaacttactgctaataccaagattgaagttgtttggaacactttttataaactcggtaaaaggatctag

SEQ ID NO: 814 - DNA, 3417 bp, Saccharomyces pastorianus
atggatttccagtgcagaacatgtaatcaagctttaaatgcagagcagatgatgaagcatctctcaattaccagacataagacggtatttaaaatttctagtggcgaggacatctgctgtgaagaatgtcaggatacaaacatacaccaacttcaaatcattaggtttgggggtgaggatatgattttactttgtaattcttgttttcgaaaggactattcagaaacagagcgtccagtaactagctattcattactaaatggctccatattaaagttctgggagaagtatgtgaaggttagagattgttgttgtgatatctgtggaaaagagtctcgcctgaatgtaaaccgcacaggagaagtgttatgtgacaaatgcctaccaaaatcagacaaaagtaaaggcttcatttctgaaaagagtggaagatttttgtatatctatttggggcttaacgagacaccgaatagcactaggaaacctagcaaaaagggaggacgaagagttagtagagggaaaaagggcgaaaaggctggtaagttcaagaaagacaaaaaagaaactttcgaagacaaaatcagtagaatcgcctaccaagtgaagaaagaaaatagtatcattcaaagttctagtaattcaagtttaaaaaacttcaaaggtttcaaagcagtggaaagcgattcaaatattgcagtgtccttctccaatcgtgcaaaagcaaacaaatcagaggccaaaaagaacaatcctggctcgttgaatgggaaaaaagggaaagagaatagaacaaaaaccaacaaaaagagtgaaaatgaagtgaaaagggagaaagagaacacgtcaaaaaacaagaaaaataatgaaaatgaagtgaaaagagatatcgctcaaattgaggttatttcagaagccaaaaagaaggtcagtaaccaagctaaggcaaaattggattcaaaaagcaaagttaaaccagttgagaaggctcaagaaccacgacctaaaattctgaatgctataactaaagctgcaaacaaaactactctgaaaaagagtaaactcaaagcagatcaaaatcaaaagatcaaaaaaaatattaagggtaacgcagatgcacaacaaagtaagcttaatttaaatggcaagagaagtacagtaaccaagaaaccaaacaataagccagataaaaccaacagtaaatggacaattggttctgatggtgattcttctagggaatcgagtgtttgcccaacggagaaggttaatgcgaataacaaaatgcgaaaccagcaaaagaaggttgacaataaaaaagtgggctctgcatcaaaggaaaaattcgtctctcaagtaagccccaaaaaatccgagacaaatctatatcaagataaagatatcgaaaagaccaaaaacagcggactcatttatgaggaaggtgaaccgctgaccaaatataatgccttcaagcccacgttgtcatatccagacttgaacacgtacttaaatgattattcgtgcgccctgttcttggaacagaaattagagaacgatttcatgcagaactttagcatattgtggcctcgtaatgaaagggaaacagccttcattatcaatgttgacaaaaacaacaatcccgaattagaaaaattactacctcctaatttgcttgcactcggtaggccagcattcaatgagaggcagcccttttttttttgcacccaggatgaacaacagatgtggtatatcttcatcaaagaactttctattcaaagaggtaaatatgtgttgttggcagagctattttcatggaataatttggggctgccaacgaagaacggatcatcccagttcaagctcttaccaacgtctgcacaaacgagcagaatcttgttcgctatgacgcgtattaccaatccgaaattcattgatctgctgttggggcagaagcctattaaacagatatattttgataatagattgaaattttcaagcgacaagttaaaccaatctcaaaaaacagcagtggagcatgttttaaacaatagtatcactatattacaaggcccacctggtacgggtaaaacgtctacaattgaggagataatcattcaagtgattgaaaggttccatgcattcccaatattgtgtgttgccgcatccaatattgccattgataacattgcagagaagatcctggaaaataggcctcagatcaagatcttgagaatcttatcaaaaaaaaaggagcaacaatatggtgaagatcatccgctgggcgatatctgtcttcacaatatagtgtacaaaaacctttctccagacatgaaattggtggcaaacagagcccgcaggggcgaaatgatttctaaatctgaagataccaaatattacaaagaaaagactcgtattaccaataagattgtatccttatcacaaatcattttcacaactaatatcgctgcaggtgggcgcgaactgaaagttatcaaggaatgtcccgtggtgattatggatgagtccacacaatcctcagaggcctccacattagttccactgtcattaccgggcataagaaactttgtctttgttggtgacgaaaagcaattgtcaagcttcagcaacatcccacaattggaagcctcgctatttgaaagagtcctgtcgaacggcacatacaaaaagccactaatgttggacactcagtacagaatgcacccaaagatcagcgagttccccataaagaaaatctacaacggcgaattaaggaacggtgtcacggagcaacaaaaggcatggcctggcgtggagcatcctctgttcttctaccaatgcgatctggggtctgagagcagagtgagaaacacacaaagagacatagtcggattcacgtacgaaaacaggcacgagtgccaagagatcgtgaagatcgtccaaatactaatgctggacaagaaagtcccgctggaggagataggtgtcgtgacaccgtactccgcacaacgtgacctgctatctgaggtcttgaccaaaaatatagtcatcaaccccaaacaagtctccatggaacaagaatacgacgaaatcgaactatttaacgcggccggctcgcaaggagccagcagcttgcagaacaatgttatcaacatcatcaacggtctgcatgtcgccaccgtggattccttccaaggccacgagaaatcctttataatcttttcctgtgtcagaaacaacagcgacaacaaaatcggattcctgcgcgataagagaaggctgaacgtggccttgacaagagccaagcacggcctgattgtggtcggtaacaaaaatgtcttacaaaacggtgacccgctgtggagagactacattgcctacctcgaggagcaagacgtcatatttactgaccttgcagcctactag

SEQ ID NO: 815 - DNA, 795 bp, Saccharomyces pastorianus
atgtcaaccagtcgtgaagattccgtgtacttagccaagttggctgaacaggccgaacgttacgaagaaatggtcgaaaacatgaaggccgtagcctcctccggccaagagctctccgttgaagaacgtaacttgttgtccgttgcctacaagaacgttattggtgcccgtcgtgcttcctggagaatcgtatcctctatcgaacagaaggaggagtctaaggagaagtccgaacaccaggtcgagctgattcgctcgtaccgttcgaagatcgaaactgaacttaccaagatctccgacgacattttatccgtgctagactctcacctgattccatccgccaccaccggcgagtccaaggtcttctactacaagatgaagggtgattaccaccgttatttggccgagttttccagtactgacgccagagaaaaggccactaacgcttctttggaggcctacaagaccgcctctgagattgctaccacagagttgccaccaacccacccaatccgtctgggtttggcccttaacttctccgtcttctactacgaaattcaaaactccccagacaaagcctgtcatctggccaaacaagccttcgacgacgctattgccgagttagacactctatccgaagaatcatacaaagatagcacactgatcatgcaactgttaagggacaatttgactttatggacttcagacatgtccgaatcaggccaggctgaagaccaacaacaactacagcagcagcagcctgctgctgccactgagggtgaagcaccaaagtaa

SEQ ID NO: 816 - DNA, 795 bp, Saccharomyces pastorianus
atgaatgtcggtgagaaggtgcaacaagatgaaaatcaaacacatcttcccctacacaagaaatcaaataacctttttataaaggaaaaggctgtgacagaatacaacaaacctgataatataaggcttcgtaatttgaacttcaatcatagaaaatatctggacgataaaaaaacgaagcaatttccggttccggttaacttcgaaaagtctaccagatgtgaagtcggtataggtttagaacctggtgaattaactgacgttaaccttgattatataccaaaatccccgtctatagaaaaaatatcagggcccaacactaccattacaccgaaaaacataatacatttacaatctgattcggatcttgttatcgaagaatgtgatcgcggttatgactgtggccctttttatcacctatacaactacgaaaacagaatcgaacctgatgattacgaagccattattgaagctataataaccgacgaaattgccggtacatatccgatgtttgaacgagaattagaatatcaagagttgaaaggccttgttagaaagcgggattatattttatattatttgttttccaaggattacttgggattctttcagctaaaagaggaacgtacatttttttatacttacccctcgattgcttatactagcccattgagatatctggataacgtacctgaaaacgacttgttcactgaagaaaatgatgagcagcttcagtcatttgatttcgaaaatatgtcatctgttaggactttggacagcggtgtatggcgttaa

SEQ ID NO: 817 - DNA, 258 bp, Saccharomyces pastorianus
atgtctgcagaaaacaccagcagcgatttaccagtcagtacccaattatcttttgaagccaacgttagcgataaggaagttaaaacgaaaaatgagaagttagtgcgtcaaaccaaacttttgaaagatactttagatctgctctggaataagacattggaacagcaggaggtttgtgagcacctcaaacaagaaaatgattatttggaagattatattggtaatttgatgaaatccagtaacgtcttagagaaatag

SEQ ID NO: 818 - DNA, 897 bp, Saccharomyces pastorianus
atgtccgaatttaaggtcaaaactgggttagctcaaatgctaaagggtggtgtgattatggatgtggtcaacgctgaacaagcaattatcgccgagagagcaggcgcatgtgccgtgatggcgctggaacgtattccagccgacatgcgtaaatccggtcaagtgtgtcgtatgtcagatccacacatgatcaaggaaatcatggccgcagtgtccattccggtgatggcaaaagttcgtattgggcactttgttgaagcacaaatcctggaagcgctacaggtggactatatcgacgaaagtgaggtcttgaccccagctgactggtctaatcatatcgagaagaacagcttccaggtcccatttgtttgcggtgccaaagatttaggtgaggcattgagaagaataaacgaaggcgctgcgatgatccgtactaaaggtgaagctggtactggtgatgtgtccgaagccgtgaagcacatcaacaagatcaggggtgagatccagctatataaagagaccttgactaaggagtcagatcttgccgcaaaagcattggaactaagagtgccagtcgaactattgaagaccacgattgagaacggcaagttacccgtagttaatttcgctgccggtggtgttgctacgcctgcagacgctgctctgctgatgcagctaggctgcgagggtgttttcgttggctcaggtatcttcaagtcttcaaaccctgataagttggcccgcgccattgtggaagccaccactcactacgacaacccaaaaaaactgttagaagtatccagcgacttgggtgatttgatgggtggtatttcaatccaatcgatcaacgaggcagccaacaaaaacggcacaagactttctgaaatcggatggtag

SEQ ID NO: 819 - DNA, 1023 bp, Saccharomyces pastorianus
atgtctaccgataaaatcacatttttgttaaactggcaaccagccccataccatattccaatcttcttggctcaaaccaaaggttacttcaaggaacaaggtctagatattgctgttctagaaccaaccaatccttcagatgtcactgaattgattggttccggtaaagtggacatgggtttgaaggccatgattcacacactagctgccaaggctcgtggcttcccagtcacttccgtcgcctctttgttggatgaaccattcactggtgtcctatacttggccaacagtggtatcaccgaagatttccaatctctaaagggtaagagaatcggttacgttggtgaattcggtaagattcaaatcgacgaattgactaagcattacggtatgactccagacgactataccgccgtcagatgtggtatgaacgttgccaagtacatcattgaaggtaagattgacgccggtgttggtatcgaatgtatgcaacaagtcgaattggaggaatacttaaccgcacaaggcagaccagctaccgatgctaagatgttgagaatcgataagttggcttgtttgggctgttgttgtttctgtaccgttctttacatctgtaacgacgaatttttgaagaagaaccctgaaaaggtcaagaagttcttgaaagcccttaagaagtctaccgactacatgttgaacaacccagttgaagcttggaaggaatacgttgacttcaagccacaattggacactgatttgtcttacaaacaataccaaagatgttacgcttacttctcttcatcattgtacaatgttcaccgtgactggaagaaggttaccggttacggtaaaagattgaacatcttaccaccagactatgtttctaactacaccaacgaatacttatcttggccagaaccagaagaagtttctgatccattagaagctcaaagattgatggctcttcaccaagaaaagtgtagaaaagaacacactttcaagagattggctcttccagcttaa

SEQ ID NO: 820 - DNA, 1338 bp, Saccharomyces pastorianus
atgattacaaacatgattactagatatacagcgctgctgactcttttcaccgtgcttgcgatgtggacaggtttgtcagaaactcacccgttggcagacaattcagatgcatctaagttgaactcagattactcgcttcctcacctgattaacctacgtaaagtgcctagtaactggcaggctggcgagcaagctagtttggaagaaggtagagttgtattaacttctaagcaaaacaccaagggttcgctttggttgaagcaagcgttcaatttgaaagattcttttactttggagtggacttttagaagcgtcggctattctggtaagactgatggtggtatatcgttttggtttgttcaagattctggtataccaagtgacaagagtctgtacaatggcccagccaagtatgatggtctacaattgctggttgataataacggtcccttgggttctactcttcgtggtcaactaaatgacggccaaaaacctgtggagattgcgaatatttatgaaagaagttttgcctcctgtttaatgggttaccaggactcttctgttccttcaacaattagagtcacttatgatatcgacgacaataacctattgaaagtgcaagtggataataaaatctgtttccaaactagaaaaattcgctttcctactgggtcataccatatcggtgtaagtgctgaaaacgggagagtggataagaatgcagaatcatttgaaattttaaaaatgcaattgtttaatggtgttattgaagattctttgattcctaacgttaacgcaatgggccagccaaaaatgatcacgaaaattattgatcaaaagaccggcaaagaaaagcagatcgaaaagacagttttcgatgctgataaggacaaaatttctaactatgaactctataagaagctagatagaatcgaaggtaagattctcgctaacgacatcaacgctttagatggaaagttgaatgatgtcgttaaagtacaacaagaattactatcattcatggcttctttaaccaaccaacgttccacaaagcaatctactgataacaaaaagggagtttctactgaggacatcattgctgaagataaagaagagtacaaagatttcttatctctgaaccaaaagttggaaaaaatagtggtagaacaagaaaaatatagagaagctgcaaaacgccatggtcaaggtggtcctcaagtggatgaaattgccagaaaattgatgatttggctgcttccattaattttcattatgttaataatggcgtactatacatttaaaatcagacaagagattatcaagaccaaactattatga

SEQ ID NO: 821 - DNA, 624 bp, Saccharomyces pastorianus
atgctcaaacgtattgttggaattcctacaaggcgtgttttccatagaagtgcgttgttattcagcaatgattttgaaactgttcatattccaaacactaatcacttcaaagatttactaattgcaaaaggtaaatttcaagaggatcaagcaacaacgatagtggaaataatgacagaagctattaggggcggggtgtatcatgtctcacaagatctggctaagagagaaaaattgacacaactaagttaccaacagcgtgttgatttcgcgaagttgagagatcagctactaagtgctgatagaagtgaatttcataacatccaaaacgaatacgagagtgtgaaaaatgatctggagaagttgagaaataaactaagagaagaaattacaaagactaacgcaggctttaagctagatctgtccttagaaaaaggtagaattagggaagaaagtagtcatcatgacttgaaaataaaggaaatcgacacaaaaatcgagcaagaagtgaccaacatgaaaatgcaaattgattctgtaaagactcaagtcatgcaatggttgataggtgtctgcacgggtacctttgcactcgtattagcatacatgagactattgacgtag

SEQ ID NO: 822 - DNA, 765 bp, Saccharomyces pastorianus
atgagtatttctgaattcgcttacaaggaaaagccagagactttggttttattcgatgttgacggtactttaaccccagccagactgactgtttccgaagaagttagaaacactttgatcaagttgagaaataagtgctgtatcgggtttgttggtggttccgatttgagcaagcaattagaacaattgggtccaaacgtcttgaacgattttgactactctttctctgaaaatggtttaaccgcctacagattgggtaaggaactggcttcccaatctttcatcaactggctcggtgaagaaaaatacaacaaattggctgtgttcgttttaagatacttgtcggaaattgacttgccaaagagaagaggtactttcttggaattcagaaatggtatgatcaacatttccccaatcggtagaaatgcttccaccgaagaaagaaacgaattcgaaaggtacgacaaagtacaccaaattagagctaaattcgttgaagctttgaaaaaggaattcccagactacggtttgactttctccattggtggccaaatctcctttgatgtcttcccagctggttgggataagacctactgtttgcaacacgttgctaaggatggtttcaaagaaatacatttctttggtgacaagaccatggttggtggtaacgattacgaaatctttgctgacgaaagaaccatcggacattcagttcaatctccagatgacaccgtcagaattttaactgaaatattcgacttataa

SEQ ID NO: 823 - DNA, 1623 bp, Saccharomyces pastorianus
atgaaggctatgaaatctattatttggagacttcccaaaatgccgaaaatcaaaatcacaaaaacttacgaagttgccaaaatcacggcaatattaacccttataggatttatcatgggcctcgaagttccgtcattagcaacttttctcacaaacaagacattcaacgaatatttcaagtacccaacaccattgcaacaaggtctattaatggggtccactcctctgggtggcatagctgggtgccttatttattgtatgatgaatgataaatatagtagaatttaccaatttcaaacgggaataataatttggaatatagttacactgttgaatttcggtatttggaacttgttaggtttactgatttgtcgagtgatcaaggggatgatactggggaatttttcgatcttggtggcttcgtatgctaatgaaattattcctcgcgacaaacgtggtagtacaatgagttatattcaattgtgtttaaccattgggattcttgtcatgcattacttgtgcattgcattgagcctttggaagtcacatttcgcgttccgtgttgcatggtgtataggaattgttcccggagtggcgttttgggcagctagttacgccttaccagaatcctaccattggctagtactgcatggacagatgagtaaagcccaggagattcaacacaatttagccaagaaatttaacgaaagccagccaagagatgcagtaccagaaatgagtaagattgaattagcaggagatttttggattggtgttaacgatctaaatttctgcaaaaaattgcctcgtggttcattgaagcctttggttcttggtatgactttacaattattgattcaattcagtggtataaatatcatcctaggttatatcacctacatttgcgagattgtggggctcgagggaaatgtgaaattattcacaagttccataccctacttcatcaatatggttttgagtttattaccaattacgtttatcgattacacaagcagaaaactaatcacagtgctgggcggattccccataagtgggctattagttactattggtgcattatttgttagatatggtcaagataccaaaccgatcgatggtaataagagtttggtttggtctattggagaaaacccgttcgtgggcgggtggatcttagcattgtgcttcctgattgttgggatttttgcgatgagcctttctagtataccttggatttacacaaatgaaatgttgccgtcacgagtgaaagtgaaaggatttgcaatttgcgtaacatttggatggttgggcaactttatattgacgtttctatgtcctgtgatgatcgaaacgttaaagggcacaacgtttataatatttggggttttcacgtttataataacgttaattgttttatttttgttcccagagacaaagggaatgagtatggaagacgttgataaattctttgagtttgaaaacagagtggaccctcatttgcatgaggagaagggtatcaagactccagattcgaattccaatatcggctccatacggtcctcggaagaaggggaattgcataagcctattaaattgaatagcaatgaagagatgattatttga

SEQ ID NO: 824 - DNA, 1374 bp, Saccharomyces pastorianus
atgagggaaattattcacatctccacgggccagtgtggtaaccaaattggtgctgcgttctgggaaacgatctgtggcgagcacggtttggatttcaacgggaactaccatggccatgacgccattcagaaggagagactgaacgtttacttcaacgaggcgtcctccgggaagtgggtacccaggtctatcaacgtggacctggagcccgggaccattgacgcagtgcgtaactcctccatcgggaatttgttcagaccggacaactacatctttggccagagctccgcgggcaacgtgtgggccaagggtcactacacggaaggtgccgagctcgtagacagcgtcatggacgtcatcagacgggaggccgaagggtgcgactctttgcaaggtttccagatcacgcattctcttggtggtggtactggttccggtatgggtacgctgttaatctcgaagatcagagaggagtttccggaccgtatgatggcgacattttccgtcctgccctctccaaagacctccgacactgtcgtggagccctacaacgccacgttatccgtgcaccaattggtagaacactccgacgaaaccttctgtattgataacgaagcgctatatgacatctgccaaagaaccttgaagctgaaccagccttcgtacggggacttgaacaacttggtctcgagcgtcatgtctggtgtcaccacttcgttgcgttaccccggccaattgaactcggatttgagaaaattggcagtcaatctggtcccattcccacgtttacatttcttcatggttgggtatgcgccactgactgcgattggttctcaatcgttcagatcgttgaccgttcctgaattgacccagcaaatgttcgactccaagaatatgatggccgctgctgacccaagaaacggtagatacttgaccgttgcggcattctttagaggtaaggtttccgtgaaggaagtggaagacgaaatgcacaaagtacaatccaagaactcagactacttcgtggaatggatccctaacaacgtgcaaaccgccgtgtgttctgtcgccccacaaggcttggacatggctgctactttcattgctaactctacatccatccaagaactgtttaagagagtcggcgaccaattttccgctatgtttaaaagaaaagctttcttgcattggtatactagtgaaggtatggacgaaatggaattctctgaagctgagtccaacatgaacgacttggtcagcgaataccaacaataccaagaggctactgtagaagatgatgaagaagtggacgaaaatggtgatttcggtgctccacaaaaccaagatgaaccaatcgccgaaaattttgagtaa

SEQ ID NO: 825 - DNA, 4059 bp, Saccharomyces pastorianus
atgctaagaccagtctacaaatctgtagtcaagacatcaatactgcaaagacgactaatatcgtcaaagggttccaagctatataagccttctccagattcaacaagtaccatactaataaaagatgatcctctggtagccgcttcttcctcctcctcatcttcctcatcaggcataataaactcatccgatttcccgttgttcaacaaaagtaacaagaacaccactaataatctatcttaccagtggaaaaatacctccaatatggagtttgatccttttaacaaatcgcatgcctcggcagtaacttcgatgacaagaaccagagacgtcatgcaattgtggtcgctgttggaggcatgtttgcagtcaaacctgctgaaaagggctttttctatattagaatcactgtacttgatacctgaacacaaacagagattcattgaggattataacatgtacctggattcattttcgaaaaacgaaccaaatttccccattataaaaatgaacgaaaaattaacgaacgatttggagacaagcttcaaagacgtaaattataacgacaagactttggcaataatgattcatcacgctttaaatttccacccaacggcaagttctatgcttctgtcgcccacaatttccgcttatttgaaaatgagtgtgaacggcgtcagagacatcttatcgaacctagatattttgaccatatcggatctgagtatcttggtgaacgacctaaaaatcatatcgttgtcacagttgccaacttctgtcaagcccatattggaatcccttgcaccatcttctacacctgtaaataatattgaaaacgaaaatggttccaacaaaatggaagctgagaaagattcaaatatagaccaaaaattagaattgggccgtgactctacaaagacaccttctttagaccctcttcgggaagcctcattagatgtctcagtgggagttttaccaaaggacgctgaaaagcttgtggcagtagacaccattgggatgagagttattagacatactttgttaggattgtcattgaattctcagcaaagagaacaaatttccaaattcaaatttgatgccaatgagaacgttttaaatatgaaacccacgcaaaatggtgaggataatgatcctccgataaatttttttgagatttacaattcattgccaactttggaagaaaagagagcatttgaaagtgcactaaacttattcaatcaagatagacaaaaggtattagaaaaccgtgccacagaagccgcaagagaacgctggaaacatgattttgaagaggcaaaggctagaggtgatatctctattgagaaaaacttaaatgctaaattgtggaaatggtacaacgatatgttacccttaataaaagaagagattagccactgtaaatcgctattatcggaaaagccagtgaataaaagggccttgaataaagtagacacaaaccgtttggggtatggtccttatttaacgttgattgatccagggaagatgtgtgttattacgatcttggaattattaaaattgaattcaacaggtggtgttatcgaaggtatgaggactgcaagagcggttatttcagttggtaaagctattgaaatggaatttagatcggaacaagtcttgaaaagcgagtctcagacattcagagacgtcaacaagaaatcaccggaattcaagaaactggtgcaaaatgctaaatctgtgttcaggtcatcacaaatcgaacaatcgaaaattttatggccacaaacaataagggcaaaaatcggttctgtgttgatttctatgttgattcatgttgcaaaggtctctgtgcaaggtattgatccaataacaaaggctaaagtacatggcgaagctccggctttttcacatggttaccaataccataatggttctaaactgggtgtcttaaagatccataagactttaattcgtcaattaaatggtgagagattgattgcatcggttcaaccacagctattaccaatgttggtagaacctaaaccatgggttaactggagatcgggtggataccactatacccaatccagtcttttaagaacaaaagactcaccggagcaagtcgcgtatttgaaagccgcctctgagaatggtgatatagatcgtgtttatgatggtttgaatgtgttgggtgatacaccttggaccgttaatagaaaggtatttgacgtggtttcccaagtttggaacaacggtgagggtttcttagatattccaagttcccaagatgaaatggttttaccaccagcacctcctaggaattcggacccttctatcttaagaacttggaaactgcaagtcaagacaatcgcaaataaattttcatctgatagatcaaatagatgcgacacaaattataaattggaaattgcaagggcatttttgggcgaaaaattatattttccacataatttagactttagaggacgtgcttatcctttatctccacatttcaaccatcttggtaatgatatgagtcgtggtcttttaatcttttggcatggtaagaagttgggatcatctggtttgaaatggctaaagattcatttatcgaacctgtttgggtttgataaaatatgtttagaggatcgtatcgcatttacagagtcgcatttgaaagatattaaagattccgcagaaaaccctttgactggagatcgttggtggacaacggccgataagccatggcaggcattggctacatgttttgagctaaatgaagttttgaaaatggataatccagaagaatttgtttctcatcaacctgttcatcaggatggtacatgtaatggtttacaacactatgctgccttgggtggtgacgttgaaggtgctactcaagtgaacttggttccaaatgataagccacaagacgtttatgcgcatgtggcaaaattagtgcagaaaagattagagattgcagctgaaaaaggtgatgaaaacgctgaaatcctaaaggacaagattacgagaaaagttgttaagcaaactgtcatgaccaatgtgtacggtgttacttatgtgggtgcgacgttccaaattgccaaacaattgagtccaatttttgatgaccgtaaggaaagtttagatttttctaaatacttgaccaaacacgttttcggtgctattcgtgagttatttcatagtgcgcatctaattcaagactggttaggtgaaagcgcaaaaagaatttctaaatccatcaggctggatgttgacgaaaaatctttcaagaacgggaataaaccagactttatgtcgtcggttatttggacaacgccactaggtctgccaattgtccaaccatatcgtgaagaaagtaaaaagcaagttgaaacgaatctacaaaccgtctttattagtgatccatttgctgtcaaccccgtcaatgcaagaagacaaaagaccggtcttccaccaaatttcattcactcattggatgcttcgcatatgctgttgagtgcggcagaatgtggaaaacaaggattggattttgcgtctgtgcatgattcctactggacgcatgcatctgatgtagatactatgaatgttgttttaagagaccagttcatcaaattgcatgaggtcgatttggttatgaggctcagggaagagttcacccaaaggtataagagctacgtcaagattggcaagttaaagagagcaacagatttggctcaaaaaattatcaatattcgtaaagatctatcgaagaaactaggaagaaataccacgttagcagatgaaatctatttcgaaaagaaaagacaacagttactaaatagccccttgccggaggatagaagtatcggtgagaagatgattacaaccgtatcgttatttcaggacgtcaaggatttagacgcacttgaattagaaaacggtggtgatgaaaatagcggtatgagcgttcttttacccctaagactacccgaaataccaccaaagggggattttgacgtcacagtattaaaagatagtcaatacttcttttcatga

SEQ ID NO: 826 - DNA, 3204 bp, Saccharomyces pastorianus
atgtctgattcggaagaagatttgggcctacagttgaaaggcttgaagattgcaagacatttgaagagctcagaagagcgcacctgccccggatccgattcaggttccgactcgagcaatcacgatgatttaaccattattaataatagtaatggtaaagacacctttgttggtcaggacagggcagatggagtatcggaggaggattcgttgcacgaggaggaacctgcaatagaggaaagaagtttgccctcaccacaaccacaggctagtacagatgaagcagatagcggtactaaccgggacgatgatgcgggtttgcaggatccctttagttctgtacaagatcctgatccattcgcggataagaagtctagagatggttctgactccggctctgattctgatgatggctggcaagagatgcctgccatatcatcattcaatatatacaacaataaaggtgaactagagctgacgtccaaggtaagagacccagagctcccccttaacacgcctactacagttctctccgcaaagaactcaaaaaatataaacgattccagattcgattatacgaaaatggcggcagaacagcaagctcagcgatcttatcgaacaaataagaggacagatttccttttcgaccataaggttctgaagaaaaaactgaataattcacaaaattccattagcctaacctcttccccttcgactacatcattgaataatgacaacaataacaacgacgatggtgaagattcgtatgatgaatatgaagacgatgtagaaccggttagtgatttagaccgtgattcccagctaaacataacgaaaaacctattaaatgatatggagaagtttgcatatataggtgcaataaatattcttgcaaaccaaatgtgtacagatttagccacgctatgcctttgtattgacatcaaatcccacaaaaaattagcacatcgactacaattcacccaaaaggatacggctgcgtggaaaaccgtggttttatcgaggctatatgatcatttaggcatatccccagaagaaatcgcaatgatcgagaaactttccttgcacaagatcgaactagcagatctatgtaagtgtttgaagactacccaaagcatagacaatccatgggaggattgtccgggctatgatgaaagtgttcaagatgaaacgataaaagaagagtcttccaaggaacaaaatgacgcgacactgcccaccacgcccaggcaagaacaacaaactgaaaaatcggaggagtcgaatgttgaaggatcttcatcgcctttgaaggtttcatcaaaggtactcgaccctgagaacgtcaaagatcaagataaactaaatttagacgtggcgtggaccattatatgtgacctcttcttgatatgtttacagtcttccacctatgattcaagatcaagaactttgttaatcagttttgctaaagccctgaatatgacaaatctagaaatctgtgaatttgaaaggcgtgtaacagactccttggacatggagcagtcgacagaagatcaggtatgggatgagcaaaaccacatgaagaatagaagaaaaagtaagagaagaaataaaatggcatatgtggcgctggctatggtaggcggttcattgattcttggtttaagtggtggtttattagcacccgtcataggtggtgggattgcagccggtctatcaacgatagggatcaccggtgccacaggttttttaactggggttggtggtactgctgtggttgcagtatcaagtacagctattggtgccaacattggtgctagaggtatgtccaagagaatgggaagtgtgcgaacttttgaattcaggccattgcataataatagaagagttaatctaatattaaccgtgtcaggttggatggttggtaacgaggatgatgtcagattaccgttttccacggtggatcctgttgaaggtgatttatattctttgtattgggaaccagaaatgctgaagtccatcggtcaaaccgttagtattgtggccactgaaatctttactacatcacttcagcaaattttaggtgccacagttctaacggcactgatcagttccgttcaatggccaatggccctgtcgaaactaggttacatcttggataacccttggaatgtctccctggatagagcttggtctgcaggcaaaattctcgcagacactttgattgcaagaaatctaggctcacgcccgattacgttaatcggtttttcgataggtgcgagagttattttttcttgtttaattgagttatgcaagaaaagggctttaggtttgatcgaaaatgtgtacctgtttggtacaccagctgtcatgaaaagggaacagttagtcatggcaagatctgtcgttagcgggaggttcgtaaatggctattcagataaggattggtttttggcgtacttatttcgagctgctgcaggtggatttagtgctgttatgggaatatcaaccatagaagatgttgaaggtttcgagaatgtcaattgtaccgaattagttgacggtcacctaaattatcgtaaaaatatgcccaaattaatgaagaaaatcggtattgctgttttaagtgaagattttattgaaatcgaagaaatgatgaacccagaagaagtcaagagacaaagaaaactggtaagcgatgtcgatgcagcgcaaaagaaattaaacgaaaggaaaaagcacaatagctgggtgccgaaatggctaaaacccaaaaaatctaaatggaaggttatggtcgaagaagctgtcgaagaaggaagagatatgcaagacctgccagaaacagatgccaataacaatgaaagcgaaacccaagatgagaatacacaaccaaaacgtaaagatgccgcccttgtcgatcatggggcattaatgcatgaattagagcttataaaacaggcaatgcgtgaagacgaatcaaagaaaaagaatctgccagctgaagacacgaatggagcggaagcttcaactgaatctttagacgaaacccagctcagaccaccatcaacaccaaaaataaatccaccacagagtccgaatcattttcaattattgagtgctggaagaaccattctcccggaggatgatgaaatgaattctcgagaaaaaagaaggatggaattttcttttccagatgatatatag

SEQ ID NO: 827 - DNA, 1158 bp, Saccharomyces pastorianus
atggctaattctgtagacacgctgctgatcccaggccctatcatccttagtgaggccgtccagaaggctctggacgtgccctcgctgggccacacctctcctgagttcatttccgttttccaacgggtcctgcagaacaccaggaccgtcttcaactccgctgctacctccaaatcgcagccctttgtgcttgctggctccggcacgctgggctgggacttatttgcctcaaacttcctgctctccggagctcccaacaggaacgtgttggtcgtatccactgggacgttttccgaccggtttgcagactgtctgcgcaactacggtgcccaggtggacgttgtgggccccaccaagataggcgaatctgttcctcaagaactgattgctgagaagctggtgcacaagaagtacggtgctgtcacagtcacacacgtcgacacctctacggcggtgttgtcggacctgaaagcagtctcgcagctcatcaaggacatctcgccggaaacgttcttcgtggttgatgcggtgtgctcgattggctgcgaggagtttaagtttgacgactggggggtggactttgccctgactgcgtcccagaaggccattggcgctccagcaggcctgtcaatctcgctgtgcagcagcaggttcatggactacgccctcaatgaccgcgagaacggccaagtgcacggctacttctcgtctttgagaagatgggccccgatcatgcagggatacgaggctggtaaaggtgcgtacttcgctaccccacccgtgcagctgatcaacagtctcgacgtggccttgagagagatcctcgacgaggggttgaccaagagatgggatttgcaccgcgaaatgagcgactggttcaaagacagtctggtgaacggcttgcagttgacgtccgtttctcggtacccttcgagcatgtctgcacacggcctgaccgccgtttacgttgctgaccctcccagtgtcattgcatttttgaagtctcatggcgtggttattgccggtggtatccacaaggacatcggacccaagtacatccgtattggccacatgggcgtgaccgcttgtaacaagagcttaccgtacgtgaagaactgcttcgacttgattaagttggcacttcagagaaagaagtga

SEQ ID NO: 828 - DNA, 1104 bp, Saccharomyces pastorianus
atgatactagatgatttagaccttacacagtgtgaattggtctactcgacaagaaccgctaggatttacaaatcaaatgcatacgccatcaaatgtttaccgcaagacttcaatatcccaccacataatgccaaatttgaactatcaatactacacaaagtaggttcccgatgtcggcatgtgttaccattgctagagtccaagacccttgaagatgacctgcttttgctatttgctttcgaggagatgaatctttatgaattcatgcaatcacagtataaaaaagatagaagaatgaacaatccatactacgatttgctgaaccccaccaacgaaaccgctgcgagcccgccagtcaaaaggtacactaatcaattggatgtaaacaggcattgtctgccctttttccagcaactggtgaagggcattgccttcttacacgataacaagatcatccaccgtgacatcaagccacagaacattgtgctgacggctggcaccacgactgactccccaaggctgtacataattgatttcggtatatcatatgacatggaaagcaaaccacaaacaagcatggagcccatggatggtaagatcacagatataagcacggggatatacaaggcacccgaggttctgttcggggtgagatgctacgatggcggagtggacgtttggtcactactgatgattgtctcccaatggtttcagagggaaacagatcggatgggacacgttccggcgatgattaatgatggcagcgacgaaatgaacctggatgggagcgacttcagattgatctgctcgatcttcgataagctgggcataccgtctctcgagaagtgggacgccgttgcaaaacatgggtctgtagacgcctttgttggaatgtttggtgcggatggcgatgggaactacatactcgaccaggggaaggacgtacaaatcaacgccatcgagaggaacatgcctcggcttaatgagattgtggacgtgaaagtcaaagaaacgttcgttaattgcattctaggaatggtctcgttttcaccaagtgagagatgggactgccacagaatcttgcaagaactggaaaagccataa

SEQ ID NO: 829 - DNA, 870 bp, Saccharomyces pastorianus
atggtttcccagtttgctattgaagtgcgtgacttgacgtataagtttaaggaaagttctgaaccatctgttgttaacatcaatttggagatcccatggaatacgaggtctttagttgtaggtgcaaatggtgccggtaaatccacccttttgaagttactaagtggtaagcatctttgcctcgacggcaagatcatggtgaatggccttgacccattcagtcccttgtccatgaaccaagtagacgatgacgaaagtgttgaggattctacgaactaccaaacgaccacttatctgggtacagaatggtgtcacatgagcatcattaatagggacattggggtcatggaactattagagagtatcgggtttgaccattttagagaaagaggtgaaaaattggttaggatcctagacattgacgtgcgctggagaatgcacaggctgagtgatgggcaaaaaagaagagtccaattagccatgggtcttttgaaaccatggagagtcctactacttgacgaggtcactgtggacttggacgttattgccagggcaagattattagaatttttgaaatgggaaactgaagccagaagatgctcagtggtttacgctacgcatatttttgatggattggccaaatggcctgaccaagtgttccatatgaaatctggtaagatcctcaacaagctggactttctcaaggatgtggagttttccgaggtggtcaacgccaaagttaacggccaagtggcctttgatgaagacagcgataaggttgtcattagtaaagtgaacagtttgcatccgttagcactagaatggttgaagcgtgataaccagatccctgacaaagagatcggtatatag

SEQ ID NO: 830 - DNA, 1494 bp, Saccharomyces pastorianus
atgccactacgatcattattaaatgctggccgcaataggcacgtcaaggaccggttggcagaggaaggagttgacgtctatttgcaatcgctcgatagttcaagcactgaaaaggcagaagaacaaaaaggggaagccatatcgaggttgttgaagaagaaggatgttcgtttgttgaggcatatgggcatagggccgctgggttttgtgtccaatccgctcagaagagactgttggtatgaattgttaacgtcgcagttgcacatcgatgatgctacggagtactttccgccggtagagaaacataaggatgaaggccaggtggcactggatgcagagaggtcttttggcgggatagcaaacaagaagttgaaggtacagttgaaggcgttgctggtggagttaattaccgacatattaaggaagtacccgtcgctgaactattaccaaggttaccatgacatcgtatctgttttcattatgtgctttagttgggacgtcactgaagagaaagggttggaatgggggtctctctcgttgcgagaacaaattaacattaataaattgttttactgtgttgaggcgtttacattattatatctgagagattttatgatgaactcgttagattttccattcgaacaattgagcttaatctcatcactgataaaggagtcggatccaaaattctataacgctttccaattcgataagaatgaaccgcttttcgctattgggtccatactgacaatctttgcacataatttaaagccaatcgatagcggcgacaccaacctacacaagacacttttccagatctttgatatgacgatatcctcacaatccatgcatttacccttgatcatatacaagaacttgctattgcaaaacgcacccgaaatattgaagcaaatagaagctaattctgaggtttttgaaaacgatttcgatttgcgtcatggagctatacaaacagtcttacagaaaaaattatacgacgaatcgctttgggaagaagttttgcaaataactagggaccattcggcaaatgctagcagaagggttttaaaaagggtacgtttgaacaagtatagtacattactcaatacagcgtgcggcaacccatccagtttccaaatggacgccgttgttttctacctagacgaacaaactaagatgaacggacagtataagaagaacaaacacgacggaatcgcaactaggtccaagacaagggcactagtccagaggctgggccattttttgccccctaagtatgataaatggggcaagatatctttactaatcggaatcgtggccatcctgtaccaactacggaacacgaggtcgttaagtctagtactcaatttacgatacatgatatccacaaagttgaaagacctgtcacatgtgaatatgaatttgcatcacgtcaataacatctggatggatccaatcaaagatatcttgaggtttggacgcccaaatagataa

SEQ ID NO: 831 - DNA, 1296 bp, Saccharomyces pastorianus
atgtctggtacagctccttcgttaagcgatttgttttatgactctacatacaatccaggccaaagcatcattgactacacttctatatacggcaacggtaccactgtcacattcgatgaattgcaagcccttgtgaatagtacggttactgaagctatcatgttcggtgttagatgcggtgcggcagccttaactttgattgtcatgtggatgatatcgagaagtaagaaaactccaatcttcatcatcaaccagatttcattactgttgatcgttttgcattccgccctctatttcaaatacttactgtccaattactcctccgtgacgtatgctctcactgggttttcccagttcataagtagaggcgacgtccatgtttacggtgctacaaatatcattcaagtgctgctagtcgcctccattgaagcatcgttagtgttccaggtcaaagtcatcttcacgggtgacaatttcaaaaagataggtctggtgttgacatcgatatcttccgctctggggcttgctacagtggtcatgtattttgtgagtgctattaaaggtatgatcgcgacttatcaagacgtcagcgctactcaagataagtatttcaatgcgtccaccatcttactggcgtcttcgatcaactttatgtcgtttgtcctagtcgttaaattgattctggctattagatcaagaagattccttggcctcaaacaattcgatagtttccatatcctacttgttatgtcgtgtcaatctttgttagtcccatcagtgatcttcattcttgcatatagtttgaaaccagaacaaggtacagatgtattaaccactgttgccacattgttagctgttttgtctctgccattgtcatctatgtgggccacagccgccaacaatgcatccaaaccgaccaccatcacttcagattttacaacgtcaacaaacggattctacccaggtggatcttctagttttcagactgaaagtgtcaacagtgatgcaaaaagcagctttagaagtaggctgtatgatttgtatcccagaagaaaagaatcaatatcagacaaacattcagaaagaacctttgtggatgggactgcgaacgatatagaaaagaatcagttttatcagttgcctacgcctacaagttcaaaaaacaccacgacagggccatttgctgatacaaattataaggaagcgggtagtgaacgtgtcgctgtgtatactcccaatactgctgcagatgaagaagcaagaaggttttggactgaagataatgataatctatga

SEQ ID NO: 832 - DNA, 3090 bp, Saccharomyces pastorianus
atgggtatcaaaaggttgattggtggtataacgcggcccatattcaacaaagttagttcatctagacaatactcgagagtacatactgaccgtgaagacagggaaaagccttctctcaagtataacagcaataatagcatggctgaaaaaaaaaattatacgtataacgctttctccattcttggcataatatgcatctgttcggttttgttaatatcgttgttaaaaccatttgacggcgcagatgctcctcagtgtaggtctatttatatgtacccatcatatgcaagtatcgatggattcgatgaacgatatacacccttggcgcacaagtatcatctttatctgtatcgagaacaaggtgtagatacaaaacctttaaatgacgataaattacaactcgatggtatccctgtgcttttcataccaggaaatgcaggttccttcaggcaatccagatcaattgcttctgcatgctctaatttatactttgatattaataccagagcgaccttgaataatgaaaatttacgaaatttggacttcttcacggctgatttcaatgaggatttcactgccttccatggtggaacaatgcttgatcaggctgaatacctcaatgatgccgtcagatatattttgtctctttatgaaacgacacctaattattcacatcctattccggaatccgttattttagttggacattccatgggcggtattgtagctagagtcatgctcactttgaagaaccatatcccgggaagtatacgatctatattgactctatcttcacctcatgctgcctcgccggtaacttttgatggtgatatattgaagctctacaaaaatacaaatgaatattggagagatcaactatcccacaacgactctttcttctcaaagaatatctcattagtttccatcacgggaggtatattagacaccaccttacctgccgattacgcctctgttgaagacttggtaagcttaaacaatggattcacaagtttcactaccacaattccagaagtttggactcccattgatcatttggccatcgtttggtgtcagcaattaagagaagttattgcacgccttttattggaaagcatagatgcttccaaacctgaaaaagttaaatcgttggatgagaggttacaaattgcaaaagaatttttactttcagggtttgaagattatgcatcggtaaacaacaaactgaattatcctcaagaaagtttacaagaattcagtggcaacttcttttcagacttcaccactttggcgatcaacgatgtgctaaatatttcaatgtcaaaccttgaaaattgggaagatgattacactaaagtaaatattccaaggaacgcatcttctatcggacatttaaaattcatgttgttaactagtttggaaacgcctatcgtatatttctgtgagaattcgaaaaacctaagttgtataacggctgaaggtagtatcttaacagtacctagatcttctcaacacacacaggttgcagcagattcctcttttggtgaggaagaaaatcctttcaaggtcatcagtgttgaaaaagagatattacagaaatacgactttctaatgataagtaagcctacttatgatgagttttccaaacaagaaactaatgggtcaaatgatggattccttttggcatcattgtccaatgagccaagtgttcaagtaagtcatactacaccttctcagctattgctatttggagagacgttgcgtttaaatggtgtagacatcgaacaaatcataagcttccataatttatgggattctttactatcgtataagttagagacaaaacttgaaggaaacaacaagtctattccagctggtgaggcgttattccagccttttataagacaatgggtttatgagccttttgaatccaagtggcatttggatatcctaaatcaagatgttgatataaatatgcacaacgtggcgccgtttattccattgaatgaatctgaatcaagatcactacaattgagttttttcgttccgcctggaatgtctttggaagctaagatgaccattaattggtggttgactttaaagatgctttttatcagatacagattagcgcttgcatcttttccggttgggtttattgcactcgtgctggcatatcagttttactggtacaataagacatctgaattcccctctttcgatgccaccataagccaaattatgagaaagcacggcatatttatgatgtttgctcttttcttagcttctcctatagttaataataagttggtccaacgaatactctatttcttagatccggtcggtttaaactatccatttctattgtccgaaaaacacatgcacgcaaacttttattatttggggatcagagattggtttatgtcgagtattgggttattgtttgggattatgactattggattgttagccctagtttccaaaattttgaaggcattggaattattattaacatcacttcaacgaatgttgaaaggggggaataccgaggccaaagaatgtgttggtattgctgaacctaaggtatatggtaagggcagactgatagcattaatattcctattattattgatttttttttacataccgtatcaaatggcttttattatcacattagttattcagatagctacctgtgtcagaatagcgctactacagccatcaaacgacgcacaaaaaaccaatttgttaaatttcaatatgacattactcatgcttttattatttgttagcgcgattaacattcctatcgtcattgttttcttacataatgttgccattaggtgggaaacttcgttcagatcacatcacaacatcctagctgtggcaccaattatctttttggttgggaacaattcagttttcaaaatgccaaagagtgtttcgataagatcgttggatggtgcaattaccgttctcttattcgtgtatacaatgctattcagcttcatttatggaataaggaacttatactggatacatcatttggtgaatataacatgcgcatggctactattttttgaagcaatacactga

SEQ ID NO: 833 - DNA, 2589 bp, Saccharomyces pastorianus
atgccgacaccttcgaacgctatagaaatcaacgatggctcacacaagtctggcagaagtactaggcgatctggctcgaggagtgcacctgaagacggcctagattcactggggaagggcgattccggtgctggcgccagtgctggtagtagtcggttcagacatcggaaaatatctgtcaaacagcatcttaaggtctatttgcccaatgatttgaaacatttggacaaggatgaattgcaacaaagagaagtcgtggagatcgaaactggtgtggagaaaaatgaagaaaaggaagttcatttgcatcgaatattacaaatgggtaccagtcatacaaagcagaaagattatattccgacaccagatgcttccgtgacttggagtgattttggtaagttttatactggcactttccaggagacaactagttacataaagttttctgccacagtagaagattgttgtggttcgaactataacatggatgaaagagacgagatatttctaaatgaagaagtgaataaagattcgtcagatattttaactgaagacgaatttgaaattctttgctcgagtttcgaaaatgccattcatgaacgtcaaccttttttgagtatggatcctgaaagtatactttcatttgaagaactgagacccacattaatcaagtctgatatggctaactttaatctaaggagccaattgaactatgagataaattctcatgaaactcattttatcacacaattcgatccttcctctcagatggatacaagaccttcaattcaactaattgaaaaatttggctctaagatttatgaatattggaaagaaagaaaaattgaggttaatgggtacgaaattttccctcagttgagatttgaaagacctggtgaaaaggaagaaatcgatccgtacgtttgcttcagaagaagagaagtcagacatccaaggaaaactagacgtatagatatcttaaacagtcagcgtttgaggtcgttacatcaagaattgaagaataccagggaattagctcttctggttgctaaacgtgaaaacgtttcattaaattggattaatgacgaattgaagatcttcaatcaaagagtgcaagtcaaaagtttgaaaagatctttgaatatcagtggtgaagatgatgatttgattaatcacaagagaaaacgtccaatgattttcactattgagcaaagagaagcagaattaaagaaagcagaattgaagagagctgcagctgccgctgccgctgcaaaggctaagaacaacaaaaagaataaccaactcgatgataaatcctccactaggctatccaaacagcaacaacagcaactcttacagcaacaggaacaacagcaacagaatgccatcaaatctgaaagtggaaagcaacttatgcctgtgtcttcctcggtatcgtcacagccaattacatctcacgtttatgttaaattaccatcttccaagatcccggatattgtattggaagaagtagattctttgctgaacagtaaagaaaaaaacgcaaggaagtttgttcaagagaagatggaaaaaaggaaaatcgaggacgcagatgtatttttcaatttaacagatgattccttcaatccagtatttgatatgtcactacctaaagatttttccacaaataacattccgttttcgtctattgcgtcatcgaacttccaaattgatagatccttttactcccctcatttaccagaatatatgaaaggcatctctaatgatatcaaaatttatgattccaatggccatcctaaaaatcaagataataacaacttgaacgctagaaagattaaaaaaactgaactgtacgatccgtttcaagaaaatttagaaattcattcgagagaatatccaatcaaatttaggaaaagaatcggtagatctaatatccagtacatcgatcgtaagcccaattatacaataacatccgccaagccaagcagttctttaatggattttgtggatttcgattcaatcgaaagggaacaatatccaaaagaagttaacgaaaataatgaatcgataaatgtttacgattccaaatatgacgaatttgtgaggctttacgacaaatggaagtacgattccccacaaaatgaatacgggatcaagttttcggatgaaccggcaaggttaaatcagatttctaatgacactcaagtgattagattcggtactatgttgggtaccaaatcctatgaacaattaagagaagcaacgatcaagtaccgtagggactacatcaacaggctgaaacagacccacatgcaacatttacaacaacagcaacaacagcaacaacagcaacaacaagcacaacaagcacaacaagcacaacaagcacaacaagcacaacaagcacaacaagcacaacaagcacaacaacaacagcagcaacaacagcagcaaacacaacaacagaagcagaagcaacaaaataatcatacaaactcgtcaaattccctgaaaaaactgaacgattcattggtaaatcccggggctaaacaaacctcttctataactcaaaaaaactcttcatga

SEQ ID NO: 834 - DNA, 1512 bp, Saccharomyces pastorianus
atgtccgattttcaactagagattttgaaaaagctagacgaattggacgaaatcaagtccacactggccacgttccctcagcacgagtcgcaagacgtgctttctgcgctcaactcgctgaaggcgcacagtaagctggagttctccaaggtcgacaccgtcacgtacgagctgaccaaggagggtgcccagatcttgagtgatgggtcgtacgagatcaagctggtcaagcttatccaggaactgggccatctgcaacttaaagaagtcatgtccaagctgggccctcaggtcggcaaggtcggccaggcaagagcgttcaagaacgggtggattgccaagaacaacggtaacgagctcgaactgtctgctaagctacagggcacggacctgaacgggctggtcgacgaaacacaggccgttctggcgcagatcaaggccaattccgacctcgagagcatcgacgccaagactttgaacgacctcaagaagagaaaactggtcgtgcagggcaagatcaccgacttccacgtcatcaagggcgcagacttctccaccgaactcaccaagttggaaaccgacctgacctcagacatggtctccaccaatgcatacaaggacttgcagttcaagccttacaacttcaactcccagggtctgcaagtgaactccggtgcgctgcaccccttgaacaaggtcaaagaagagttcagacaaatcttcttctccatgggcttcacggaaatgccctccaaccaatacgtcgaaactgggttctggaacttcgacgccctgtacgtcccacaacagcacccggcccgtgacctgcaagacacgttctacatcaaggacccgctcaccgcggacttgcccgtggacaaaacctacatggccaacatcaaggccgtccacgagcaaggtaagttcggctccatcggttaccgttacaactggaagcccgaggagtgtcaaaaactggtcctgagaacgcacaccaccgccatctccgccagaatgctgcacgcgctggccaaggacccaaagcccaccaggctgttctccatcgaccgtgtgttccgtaacgaggccgtcgatgccacccatctcgctgagttccaccaggtcgaaggtgtcttggccgactacaacatcactctgggcgacctgatcaagttcatggaggagttcttcgagagaatgggtgtcaccggtttgagattcaagcccacttacaacccctacaccgagccctcgatggagatcttctcctggcacgagggtttgcagaagtgggtcgagatcgggaactccggtatgttcagaccggaaatgctcgagtccatgggcctgccaaaggacctgagggtcctcggctgggggttgtccttggaaagacccaccatgatcaaatacaaggtccagaacatcagagaactcttgggccacaaggtctccttggacttcatcgaaaccaaccctgccgccagactggacgaagacttgtacgaataa

SEQ ID NO: 835 - DNA, 1500 bp, Saccharomyces pastorianus
atgttaagaatcagatcactttcgaataatagacgtgccttttcgtccaccgtccgggctttgactgtaaataagtcacatgatgtagtcatcatcggtggtgggcctgctggttatgtggctgccattaaggctgcccaactggggttcgacactgcatgtgtggagaagagaggtaaattaggtggtacctgtctaaacgtcggatgtattccctccaaggcccttttaaataattctcatttataccaccagatgcatacagaagcgcaaaagagaggtattgatattaccggtgacgtgaagatcaatgtaacaaacttccagaaggccaaggatgacgctgtcaaacaactaactggtggtattgagcttttgtttaagaaaaataaggtcacatactataaaggtaatggttcgtttgaagatgaaactaagattaaagtgactcctatcgaaggtttggaaggtactgtcaaggaagatcacatattagatactaaaaatgttcttatcgctacgggctcagaagtcacacctttcccaggtattgaaatagatgaacagaaaatcgtgtcttcaacaggggccctttcattaaaggaaatccccaagagactagccatcataggtggtggtattatcgggttggaaatggggtctgtttattctagattaggctctaaagtcactgtgttggaattccaacctcagatcggtgcctctatggacggtgaagtcgccaaggccactcaaaagttcttgaagaagcaaggtatggacttcaaattaaggaccaaagtcgtttctgctaagagaaacgacaacaaaaacgttgtcgaagtcgttgttgaggataccaagacaaacaaacaagagaatttggaagctgaggttttgttagtcgctgttggtagaagaccttacatcgctggcttagatgcggaaaagattggtctagaagtggacaagagaggccgtctagtcattgatgaccaattcaattctaaattcccacatatcaaagtggtaggagacgtaacatttggtccaatgttggctcataaagctgaagaagaaggtattgcagcagtggagattttcaaaaccggtcacggccatgtgaactataacaatatcccctcagtgatgtattctcacccagaagtggcatgggttggtaaaaccgaagagcaattgaaagaggctggtattgagtacaaaatcgggaaattcccatttgcagctaactcaagagcaaagactaaccaagatgcagaaggtttcgtgaagatcctgattgatgccaagaccgaacgtatattgggggcccacattatcggtccaaatgccggtgaaatgatcgccgaagctggtttagctttggaatacggtgcctctgctgaagatgttgcaagagtatgtcatgctcatcctactttgtctgaagcatttaaggaagctaatatggctgcctatgataaagctatccactgttga

SEQ ID NO: 836 - DNA, 234 bp, Saccharomyces pastorianus
atggtttccactcctgaactgaagaaatacatggacaagaaaataatgctgaatataaacgggtcccggaagatagcagggatcttgagaggctacgacatcttcctgaacattgttctcgatgacgcaatggagataaacggtgaagatcccgctagcaacttgccgctgggcttgcaaaccgtcattaggggcaattccataatatcgctagaggctctggacaccatataa

SEQ ID NO: 837 - DNA, 480 bp, Saccharomyces pastorianus
atgagcctgccagaggggttttacataagacgggtggaagagaaggatttcgaacaggtcacggaaacattgaaagtcttgaccaccgtaggcacaattgctcctgaggccttcagcaacctcctcaaatactggaacgaatccacagtgtggaatgacgacaatgacaagaagatcatgcaatacaaccctatggtgatcgtggacaagcgcactgagaccgtcgccgccacgggcaacatcatcatcgaaagaaaaatcatccacgaactagcgttatgtggccacatcgaggacatcgcggtgaacccgaagtaccaaggccaaggcttgggcaaactcttgatcgaccagctggtagccatcgggttcagctacggctgctacaagatcatcttagactgcgatgagaagaacgtcaaattctacgaaaagtgcgggttcagcaacgcaggtgtggaaatgcaaattagaaagtag

SEQ ID NO: 838 - DNA, 1545 bp, Saccharomyces pastorianus
atgagcttccagcaaggtgttttgtcgaggtgctccagtgtccttagacaccgtacagggcgtactcgccacatcaataatattctctatagacatgccatcgcgttcgcatccaccgctccacgaataccaaagacgcagttccacacctctgccatcagacaaaatgaggcattcaaggacccctacgatactctgggtctgaagaagtctgccaccggttcggagatcaaaaaggcctattacaaactggccaagaagtaccatccggatatcaacaaggaaccggacgccgagaagaagtttcacgacttgcaaaacgcatacgaaatcttgtccgatgacacgaagagacagcaatacgaccaatttggacccgctgcctttggtggcggcggcggtggagccgccggaggtcccggcggcggatctcccttcggctcgcagttccatgacttctcgggattcaccaatgcaagcggtggctctccctttggcggcatcaatttcgaagatttgttcggtgctgcgtttggcggcggcggcggcggtgccggtgctggccgtggtggcagatcttctccgatgtatagacagtataggggcgaccccatcgagatcgtccacaaggtctcgttcaaggacgctgtgttcgggtccaagaacgtccaattgaagttctccgcactagacccttgcgggacgtgttccgggaccggtatgaagcccaacacgcacaaggtcacttgtacctcctgccacgggtcagggtccacggttcacgtcaggggcgggttccagatgatgtccacgtgccccacttgcaacggtgaaggttccatgaaacatccgcaggataactgtacttcatgccacggtgaaggtgtccaggccaacaggagcaagacaatcaccgtggacttgcctcatgggctgcaagacggcgacgtcgtccgtattcccggccaaggttcgtaccctgacatcgccgtggaggccgatcttcaagactccatcaagttgtcaagaggcgatatcctcgtgagaatccgcgtcgacaaggaccccagtttctccataagaaacaagtacgacatctggtacgacaaggaaatccccatcaccaccgccgccctaggtggcaccatcgccatccccaccgtggacggacagaaaatcagaataaaggttgctccaggaacgcaatacaaccaagtgatatccatcccgaacatgggtgtgccaagaacctcgaccctgcgtggtgacatgaaggtccaatacaagatcgtcgtcaagaagccgcaatctctcgccgagaaatgtctctgggaggccctggccgatgtgaccaacgatgacatggccaagaaaaccatgcagccgggaaccgccacgggaaccgccatcaacgaagagatattgaaaaagcagaagcaacaagaggagaaacacgcgaaaaaggatgatgaaaacactttgaaaagactagaaaacttcatcacaaacacattcaaaaagatcaaaggcgacaaaaaaaactag

SEQ ID NO: 839 - DNA, 327 bp, Saccharomyces pastorianus
atgtctgacacaggtagaaaaggattcggcgacaaggcttctgaggctttgaaaccagactctcaaaaatcatacgccgaacaaggtaaggaattcatcaccgacaaggccgacaaggtcgccggtaaggtcgaaagcaacgacaacaagggtgtcttccaaggtgttcacgactccgctcaacaaggtaaggacaacgctgacagccaaggtgaatcttttgccgaccaagccagagactacatgggtgccgccaagtccaagttgaacgacgctgttgaatacgtttccggacgtgctcacgaagaagacccaaccaagaagtaa

SEQ ID NO: 840 - DNA, 594 bp, Saccharomyces pastorianus
atgggacaaagcaagagtaatccccctcaagtgccttctggttggaaggcggtgtttgatgacgagtaccaaacttggttttatgtagatttatcgacgaacagctcccagtgggaagcacccaagggtaccacatggtcaagacctacaggtcccccaccaggtgctagcaatgagaaaagtgcacgtcaacaggcagatcaagctcctccagcgtactcttcacagtcgcaacctcaggcgcaagctcagcaagctcgctactatcagccccaacaggctcaataccctcaacaacaacaagcctactattcacagcaaccccccatggcagcagcagcaccacagcaagcatactatggtgccgccccaaacgctaagaaaagtggtgggcgtagcaacgccatgatgggtggtctactcggtgttggtgctggtttattgggtggagccatgctggaaaatgcatttgataaccacgaccaagataatgtctatgtcgaaaacaactactacggtgatgacaatggtggtgacttcgacggtggctatgacggcggatttgacggcggatttgacggtggagatttttaa

SEQ ID NO: 841 - DNA, 3687 bp, Saccharomyces pastorianus
atggggcgtttggttggcttagagctgagtaatttcaagtcctacagaggaatcaccaaagtaggatttggtgaatcgaacttcacaagtattatcgggcctaacggttccggtaaatcaaatatgatggatgccatttcgtttgtgcttggtgtacggagtaatcatttgaggtcaaacatcttaaaggatttaatctataggggggtcttgaacgatggtaatgatgacgatattgacagtgctggtgacgatgatgcgattatctccaacccaaactctgcatacgtgaaggcattttaccaaaaggggagcaaactagtagagcttacgaggctaatttctagaaatggtgacactacttataagatcgatgggaaaactgtcacctataaggactactccatattcctagaaaatgaaaatattcttatcaaagccaaaaatttcttagtgtttcagggtgatgttgaacaaattgccgcccaatctcccacggatttatctagaatgtttgaagaagtatcaggttccattcaatacaaaaaggaatatgatgagttaaaggaaaaaatcgaaaagttaagtaaatccgcaaccgaatccatcaaaaacagaaggagaattcacggagagttgaaaacgtacaaagaaggtatcaataagaatgaagaatacagaaaacaagttgacaaaaaaaatgaattacaaaaatttcaaaccctatggcaactatatcatttagaacagaagaaggaagagctaacggataagttgtcggtatcaaactctgaaatatcatcgttgaaagaaagaataaataacgaaacaaaatcactacaacgctcaaaatcttcctttgtcaaggagagtactgttatttctaaacagaagagtaaactagactatattgtcaaggataaagaaaagctagtttcggatttacggctaataaaagtgcctcagcaagcagcaggaagacgtatatctcatatcgagaaaagaattggaagtttacagagagatattgaaagacaagaatcttatgtagagagatttgaaacacaactaaaagtaataaccaaatcaaagaaaactttcgaagatgaaatcaaagaatctgcgagaaactatgataagttcaagttgaatgaaaatgatttaaaagcctacgataatttgcatgaaaaatacttaactcaaggtgggtcgatcctagaagaaaaaatctcgctttccaataacgataaacaggaaattgtagatgaattagacagattcaacaaaagagctgacatatccaaaagaagaataacagaagaacttttcataacgggtgaaaagttggacactcaactgaatgatttaagagcgtctttgaacgaaaaaaatgcccttcatactgaacgtttaaatgaactaaaaaagctacaatctgacattgagtccgcgaataaccaagaatacgacttgaatttcaaattgagagaaaccttggtcaggatcgatgacttgagtgctaaccaaagagaaacaatgaaagaaagaaaattaagggaaaatatagcaatgttgaaaagattttttcctggggtgaaaggccttgtccatgatctttgtcacccaaaaaaggaaaaatatggcctggcagtgtccaccatcttgggtaggaactttgattctgtaattgtagaaaatttaacagtagcccaggagtgtattgcatttctcaaaaaacaacgtgcaggtaccgcatccttcatacctctcgacactattgaaactgaattacccacattatctttacctgattcacaggactatattctgtcaataaatgccattgattacgaaccagaatacgaaaaagcaatgcagtatgtatgtggtgattctatcatctgtaacacactaaacattgccaaagatttgaaatggaagaaaggcgtcagggctaagttagttacgatcgaaggggctttaattcataaagccggtttaatgacaggtggtatatcgggtgacactaataatagatgggacaaagaagagtatcaaagcttaatgtccttgaaggataagttactaatacaaatagacgagctttccaacaatcaacggtcttgttccattagggccagggaggtcgaaaacagtgtttcgctattgaattccgatatagcaagtttgagaactcaggtgacccaacaaaagcgttccttggatgaaaataaactagagataaaataccataatgacttgatagataatgaaatccaaccaaagataaccgaattggagaaaaaactaggacatttggaagagactaaaaatgaattagagaaagagaaagaagcgttacaaagtgaagttttcaaagaatttacagagaaaatcgggttctctattaaagagtatgaaagccattccggtgaactaatgagacaacaatcgaaggaattgcaacaattgcaaaaacagatcttaacggtggagaataagctacagttcgaaacagacagactgaacactacccaaaggagatgtgaaaaggcacaaagagatctggcgaatgttcaaattgaaatgaagtctttggaagaacaagaggaggcaacagaaacaaaaatcaaggcaatagagtctaagttggaagaaaacaaagcgcacttggaagagttgcaaaagaaattcatagccaaccaaactgacttgaattccagcgaggacattctggaagatttaaataataacttacaggcgttgaaaagggggagagacggtatcaaagaagatatcgagaagtttgatttggaaagagttacagcgttaaagaattgtaaaatttctaacataaatctacctatattatcggaaacgacaatagacgatctgcccatttcttccggagattctgaggcaatttcaatttctaataatattgatgtagattatcaaggtttacccaagaaatacaaagaaaatagtaacgactcagcaagaaaggagctagagcaaaagattgctgaagcagacgaaatattgaatgagttacaacccaatgcaagagctgtagagaggtatgacgaagcagaagaaagattcgatgtgatcaataacgaaacagaagaactaaagtcggaagagaaaaaaatactgaaccagttcttgaaaatcaaaaagaaaaggaaggaactgttcgaaaagacttttgactacgtgagtgaccatttagatgcgatctacagagagctaaccaaaaaccccaattccacggtggagttggccggcggcaatgcctctttgaccattgaagacgaggacgaaccattcaatgcgggcatcaaataccatgccactccacctctgaaaagattcaaggacatggaatacctttctggtggtgagaagaccgtggccgcgctggctctactattcgctatcaactcttaccagccaagtcccttcttcgtcctcgatgaagtggacgcagctctcgacatcaccaacgtccaaagaatcgcagcctacataagaagacaccgcaatccggacctccagttcattgtcatttcgctgaagaacaccatgttcgaaaagtctgacgccctcgttggtgtttacagacagcaacaagaaaactcctccaagaccgtaaccttggacttgagcaactacgccgaatga

SEQ ID NO: 842 - DNA, 648 bp, Saccharomyces pastorianus
atgtcaggtttaagaacggtttcagcttcctccgggaacgggaagagctacgactctattatgaagattttactgattggtgattccggtgttgggaaatcatgtttattggtccgttttgttgaagacaaattcaacccctcattcattaccaccatcggtattgacttcaagataaagaccgttgatatcaacggcaagaaagtaaagttgcaactttgggacactgcgggccaagaacgtttccggaccatcaccacagcatattatcgtggtgctatgggtatcattcttgtttatgatgtaacagacgaaagaactttcaccaacatcaaacaatggttcaagactgtcaatgagcatgcaaacgatgaagcgcaactgctgttggtcggtaacaagagcgatatggataccagagtggtgacagctgatcagggtgaggccttggctaaggagctgggtataccatttattgagtccagtgccaagaacgatgataacgtcaacgaaatcttcttcacattggctaggttgattcaagaaaaaatcgacagcaataaacttgtcggcgttggcaatggtaaagagggaaacattagcatcaatagtgggagtggaaacaattctaaatcgaattgctgttga

SEQ ID NO: 843 - DNA, 1821 bp, Saccharomyces pastorianus
atgtcaaaatcattagaatggaataatctagattattctctacttccctggataaggacaggactggacgttatgggctttgagagcatgactccagttcaagcgtccacaattcccatgctcgctggaaataaagatgtcgtggtagattccgttacaggatccggcaaaaccgcagcgtttgttatacctatattggaaaaaattgtacaagaggaggcaaactcacccaaattcaagaaagcgcactttcattccttaatcattgctccaacaagagaactatcacgtcaaattgaatcagttgttctatcatttctggagcattatccttctgattcattttctattaaatgccagctgttgattggtactaatgaagctacagtcagagacgacgtaagtaattttctacagaatcggcctcagattctaattggaacacccggtagggttttggactttctgcaaatgccggcagtcaaaacgtcagcatgtagtatggtaattttggatgaagcggatagattattggatgtgagtttcatcaaagataccgaaagaattctgagactactacccaagcaaagaagaacgggtctattttccgcaactatgcgtagtgccggctcggatatcttcaagacagggctcaggaatcctgttaggattacagtgaattctaagcaccaagcgccttcctctttgaaattaaattactgtgttgtaaatcctctggaaaaattgcaactactagtcagtgttttgaataattacaagttcaaaaaatgtattgtatacttcccaacatgtgtgtcagtctcttatttctactcatttgttcaatatttagcaaagaaaaagatattgacgagtgaagtagaagtattctcgttgcacgggaagcttcagacatcagcgagaatgaaaactttagcagcttttacagattccctaaataattctgtgctgtttactactgatgtagcagctagaggtatcgatataccggaggtggatttggttattcagctcgatcctccgaccaattcagatatgtttatgcatagatgtggcaggacgggtagagcaaatagggttggtaaagcaataacatttcttaacagaggtagagaagaggattttgttgcttttatgcaagtcaaaaatgtggaacttgaagaggttgattttaaaattaagagtatcacagagaatttttacgatatttttaaggattgggtgcttgaagatcgggatagatttgacaaaggtgttaaagcatacgttgcctttattaaatattatacaaatcattctgcaagttccatttttagacttcaatcgttagattatgttggtattgcaaaaatgtatggtctcttccgtttacctcgaatgcctgagataacgaaatatctaactactgaaaaccaggaaggagttttctcaggaaactggctggtggatcctccgattaatattaatgaatatagatacaaggacaaaaagcgtgaaaaggagaggcaagaagccttgaataatttaagtcttataaatgacaagaagaagttgaaaagtgagttaaaaaagaagaatttagcttggtcagataaaacctcaacaaaagagcgaaaactcgagaggaaggaaaaaatgagttcgaagaggaaggccatagaggaagaactcaaagcagaagaactcatcgaaaatgacgaggagggacatattcaagaggactggaaagagattgtcttgcaaaataagaggaagaaacattccaataatgccactcaaggcagcttcgacgatctttaa

SEQ ID NO: 844 - DNA, 1329 bp, Saccharomyces pastorianus
atgagcagttttcttcaaaaagtaatcaaaaatatgaaagcggtttctgcaggcactaatatgatgggcaagaaggaggactcagtttacatcagctggaccaaggaacaactaatacgaagaatcactgagctagaaaatgcaaataaacaacatcgtaatgagctccaacatattgatgataacaagaagcgcaaacttccacaagaagggatcatcaaaaccaagaccaaaaagactcaaaaaaagtttgattttaccaagcataatactaggtttgttgccttaagatttgcgtacttagggtggaattacaatgggctagctttccaaaaggaatacacacctttacccacgatagagggtgccattctagatgccatgaataagtgtagacttattccatctatggttctacaagattttcaatttagtagatgtggtagaacagataaaggtgtgagtgcaatgaatcaggttatctctttgaaggttcgctctaacttgacggatgatgaacaactagatccggccaacgataacaaggagattccttatgttcaaattttaaatcagttgttacctgacgacatccgtatatcagctgtctgcctcagacctcctcctggttttgatgcaagattcagttgcactagacgacactataaatatgtttttaatggaaggcatcttgacattactaaaatgtctaaagcagcatcatattttcttggagagaatgattttaggaacttctgtaaactagatggctcaaaacagcttaccaaattcaaacgtactatagtgagtgcagagattcttcccgtttctgatactttctactgttttgatctagttggttcagcattcctgtggcaccaagttcgttgtatgatggcgattctcttccttgtcggccaaacgcatgaagaaccagaaattgtcttgtgcctgcttgatattgagaaaacaccccaaaagcccgtttacgatatggcggatgaaatcccattattgttatacgattgcacctttcctccaatggaatggcaagagcctgcaaccgacgatcataaagcgattaagtttacgacggcggctgaggcgttaacattacactatgggttgaaggccactgtttccaacatttttagagatattttgcctacagcagatgctaatatcttcacgaaaaaagtcattaacttaggtgatggaaaaggcagaatcatcggcaaatatgtaaaattgaaagacagagacgtaatgaagtcagttgaagatgttaatgccaagtatcacaaaaaaaaggataaaaaggctaaataa

SEQ ID NO: 845 - DNA, 2520 bp, Saccharomyces pastorianus
atgttgggaacgatacgtggtaatcaggcacatgctaatacccagaaaggtgctaataaaaagttgaacgaacttttggagtcatgtgataatctaccatctgcatcgtctgaattgggttccatccaggtcagtattaatgaattgagaagacgtgttttccaattgaaaaataaaaagaaagtcaccaatgaccataccaaagcccattatttgctggctaacagcggcttgacttttgaggatgttgactcttttatcaaagacttgcaaacaaagcagtttttagagcaaaatgcccccaagaagatcgaaggtgaggagctggagttctatttaaagaccaaaaaggacgagaacattttgatgtccattgaacaacttttaactggcgctacaaaagattttgataattttatcaatcaaaatttgaatcttgattggtctcagcataaggatgaagtgatgaagaattttggtattcttgtacaagataagaagacccttgaccatagagaatctataagttctttggacccaaagcttccaagctggggcagtaaaggcaataacattttgaacagcaacgaatcaagattaaatgtcaatgaaaataatattcttagagaaaaatttgaaaattatgccagaattgtgtttcaacttaacaatagtagacaagcaaatggaagttacgatatagccactgagttcatctcgatattatcttctgcaaatggttcaaaaaacgtccaactactagagagctggagaattctagaatctatgaaaagtaaagatattgatgttgttgaagttggtaaacagtaccttgagcaacagtttctacagtatgctgataatttatataaaaagaatatgaacgaagggttggctactaacatcaataaaattaaatcctttattgataccaagttaaagaaagcagacaagtcttggaagatttccaatttgactgtgataaatggcgtaccaatatgggccttaatattctatttattgagagccggcctgatcaaagaagcattggaggttttagtagacaacaaggctaatgtcaaaaaagtggaacaatcattcttgacttatttcagagcatatgcttcttcaaaggaccatggcttaccggttgaatattccgccaaacttcacaccgaatacaatcaacacatcaaaagttctctagatggcgatccttatcgtttggctgtctataaattaatcgggagatgtgacttaagtagaaaaaacattcctgcagttaccttaagcatcgaagattggttatggatgcatctcatgttaattaaagaaagtgatacagataatgatccgatttatgaaaggtattgtttggaagatttccaaaacattgtaatatcatatgggccatcccgcttctcaaactactatttacaaacactattgttaagtgggctttatggattagcaattgattacgcatatacattcagtgaaatggatgcggtacatttagccatagggttggcaagcttgaagctattcaagattgacagttctacgcgtttggcaaaaaaaacaaagagagatatcaggtttgcaaatatactagctaattacaccaaatcttttagatactcggatccaagagttgctgtggaatatttggttttgatcacactaaatgaaagaccatctgacattgaactatgtcacgaggccctaagagagttagtactagaaactaaggagtttgctgttcttttaggtaaagttggacgtgacggggctagaataccaggggtaattgaagaaagacaacctttgttgcacgttcgagatgaaagggaatttctccatacaattactgaacaagcagcaagaagggctgatgaagacggtaggatatatgacagtatcctgttgtatcaactcgctgaagaatatgatattgttattacacttatcaacagcttactgagtgatacgctcagtgcctcagatttggaccagccgttgattggacccgatgataacagtgaaagcaactctgttttgctggccagaaggatggcttctatatatttcgataatgtcggcatatcgaagcagatccacattagaaataaagaaaattgcatgttgctcttgaacatttccagaattagggagctatattttgacaggcaatggcaagaaacattatcgcaaatggaattattggacttactcccctttacagacgaactgtccgctagaaagaaggcccaggacttttctagtctagacgataatattgtaaagaacattccaaacttgttgattattacgctgaactgtatatcgaatatggttcgtactttgaacggcagcaagtatcaaacttccacaaaaggccagcaaatcgattctttgaaaaatgttgctagacaatgtatgatttatgctggtatgatccaatacagaatgccaagggaaacctacagcactttgatcaatatagatgtctcactatag

SEQ ID NO: 846 - DNA, 468 bp, Saccharomyces pastorianus
atgaatagaaaccaaacgaacatgggatcggaacaacaacagactgcggggtcccggacgataagtgtggaagaggtaccggcagttttgcaactgcgagctacacaagaacctacgagaactcaagaggcaaggtccacgagacacaatgtgagatgggaggaaagtgtggtcgataatgagaatatggataaaaaaaaaaccaagatctgctgtattttccatccgcaggaagaggctgaagaggagtgcaaccatccgtcagatcatgatggatcttcatcttcatcttcgtcatcatcagagtctgaaaatgaaaaggatcttgatttcgacgaacgtagaagaagaagatcggaaagacgccatcgtaaactagagaaaaagagatcatatagccccaacgcctatgaattccaaccagattattctgaatatagacggaagcagcaagaaaagaaggattag

SEQ ID NO: 847 - DNA, 921 bp, Saccharomyces pastorianus
atggagagactacagagattaatgatgaacagcaaggtggggtcagcagacaccggccgtgatgatacaaaggagaccgtttatatctcttcgattgcacttttaaagatgctgaaacatggtagagctggtgttcccatggaagttatggggttgatgttgggtgagtttgttgacgattatactgttaacgttgtggatgtgtttgccatgcctcaatcgggtactggtgtttccgttgaagctgtggacgatgttttccaagctaagatgatggatatgcttaagcaaacgggtagagaccaaatggttgtcgggtggtaccattcacatcctgggttcggttgttggctatcatccgtagatgttaacacccaaaaatccttcgagcaattgaacagcagagccgtagctgtcgttgttgatcctattcaatccgttaaagggaaagtcgtcattgatgcctttaggttgattgacaccggtgcattgataaataatctggaacctagacaaacaacatccaacacaggtctattgaacaaggctaatattcaagctttgattcacggtctgaatagacattattattcattaaatattgattatcacaagaccccacaagagaccaagatgttgatgaatttgcataaagagcaatggcaatccggtttaaagatgtacgattacgaagaaaaggaagagtctaatttggctgcgacaaagagcatggttaagatagccgaacaatactcaaagagaatagaagaggaaaaggaattgagtgaggaggaacttaagacaaggtatgttggtagacaagatccaaagaaacatctttctgaaacggctgatgaaactctggaaaataacattgtttcggtgctgacggcgggcgtgaattcggtggcaatcaaatag

SEQ ID NO: 848 - DNA, 1605 bp, Saccharomyces pastorianus
atgtgtctagaaccaatcaccctcgttgtttcgggatccttgttgttctacttgtgcttcgtgaaatattttagacgtagagagaagttaagagcaaccaccgtagtacaaacagaagatagatacaagtgctgttacagcaaacaagaagaaaaaatgagcgaacttgctgatgttaacgacgtcccaatgaagataaggaaccacaagtatcctgccaaagagcataacttacgagtcaaggatttgctatttgaacgcaattcaaagctatctaaggggtctacggcatttttcattgctggtgaagagttagaaggaaacaagtactgtgacactactagggagtacagacaaaacagatatttctaccatttgtcaggtgttgacattcccgcctctgcgttattattcaactgtaatactgacagactgacgttgtttttgccaaacatcgatgaagaagacgtcatgtggagtggtatgccattgagtttggatgaagccatgaaaacgtttgacgttgatgaagctttatacaggtctgatttggagtcaaaacttcaagacttgcaagaatttaccatttttacgacggatttagacaatattcacgataaggacattgaaaaatatttgaccccatccgattccgattttttttatgccatgaacgaaactagagccattaaagattggtacgaaattgaaaccatcagaaaagcttgtcaaatttcagacaagagtcatttggccgtaatgtctgctttacctattgaactaaatgaactacaaatccaagctgaattcgaataccattccactcgtcaaggtggccgttccctaggatacgatcctatctgttgctctgggccagcatgcggtacattacattacataaagaactctgaagatatcgaaggtaaacattccatcttgattgatgcaggtgcagaatggagacaatatacaagtgatatcacgagatgtttcccaacttcaggcaagttcaccaaagaacatcgcgaagtttatgagaccgttcttgatatgcagaaccaagcaatgagattgatcaaaccaggtgctaattgggacgacttgcatgcattgacacacaaggttcttattgagcatttcttgagcatgggaattttcaagaaagagttctcagtggataaaatcttcaggagcagggcttcttgtgccttttatccccacggcttaggccatatgttggggcttgatgtccacgacgttgccggtaatccaaactatgatgatccagatccaatgtttagatatttgaggatccgccgtactctgaaggaaaatatggttattacgaatgagccgggctgctattttaatgagtttttaataaaggagtttttagaaaaatatccagaaagattggagcttgtcaacatggacatattaaaaaaatacatgtacgtcggcggtgtgagaatcgaagatgatgttcttgtgaccaaagatggctacgaaaacttgactggcataacttctgacccagacgaaatcgaaaaaatcgttcaaaagggtttggagaaaactcgttccggttttcatgttattgtctaa

SEQ ID NO: 849 - DNA, 1062 bp, Saccharomyces pastorianus
atggttgacacacataaactggcagatgaagtgcttcagttattggacaaccgtattgatgacaattacagggtttgtgttgtcctagtcggctctccgggctccggtaagtctaccgttgcagaagaactgtgtcaagtcatatataaaagataccatagcttcctatcggcacatccagacgctatccaaacaagtggggcgttagaaaccgcgcttgatttggcaggctctctcaaaacgctccttccaaatgaaatagctgctctgaatagaaatcaggggttgttcacagatcacgtcgaggatgtcgatttccaaccagtaaagtatccaggttttacatcagataataaggaatgtacgacagtagttggtaggggtggtactgcgaatgcaataaaaattgtggaagttcatgatccaattagttttgatcagtcggccctcgataatattaacatcgcacaaatagttcctatggatggattccatttgtctcgaagatgcttagacttattcgaaaatcctgaggctgcccataaaagaagaggttcgccaccgacttttgacagtaataatttcttgcaattatgtagaattttagccaagacatccctctgcaaggccccttcgtatgataaatcctgcgtaacggcaagtgttttcgaaaaagtatccaagacttttagccaagcggttcctgatatttttatcccagggttcaaccatgccttaaaagatccaactccggaccaatactgcatttcgagatttacaaggatcgttatcttagagggactgtatttactatatgaccaagaaaactggagccaaatctatgaaacactagccaacacaggagccctacttgtctacaagattgacatagactatggggttaccgaagaaagggtagccaaaaggcatctgaaatcaggcttggtgacaactcttcaagagggagaggaaaaatttcgcagtaatgatttgttaaacgccaaggatatagacagacatctcatcaaggttgataccgttgtccacatccgaaatgattag

SEQ ID NO: 850 - DNA, 2259 bp, Saccharomyces pastorianus
atgcctagtatcggttcccaagtgagaaaggctgcagcaagcattgatcctatcgtcactgattatgccgtaggatatttcaatcatttatccggtatcactttcgatgccgttcaaagtaagcaagtcgatttgcccaacgaagtcaagttcgtctctgatttgctggttgatgcaggcgctccaaggagcaaagtggatgaattggcccaaagcatattggagcaattgagtatccaactaaaggaaaatgaggccaaattggaactaactggtgatacatcaaagagactgctagacattaatgtcttgaagagccacaatagtaagtccaacatcaacacctccttgagcatgatgggtgtcaacggtgacattgaacatgctggtagaaatatggaaaccagagtggatttgaaaaaactagccaaggctgaacaaaagatcgccaagaaagtcgccaagagaaataataagtttgttcaatacgaggcttcaaaattgatcgatgacgaaaaggacgaagactacgattccttcttcttgcaaatcaacccactggaattcggttcatccgccggtaaatcaaaagatattcatatcgatactttcgatttgtatgtcggtgatggccaaagaattctttctaatgctcaattgaccctaagtttcggccacagatatggtcttgtgggtcaaaatggtatcggtaaatccactttactaagagccttgtctagaagagaactaaacgttcctaaacacgtttccattctgcatgtggaacaagaacttagaggtgacgagacaaaggccctgcagagtgtcttggatgctgatgtttggagaaaacaactgctaagtgaagaagtcaagatcaatgaaagactaaaggaaatggatactttgagaagcgaattcgaggaagagagtttggaagttaaaaaattggacaatgaaagagaagatttggacaatcatttgatacaaatctccgaaaaattagtcgatatggaatccgacaaggctgaagcgagagccgcttccatattatacggtttgggtttcagtacagaggcacaacaacaacctaccaactcgttctctggtggttggagaatgagattatcactggcaagagccttgttctgtcagccagatctgttgctattagatgaaccttccaatatgttggatgtcccatccattgcatacttgtcagaatacttgaaaacttatccaaacacaatcttgacagtttctcacgatcgtgcatttttgaacgaagtcgctacagacatcatataccaacacaacgaaagattggactactatagaggccaagatttcgattccttttataccacaaaggaggaacgtagaaagaatgctcaacgtgaatacgataaccaaatggcttacagaaagcatttgcaagagtttatcgacaagtatagatacaatgctgccaaatcacaagaagctcaatcaagaatcaaaaaattggaaaaacttcccgttttggaaccaccagaacaggacaaaaccgttgatttcaaattccctgaatgtgataaattatccccacctattattcaactacaagacgttttctttggctataatgaaaacaacctgctattgaaagacgtgaacttggatgttcaaatggattctagaattgcgcttgtgggtgctaacggttgtggtaaaactacattactaaagatcatgatggaacaattaagaccaaccaagggtttcgtatcaagaaacccaaggttgcgtattggttacttcacgcaacatcatgtggactctatggatttgaacacttctgccgtggattggatgtctaattctttcccaggtaagaccgacgaagaatacagacgtcatttgggttcgtttggtatcactggtactttgggtttacaaaaaatgcaactgttgtccggtggtcaaaaatcacgtgtggcgtttgctgccttgtgtctaaacaacccacatatcttggttctggatgaaccttctaaccatttggatactaccggtctagatgccttggtggatgccttgaagaactttaacggtggtgttttgatggtttcccatgatatctccgttattaactctgtctgcaaggagatctgggtctcagaagaaggtaccgtcaagagattcgaaggttctatttacggctatagagattatatcttggaatctgctgatgccgccggtgtcgttaaaaaacattag

SEQ ID NO: 851 - DNA, 258 bp, Saccharomyces pastorianus
atgctcaacgtgaatacgataaccaaatggcttacagaaagcatttgcaagagtttatcgacaagtatagatacaatgctgccaaatcacaagaagctcaatcaagaatcaaaaaattggaaaaacttcccgttttggaaccaccagaacaggacaaaaccgttgatttcaaattccctgaatgtgataaattatccccacctattattcaactacaagacgttttctttggctataatgaaaacaacctgctattga

SEQ ID NO: 852 - DNA, 513 bp, Saccharomyces pastorianus
atgggctcgaatacttccaaagtgggtacaggtgctgaacaacaacaagtatacactccacaaactcagatcgatttttcgcagtccttagtatctcaattggattcatcaaacgaatcagactatgtcaccaaacaaaacgctgagaagttcatcgagaaaaaggtcgctcaaaggctatctgacttagaagtcgaaacactgaagaagttcgagagtactttgaacaattccctattatcggatgatgataaggatgccactgatggagtgtcgtcaagttcattgaatggccagatcgagtctttaaataagaagctaaccttatttgatcaactagagttacagaaattggagaaatacggtggtgccaagagcaagtccgataccaagaaggacaaaggcgatatttctataaaggcaaaattaactgagtgccttttggccaatagaggcaaatcgttgaactgttatgaggagatggaggaattcaaaaaactcgttatgggttga

SEQ ID NO: 853 - DNA, 2424 bp, Saccharomyces pastorianus
atggattcccaacccgattctatccaaaattcgcagcaagaagctcaaggcgattcttccacaccggttgctgacctaaatcatgatcgcatacaattggatacttcttcacaaacagatttgaacgccactacttcgcagtcattggataatttaaggagatcaaggcgtgtcccaaagccaagatcaagtatttatgttgagtatgaggaagaactaaaggagagggctaataaacccaagaggaaaaggcctgcggcttctaagaagaagccatctgcaacacagaaggataagccgagcggtaaagtggagaaaaagaaggctaccacggctgataaggatggtaaacccactttgaaggctaatgacaaaaaagtgatgccgagacctaaacctgcacatgaacaggtagaacctgctttgattcctagcaattggacttcagcaatacccctacttacttcggactttaaaaaccaatacagtgtcatctctaggttgaaaaatccgaatatgaaacctgtcccatatgctggtgatattattaagctgatggcattcataaataagtttagttcattttttgaccacgacttacagaacttatcgttccaagatttcgaagttggtttggatttatatcctggtgatcccaagggaaatgcagcaggtatcgttaggagtcccgatgacacatccttgttgctatatcctgattttatggccatcaaggacatcgtccattgccaagacaagatgaactttctgtttttaaccttgttagatttgacatttgcagagaatttagatagtaagaatgcgaaaaaaaagggccctttgactacttgggataagttaaattcatcttccaaaaaagtgttttctagttctctttatcgattaaggcttgtggcccatgaatgggggtacccacgggaatggcgtcaacatcttcctagtgatcaagacatttccaaaccgagaaccgctcttttcgagcaagatgagcaaactccagtggtggatccaaggcgtccagaaattctaaccccaaatatttatacatggaataaaaatgaaccgcttccattagaatcggatcctctacaaaatcgagaaatggataagaacggtattttggcactcaaaccaatagatcgtattattatgttgagagctttggcagactggtgtgcttctcactctccagctgcccacaatgaaatttacaagctaacacatggtaaaaaagatcctgtctttggcattcaaacccagcaagtgcccaggtattctatcgaaggaattgataataccctcaataattttaaaaggctttgttcattaattcagtcaagatatgaaatcagaagcaagaaaaaacatttcgtcaaacaattaaaagaaggtaaaaaaccggatttgtcaaggaagttggaggttctaaaggaaataaaaacggaaatgaaaaatacggcgaaacccgagaaggatgaagtcttattttcactatatgacaaatgggctcaattatttgaaggagaattgcccgatcaaccactaggtaatccatttgccgaaagactctataaactacgattgcaagaattctttcttggtagaattcctcatataggggatttttatatcccaagattacacagctatggcgaatcattagaaatgagtacgtttactgatctaagaagcttgcaagagctactctcgaaattcaagaacaatgaatacaacgcatttacgttatttgaaaatgacggtcaatcaatgagtgcccaattcaaactcttttaccacgatacgccttctttggcgcatgatgtcgcgcagggtaaaaatacgctggggaaggtttactggtatgaaatgtgtcacgattcagcaacattgttggaattcctggaattcttagactgtaaaattgctaaacctaaagatgaaaagaaggaagaaaaggacggtgaaaaagaaagcgccgtggttaccgaagcaccaccggttgagcagaaaccaaattctactgctgattctaatccctctttaaatacgaatccactaccaaaagatgcaaaatacaactccgcgagaaagaagctacagattttaaaggagtttttgtgtgatttctatttcattcttcgtgaattggagcaaatgaaagtgcaatttgcagatatgaagccaggaaagagacaattgagaaggatgcaacgacaaaatgtgaactataatacagaatatgacagtgaggaatatgtagatgatgaggatgacgagcaaattgaggaagacgacgagcaaattgaggaagacgacgatgatgacgatgatgatgataataatgattatgacgagaatgattctttttcaagtaatggtaaaactaaaagacaacgtacttag

SEQ ID NO: 854 - DNA, 2130 bp, Saccharomyces pastorianus
atggctcgtgacttacaaaaccatcttctattcgaagtagcaacggaagtcgccaacagggttggtggcatttactctgtcttgaaatccaaggccccagttaccgtggctcagtacggagacaactatacgctgatcgggcccttgaacaagtccacgtatgaaggtgaggtcgaaaaactcgactgggaggacgaagaggttttccgcgaggacctattgcccattcaaaggacgttgatgtcgatgcgcgaaaagggtgtgaatttcgtctacggtcgttggttggtggagggagcaccacgtgtcattttgtttgacctggactctgtaagacacctcctgggcgaatggaaggctgatctatggtcccttgtgggaatcccgtctcccgagcacgaccacgaaacaaacgacgctatcttatttggctacgttgttgtgtggtttttgggagaggtatcgaaactggacaacaaacatgcaatcatcggccacttccacgaatggttggccggtgtggccctaccattgtgtcggaagaaaagaattgacgtcgtgacaatttttaccacgcacgctaccttattgggtagatacttgtgtgccgcgggtgatgtggacttttataatcaattacagcttttcgatgtggaccaggaagctggcaaaaggggaatttatcacaggtactgcatcgagcgtgccgccgctcacactgcggacgttttcaccactgtgtcacagatcactgcattcgaagcggagcatttgttgaagaggaagcctgacggtatcttgcccaatgggttgaatgtcgtcaagttccaagccgttcatgagttccaaaacctgcatgcactgaaaaaagagaagatcaatgaattcgttagaggtcatttccatggctgtttcgatttcgatctagacaacaccgtttacttctttatcgctggtagatatgaatacaaaaacaaaggtgccgacatgttcatcgagtccttggctcgtcttaattacagattgaaggtttccgggtctaagaaaactgtggtggcatttttgattatgcctgctaagaccaattctttcactgtggaagcactaaagagccaagctattgtgaaatccttggaaaacacagtcgacgagatcactgcatccattggcaaaagaatattcgagcatacaatgagatatcctcataacggtctagagacagaattgcccactaatctagacgaactattgaaaagttctgaaaaagtgttattgaaaaaaagagttttggcattgagaagacctcacggcgaattacctccagtggtcacacataatatgtgtgatgatgctaacgatccaatcctgaatcaaatcagacacgtcagattattcaacgatccaagcgatcgtgtcaaagtcatattccaccctgagtttttgaacgcaaataatcctattctcggactggattacgatgaattcgttcgtggttgccatttgggtgtcttcccatcctactatgaaccatgggggtacacgccggcagaatgtaccgttatgggggttccctcaatcacaacaaacgtttccgggtttggtgcctatatggaggacttgatcgaaactgatcaggctaaggactacggtatttatatcgtggaccgtcgtttcaaagcccccgatgaatctgtggagcaattagccgactacatggaagaatttgttaacaagactagaagacaaagaattaaccaaagaaacagaaccgagagactatctgatctgttagattggaagagaatggggttggaatacgtcaaggctagacaattgggtcttcgtagagcttacccagaccagttcaaggaattgataggtgaagatattagcgacgccaatatgaatacccttgccggtggtaagaagtttaagattgccagacctctaagtgtacctggatctcccaaggtaagatccaacagtaccgtttacatgactccgggcgacctgggaaccctccaagacgccaacaatgcggatgattactttaatctaagcatgaatggaggcgttgcaggtgatgatgacgacgacgatgacacttctgcatactatgaagataactga

SEQ ID NO: 855 - DNA, 627 bp, Saccharomyces pastorianus
atgccgaacagtcacctgaacgcaccccagctgggcacgtctgcaagctacgccaggtcgcaggacttcctcaacattgacgagccgccctctgcgcaggaaacgcccagcgtttctacgttcaacctcccgggcccaaccacgcccgcccccatgctcagacggcggtccactaactacatggacgcactcagttcccgggcacaagcccgggaacgcgagagcagcatcggcgagcacgctccgatcccgatcccggccccggccccggccccggtctcggagtcttcctcgggagcagtctccgctgctgagcgcaggggcagcggacccatggacttccagaataccatccacaacttgcagtaccaaaccaccaacgactcggacatgagccacgcgggcgtggacatgggcgactccatctcgcacacgccggccagctccggaacaagtgaccagccaatcttcaagagctcgttcctcaacaacggcagcggtaacaacactaggattcctcgcgacgccgccttgcaacccgatccgccacgcaggaagtcgtcctttaagtacgaggacttcaaaaaggacatctacaacaagcttcacatgttcgaggacaagtaa

SEQ ID NO: 856 - DNA, 6948 bp, Saccharomyces pastorianus
atgccatccgaagaggtccgcgaacccgtccacttcccggacggctcgcacgcacgatcgccgccctcaaccgccacgtcctccatacacgccaccgatgttgcgcagccccggccaaactacatcaagaaaccgtccctccacataatgtccacgtccaccacgtccaccaccacggacctggtgaccaacccgatcctgagcaacatctctataccaaagatcagcccgcctgcgtcgttgtcgggcgccagcagtgccagtaccagtgctagcgcgggtaacgtgaccgtggatcgcactgcgcacgccaaggccagctccagtaagaagggcacgcccgcacaggccaccggtagagtgccccccaacgccatcaagaggcaccctagccgcttcaagcccgcgcacgcgctgcagctgcccatcaagaacgactccaacctgaaacggtccagcatctatgcgtccaagtccaccgtcaccgccatccccatcaggaatagccgcccaatgtccatgcagaactcgtacgcacgcaccccagacagcgaccacgatgacggtgacgaggcctcctccataaagagcgcctcttcttcgctgaccgcgtccttgtcgaagagctttctgttcgcgttttacaacaaccgcaagaaggacaagatcgccaacaatggcgtgctctcgaaggagtactggatgaaggacgagagctccaaggactgtttcagctgcggcaagaccttcaacaccttccggaggaaacaccactgcaggatatgcggccagatcttctgcagcaattgcactctcctgatagacggcaaccggttcggctgccacgccaagatgcgggtgtgccacaactgctacgagcacgcagacacgtatgaggactccagcgacgaggagaacgactccgccgtccaattgaacgagccggcctcccgctctcgctcccgctcctcgaactccaattcatattcgcattcgcattcgcacctgcacctcctgtcacaagagacccacatcaacgccgaccaccatcttcaccaccaccaccaccaccaccatcttcatcatgacccggtgacagcagccgccaaccctcagcagcagaacgaggtctacttgttgaacgacgatgacgtgcaaagcatcatgacctcgggcgaggactctaaactgttcatttcgacgccgcccccgccacccaagatggccatcccggccaccaagcaaggcggctcgttggagatctcgttcgactcggaaaacaatagacccctgcatcaccaggacgataaacccgcgcgtcatcatcatcatcatctcgagtccgcattcacgaggtacaccatcagagacatggacaacatgtcgcactacgacgcaaactcaaactctaccctgaggccccactatagcaccaacaacagcaccatcactgtcaataacgccggcaacaccagctccatcaccacccccaacaaccacaacaaccccgcgcattctttgaggagatcactcttccactacgtaagtagcagtagcatcaacaaggacagtgccaatagctctgctagtctcactaaacccgcctcgtccacccaatcctctcctatgctggactctgccaatcgtattatcggaaactatgctcatagaaactacaagtttaaattcaactacaacgccaaggaccgctcgcaacaaaacagcactggcaacaacagcaacgagaacaataacgttatcaatctcaacagcaacaacaacaacaacaacaacaacaacaacaacaacaacaacaacaacaacaacaacaacagcaacagcaacggcaacagcaacggcaacagcaatagcaacaacatcatcatcagtagcagcagtggtggcggtgatggtattgatgacagcagtaataccacctcaaacaacaacagtaccactttcgcacttaacagaaagaaaaaaaatccgttgacaaagtccaaatctacgtccacttatcaggaataccccctgaacgaggaagactcttcggaagacgagggctccatgtccatatactcagtccttaatgacgtccataaaacagataacccaatcagatcgatgaggaattctaccaagtccttccaaagagcgcaggcctcactacagagaatgagatttagaaggaaaagtaaaagcaaacatttctccagtaactccaaaagttccatttacagagaccttaattttttaaccaacagcacgcccaatttactctctgtggtgagtgacgacaatatatacgattgctcttcacctttgcaagacaagggctcttcatcggccatcagcggaagcaatgataggaaatttagcaatgactgcagtagtaacaacaacagcactagtagtagcaatgtgaactctgatccttggaaaaggatcgctagtatatccgggttcaagttgaaaaaggagaagaaaagggagttgaacgaagtgtctcttttgcatatgcatgcactactgaaacaacttttgaacgaccaagagatttctaaccctcaagaatggatcactctgctggatggcgccttgcgtaaagttctaagaacaattttgaatgcaagagagctgaatactctggactacagacaaacgtacgtgaaaataaagagaatcagtgggggttcccctcaaagttcggaatatattgatggggtggtcttttcgaaagcattgccctcaaagaccatgcctcgtattttgaagaatccaaggattctattaatcatgttccccttggaataccaaaagaataacaaccacttcctcagtatagattcggttttcaggcaagagcgtgaatacttggataaactcgtttctaggttgaaatctctaaatccagatattatttacgtcggcgccaatgtaagcgggtatgcgttggaactattaaatgattccagaattgtcgtacagtttaacatgaaaccgcaagtaattgaaagaattgccaaactaaccgaggcagatatcgccatttctgtggataagttggcaaccaatatcaagatgggtgagtgtgaaacattcgaagttaaaagctatatttacggtaatgttagtaagacttacacttttcttcgtggttgcaatccagaactgggcggcacgatcttattgagaggtgacaatctagacaacttaagaaaaatcaaacaggtttctgaatttatggtctacgcaattttttcattgaaattggaaagttcgttttttaacgataattttattcaactttccacagacgtttatttgaaaagaatggaatctaaaaaattgcaaactgtcaaaggttattttgcagatttcttgattaaattcaataatagaattttgactgtgtcaccaacggtggatttccctattcccttccttttagcaaaggccagagggttagaaaataatctactgcaaaggctcaatcaatatgagagtgaagctgatttggatccgcaaactcgactggatatgctacaaggtttggaatccactatcacgaaaaaacatttaggaaacttgataaaatttctgcacgaaacggaaatcgaaactttggagctagaattccaaaaaagaagtcgtcaatgggaagtttcatattcttcatcgtataatttgctcggtactggatcacaccaatccataacggttctttattcaatggtttcgacaaagaccgccacaccttgcgttggccctcaaattgttactattgactatttttgggatagtgatatttccattggacagtttatcgaaaatgtcgtgggcaccgcatggtatccctgtcagcaaggttgtaatggtttgtacctagatcattacagaagttacgttcatggctcagggaaagtggatgtcctgatcgaaaaattccaaaccagattacccaaattaaaagacataattctcacttggagttactgtaagaaatgcgggacgtccactcctattttgcagatcagtgaaaaaacctggaattattcctttggaaaatacttagaggttatgttttggagttacaaagatagtgtggcagggattggaaaatgtccgcatgattttaccaaagatcacgttaagtacttcggctacaatgacttggtagttcggttagagtattccgatttggaggtccatgagttaataacaccaccacgtaaaataaaatggaaacctcatattgatataaaattgaaagtggaattatattataaaattttggaaaagatcaacaatttctatgggagtgttttaaaccgtttggaacgtattaaactggacagtatgagtagagataaagttctaagtggacaggctaaaattgctgaattgaaaaataatgccacagaggagcaaaaactaatgctgcaggacttggatactttctacggcgatagcccttgtgaccaacatttgccactcaacttagttatcaaatctctatacgataaagctgttaactgggactctacgtttgcaatattcgcaaaaagctatttgccttctgaaactgatattagccgtatcacagctaaacaattgaaaaaactattctatgactcttcaagaaaggaaagcgaagacaaaaaatccctttatgatgaaaagatgaagactatcaaacttgaaaggatcgaacccccttctgacgaattaaaagatattgggaaattcaaaacggatgacaaggacgagagtgacaacaccgatacgaagaatgatacgaagaacgagccacagattgaagttatcccagccatttcgaaagatgctatcccaactattccggtaagtggtactaaccatgtgccagttacaccctccgcatcttctatttattcttcttcgacccctcaagcagatgatcgtccgtcaatgaacagaagtggaacaggtacatctgtgacctatgataaaactaataggcctaatttgaggaaaatgagcagtgatagcagtttatttggattagcatcgctcgctaccgaatacagtaaaaataacaaggtaggcaagctagccacatttttcgatcaaatgcatttcgatgctctatccaaggaatttgaactggaacgtgaaagagaaagactacaacttaataaggataaatatcaagccataaggctacagacatcgacaccgatcgtagagatttataaaaacgttaaagacgctgttgatgaaccacttcactctagaagttcgggcaatattgtggcagctccgaatgtaaaaggttcagaagttccaacaggagaacattcccggaacagccactccaatcctcccaatttggatcaaaatttggaaactgaattagagaactctatcagccaatggggagagaatatattaaacccttctgcaaagactcactctactacgcaaacgatccctaagccgatggttagagaaacatcagataatccaaagtcggaaccccttccgcctgtaataacagcaacaactgtcaataaggcgcaatctacgccacaaccagaaaagtcgctattgatgaaaactttaagcaatttctgggctgataggtctgcatatttatggaaacctcttgtttatccaacctacctcacagaacatgtctttactgacagcgacgttatcattcgggaggacgaaccaagctccttgatcgcattttgtctgagcacttcggactatagaaataaaatgacgaatttgaatgctcagcaacaacatcaacaaacagcagaacctgtcacgtctaagttgggagaaaacacgggagggaatgtccaaaatttggatccttctgccaatatttccccatcagtttctcgtacttcccgtaataaaggaaaggattcagagatttcctcggttgccaccggaaaggatggtttgattagctcttacaccattgacggtgcgcatgataaaacaccacaagcatcacaaacacactcacagcccaatcttgatgatcttcaagaattggaaagaaccatgactaaaaagacggccacacatttaagatatcagtttgaagaaggattaagagttatgtcatgtaagatctttttcaccgaacatttcgacgttttcagaaagatttgtgattgtcaagatagctttattcaaagtttatcaagatgtattaaatgggactccaacggtggtaaaagtgggagtgggtttttaaaaactttagatgatagatttatcataaaggagctgtcacacgcagagttagaagcgtttattaagttcgcgccaagttattttgaatatatggcacaagcaatgttccatgatttaccaacaactttggctaaggtgtttggattttatcaaattcaagtgaaaagttctatatcgagctctaaaagttataagatggacgttatcattatggagaatttgttttacgagaagaagacaacgagaatatttgatttgaaaggttctatgagaaatagacatgtcgagcaaacgggcaaagccaacgaagttttattggatgaaaatatggtggagtacatttacgaatcacccatccatgtccgtgaatatgataaaaagcttctgagggcctctgtctggaatgacactttattcttggccaagatgaatgtcatggattactctctagtcattggtattgacaatgaagggtatactttgacggtgggtatcattgatttcataagaacctttacgtgggacaaaaaattagaaagttgggtcaaagaaaaaggcttagttggtggagccagtgtaatcaaacagcctacggttgtaacacctagacaatataagaaacgtttcagggaagcaatggaaaggtatatcctaatggttcctgacccatggtatagagaaggaaattga

SEQ ID NO: 857 - DNA, 1503 bp, Saccharomyces pastorianus
atgtctgattcaacgcccactatcaactttattaattttaatcaaaccggaacatgtatatcccttgggacatcaagagggttcaagatattcaattgtgagccctttggtaaattttactcggaagacagtggtggttatgctatcgtcgagatgcttttctccacgtcgttgttggcccttgttggcataggtgaccaacctgcgctttcgccaaggaggttgcgtataataaatacaaagaaacactccgttatttgtgaggtaacctttccaacgtctatattgagtgtcaagatgaacaaatctcgattggtggtgctcttgcaggagcagatttatatttatgacattaatactatgagattattgcatactatagaaacaaactccaaccaacgtggccttatggccatgtccccttcagtcgctaatagctacttagtgtacccatcgccaccgaaggtaattaactccgaaataaaggcacatgccactacaaataatatcacactatcagtgggtggcaacacagaggctggtttcaagagagatcagcaggacaactgcaacgatgacatcaatgactcggatcagtattcaagttttacaaaaagagatgatgctgacccagcaagcaacaacggcggtaaaagtagcataataaagaatggggacgtgattgtgttcaacttggagactttacaacccacaatggtcatcgaagctcacaagggagaaattgctgcaatggcgactagtttcgatgggacgttaatggccacagcttctgataaaggaaccatcatcagagtgtttgatatcgaaacgggtgctaagatctatcaatttagaagaggtacgtacgcgacaaggatctactccatatcattcagtgaagacaaccactacttggcggttacaggttcctccaaaaccgtgcatatctttaaactggaacactcgatgggcagcaacagattggacagcgatgagagcaacatggaagaagtcacagctgatgactcgtcgttggacactaacagtttcgacgcattaagtgacgaggaaaactcaacaagactggcaagagaaccgtacgtggacgcgtcaagaaagacgatgggtcggatgatacgctactcttctcagaagctatcccgaagagccgccagaacactgggacaaatcttccccatcaaagtcacctcactcttggaatcctcgcggcatttcgcgtctttgaaactccccattgagacgaattcccatgtgatgaccatatctagtataggctctcctatagatatagacacgtcagaatacccggaacttttcgaaacaggcagttccgtaggtacagagccccatcgcgaccccataatgaagatgattcccatcagagttgtttcgtcggacggttacctgtacaacttcgtcatggaccccgaaagaggcggtgattgcttaatactttcgcaatactctattttgatggattaa

SEQ ID NO: 858 - DNA, 2175 bp, Saccharomyces pastorianus
atgggcttcagtaatagtaaatcaggcaagaagcctctgcttttcgatatcagactaaaagatgttgataacgacgtaattctactgaagggtccaccagacgaggccccgtcagtgcttctatcaggttgtatcgtattatccattaatgagcccatgcacattaaaagcatatcattgagactgtttggaaggatacaaattgatgtcccattggaaaaccatcaggatttgaaggctttgtcttcatcttcaccaccaccaaggatcagaaagtataacaaggtcttttacaaccatacatgggacaacgttaacctccaagactatcttagtggttcaaggggacaagcaggtctcgcgggtagcaactcatcaagtaatatcttaaacattaatcaaagagctcagtcctcaagctctttgaaatctttaaagggatcctcgacgccctcctcgcacactttgggcaaggggaactatgatttcccatttagcgctattttgcctggttcgttgccggaaagtgtagaatctttaccaaattgctttgtgacatatagcatggaatcggtcattgagcgtaccaggcactatagcgatttgacttgtaggaaaaatattcgaattttaagaaccatttcacctgccgcggtagaattatcagaaactgtctgtgtagataattcatggcccaataaagttgattattctatttcggtgcctaacaaagccatagctatcggttcagcaaccccgattaatatctctattgtacctctttcgaaaggtataaaattggggcccattaaagtcgtattattggaaaactatcaatattgtgatccgtttccccctgtgacatctgcaagtagacaagtaacagatttaactcttgaaaatcccttaaatgaatcgtctgaagacttcaatgtggacggtcgctacataaataaccctttttatgaggctgatcattcgttccaggataaatgggaagttgatacatttttacagattccaaacagtttattaaattgtgttcaagattgcgatgttcgttcaaatattaaagttcgtcacaagcttaaattttttatcatgctgattaacccggatggtcatcaatctgaattaagagcatccttacccattcaactttttatttcgccatttgtagcactttccatcaagccggtatcatcatccaatttatattcatttactggcgcaatcaaccaagatgaaaatctgcaaaacggagatgaagaggagtacttattctcgagatctggatcagccacagggctggaattgatggcagaaatgcgtaatggtactgcagtccccaccgtttcagacttaatgacacctccaaactatgaaatgcatgtatatgatcgtctttatggcagttcttccaatctaacgcacgctgaaacaccagagacatgtactccattagaaagcgaatgttcagcttctgatgatcagcaagatctagaagatctacggataagactgaccaaaatcagaaaccaacgtgagaatttggggctacctgcatctgcttcatctgctgctgtttccagatcattatcgccgttattaaatgtcccggtacaagaagacgggacagatggaagttcacctcagaacacttctagcctcaacaacagtttaacttcaggaatacatagtaacgtatcacccgttttgctttcaagatcacgagctggtagtactctagctaatgacgtgctaccagtacctccgagcttgaattatctggagactcaaaatttgaacaaagtcccatcgtatggtaaggcaatgaagtatgacattattggtgaagacttacctcccacttatttctgttcgatacaaaacgtgcaacctagaaaacctagtagagtgcattctagaacttcattggcaacactatcatcttccatcccaactagtttccattcttccagttttaggagtggcactgcttcccctatctcgataatcaatggctccaggtgtagttctagtggaacatctcttaatacgcttggtgaatcaacagtatcgggtagtagctttaaaagatcaccttcaaggcagaggtctagatctttagctgggttcatggggggacttctctcgaagggtaataaacggtaa

SEQ ID NO: 859 - DNA, 1845 bp, Saccharomyces pastorianus
atgtattctatctcaaacaaaaaaccctccatactaagtatggttcccttaaatattctgaaaaaccatgatataaaattgaaaaaagatcaagagaaaaagatatcttttaacccggtggtcactcccataaggtcggatgactaccacgacaaaacttccagatcttcaagttcaagtcattctgattcacctgaatttttgagaatcaacaacaacaaatctagttacaaagacggggatttgaaggtttttgaaagtaaaaaattggttccactcttcattggtgaccttcatgaaactgttactgaagaaactctaaaagatgtttttggaaaattcccatcttttgtttctgccaaggtgtgtcttgactcggtaactaagaaatcattgggccatggttatttaaattttgaagataaagaagaggctggaaaagccatggaagaactgaactacactgaagttaatggaaaagaaattaggattatgccatcactaagaaatacaacgtttaggaaaaattttggtactaatgtgtttttctccaatttgcccttaaataatcctcaattaacaaccagagcattttatgatacgttttcgagatatgggaaaatattatcctgtaagttagactcgaggaaagatatagggttcgtgtattttgaggacgaaaaaaccgcaagaaatgtgattaaaatgtacaataatacaaatttttttggaaaaaagattttgtgtggaatacattttgataaagaggtcagaagtgttccaaattttgaaacacagaagtcacgattggattcggaaacaatcatcgagaaggagcaagccttgaacgataaacaatcaaaacgtaataacggtgaatctaagagtaacctgccatcatctcaaaactccatctttatcaaaaacttgccaataataaccacaagagatgatattttgaatttctttagtgaagtaggtccaataaagtcaatttatttatctaacgctactaaagtaaaatatctctgggcttttgttacgtacaaaagcgatgatgactctgaaaaggcaattaaacgatacaataacttttacttcagaggcaaaaaactcttagtgagtagagcccaaaataaggaggaaagagccaaatttatagagtcccaaaaaatgtccacacttttcctggaaaacttgagcgctgtttgcaacaaagaatttcttaaatatctgtgtcatcaagaaaatatcaggcctttcaagattcaaatagatggctacagtgaaaacacttccgcttattctgggtacattaaattcaagaattttgaagaagctacaagaatattcaattttttgaataaccgtttagtaggagggagcatcgttataacatcctgggaaagacaaactaatacatcgaagcagtatcacgatgattacgggatccggaataaactttctccttcccacccacaagttaccccatactaccattattcacaaaccagcgatttgaactcctcacagtatgctgcgagagctccttcatcaatgagtaacattacaagatcactgatgaaaaataaaaatttcaacaagaaagttctggaaacgttcgaaaaacaagtgagaagaggaatagatttcatgagatttccaagtgcaactagagaggaaaacatacacggaatatctgagtatatttttgacacttattggaatcgagatattttagtcctggataaatttttatcattattaaagagcagtccctatcacgaaggtgttttgcaaaaacaaattgaagaagcagcaagctcgttgggatttaaaagataa

SEQ ID NO: 860 - DNA, 1008 bp, Saccharomyces pastorianus
atgcattcacaccattcccattccggtgactactgtgcccatggcgcagaccctctgaattccatgattgaccgagtggtccaattgggcttccacacatactgcctcacagagcacattccaagacttgagtccaagttcatatacccggaagagttggaactaggcgatacttccgatgagatcataaccagtctagaaacatcattcaagaattttttgagtcatgcacgagaaattaaggctcgttatgctgctacgccagaagttcgaactagattcattatcgggacagagatcgagagctgtgacatggaccatatcaagtacgccaaaagggtgatgacggagaacagtggcatcctgcagttttgcgtgggttcggttcaccacgttaacgggatccccattgactttgatcaagagcaatggcacaattcgttgcattccctcaatgacaactttagacttttcttgctgtcttacttccattcgcagtatgaaatgctcaccaacgtcaagcctttggtcgtgggccatttcgacctgttcaagttgtttctacccagtggcatgctggtggatcctaaaacgggtctatgcgacaaagaagccggagttccaattgcctcgttagacgtcatcaaccaatggccggacgtatacgacgcagtggtaagaaatttacaatttatagactcctatggtggcaccattgagatcaacacatccgccctaaggaagggtctcgaggagccgtatcctggtaaggccgtttgcgacctggtcaagaagcattgtggatccagatttgttctaagcgatgacgcacatggcgtggcgcaggtgggcgtgtgttacggcaaggtgaagaagtacatagtagatgttctgcagcttaaatacctctactatctggaagagggtgtaccaccgcagaaagtgccatctgtaaggaaactacccatctcgcaattcgttaacgatcccttttgggcgaatatttaa

SEQ ID NO: 861 - DNA, 843 bp, Saccharomyces pastorianus
atgaaagcaaagaaatctcaaagaaaaacaggcaaaaaacagaaccttatccagtctacattgcaggtcaatggcggttcaaaatcaaataaactggtcaagtgtgataaatgtgagatgtcatattcctccacgtcaatagaagatcgtgccatccacgaaaaataccacgcattacaactgcatggacgtaaatggtcaccgaattggggctctatagcatacacgaagcgggaccactcgagtacgatgcatttatcaagatcaatggggacgatgactccattgaactcctcgcctttaaaaaatggctcgtctattgtccaccaggaggagaagattgtgtctgtgagaccagataaatccaacggcgaagttcgagccatgatggagataatgacgctagtgaacaatgagcttaatgcgccacacgatgagaatgacatttggaacagtaccacagaagagaaaggtaaggcatttgtatacataaggaatgacagggcgattggaatagtaattatagagaatctgcatggaggcaatggcaaagcatccgatcgtggacgctggatggtctatgattctaggagattggtacagaacgtgtaccctgattttaagattggcatatcgaggatctgggtgtgtaggacagcacgaaaccttgggatcgcgaccaaattaatcgatatcgccagggaaaatattatttatggcgaagttgtccccagaagccaggtggcatggtcacaacccactgatagcggcgggaagctggctagtaaatataatggtatgatgcacaagtcgggcaagttactactgccggtatatatatga

SEQ ID NO: 862 - DNA, 1659 bp, Saccharomyces pastorianus
atgcgcaagagtgtatatctcgacaacactatcgagtttctacgaggtagggtgtacctaggtgcctacgactatacgccagaagatactgatgagttagtgttctttaccgtggaggatgcgattttttataatagcttccacttggatttcggtcccatgaacatcggccatctgtatcgttttgccgttattttccatgagatcttgaacgatcctgaaaatgctaataaagccgtggttttctactcttctgcatctaccaggcagcgtgctaacgccgcatgtctgctttgctgctacatgatccttgtgcaggcatggactccgcaccaagtgcttcagcccttggcgcaggtggaccctcccttcatgccatttagagatgccggctattccaatgcggatttcgaaataaccatccaggatgtggtttatggtgtttggagggccaaggagaaaagcttgattgatttgcattcgtttaatctggaaagttatgagaaatacgaacacgtggagtatggtgactttaatgtcttgactccggatttcattgcatttgcgtctccacaagaggaccacacaaaaggccatgtggccaccaagtcgtcccatttgaatcagccatttagatccgtcttgaattttttcgctaataatgatgtccaattggtggtaaggttgaattcgcatctatacaacaaaaagcattttgaagacatcggcattcagcatctggacttgatatttgaagacggtacttgcccagacctgtccatcgtcaaaaactttgttggtgctgctgagacaataatcaaaagaggcgggaaaattgccgtgcattgtaaagctgggttgggcagaaccggctgtttgattggtgctcatttgatatacacctacggattcaccgccaatgagtgtattggatttttaaggtttgtaagaccgggcatggtagtcgggcctcaacagcattggttatacttacaccaaaacgacttcagagaatggaagtatacgactagaatttctttgaagcctagtgaggctattggtggactttaccccttaataaatctagaagaatatcgtttacaaaagaaaaaactcaaggatgacaaaaaagttgctcaaaataatattgaaggtgatttaagagatttgacaatgacgccgccacctaacagccatggagcgcttaataccagaaattcgagccaaccttcaacagcgaatagcggcagtaatgcatttaaaagtttgggtgtgccacagacttcgcctggtcagccgagaaagggccagaacggttctaatactatagaagatatcaacaataacaacaatatgacttctcatgccggcaggaaagcagtaatagaaagcaataactcggatgatgaatccatgcacgataccaatagcataagcaataattactctaagagtccacgcagaagaaacgacatcttgtctgcttcatcgtcccgaatggaagataatgaaatcaacgcaacgaacaacatcaacaatgcggcggatgataccatactaagacagctattgcccaagaatagaagagtaacgtcagggaaaaggacaacgagcgccgcaggtggtataagaaagataagtgcttccatcaaaaaataa

SEQ ID NO: 863 - DNA, 2031 bp, Saccharomyces pastorianus
atgcacactcattcacacatgtgggagcatgagacggacatactgagggtgctcgacgatatagagcacgacctgtttctaccgcaacggctctcgcgtgatgctgctgacgttgacgagtcgcacgtccaatacggtatagttaaagactgttcagtactcacatgtgggtgctgcgtatctgagtcgctgtttcatacactgtgcgatgcggctccgaacaagcaagtcatttgtcccgtttgccattgtggagacgttaagctgctctctgccatcaagccattgcggcagttggctcgacagattgatttcttcaggagtactgttgcacaggctgaaaccgagagtgaggagtttccggctatggcaaaggcatcgttttcttcgtcgtcactatcgctgtcacgatcgccgtcttcctcttcccctggatccgaaaccgataacaagacgctttctagtatgacgacaaaggagaaatcatcattgctacagattttccacattgtggcctcgaagatacacaatttaaatacagaggagaaatcggaccaaccgctcactgcgggaaagccccaagaacaagaagaacacaccgtaaaggagaactacacaagcagcctactcgagcctgcctatgacgaccgcacgaactggaaggtactggataacgtttccaacacgaggacggtgccaatagacaacaactcctccttggtgtctgcagacgttactataccctccacagcgacctaccaggcaaacagcacgcatgatctggacgaagaaagggaatacttctttgccaactgctttcctatgtacaggaagagattccagttcaatacgcataccaagtttctcgggaccaaatccaaactgtttatcaaccagactatttcccctgactgcaccaaattcgccttgatcaccgaacacaagtgggaaatatactcgatcaatccgaaggacaactctccccagcttatatcgtgtggcaagtccagcggagagtatgggcccgactttaaccaactgaccgagcccacacagttaccagtcaccgctcctcaatcgtcgaagaagaagaagaaaaactggagccagcgattttgcaaactgtccaatgacttcctgataatatcgggctcgcataatattctcaatattcacgacatcaaccaaagcggcaaactgatatatacatacgtctcaaacttccccatccggtgcatagacatcgaccctcggtcgcagataatagcgtacgggattacagggaaagataggcacacgggtgcagagcaagcattaatagtaattcaacagatcaccagaaacaaagtcacccaagagcccgagtttcctccgccgatcacaataacactcccttacagggaccccatcaataccatacaactgtcgcacgatgccaagtacctgacgtgctccaccgcattggagtctcgcttcttgatcatctccctccagaaaacaaacgaaccaagactgataatgaaaagcgtccggtccattgacacgtcgttggaatcagaaggaatcaccgatacaaaactcttcccggggaacccgaacctgatgtgtatcacgtctacagcattcaactcgtcccccctggtgataaacaccaagattacccaaatcaacggcgtacggacagtggcccagccgtccatgctgatcagagtggacgaaatcggatgcaagatccacaagtgcgaaatctctccaagaaacgacgctatcgcctttctcgaccgcaatgggtccgtctacattatgtgtgcgcccaccatgatggacaacaacgagaagagaagaaccattcttgttgaaaccgtcgccaacgcctacagagcctacgaatcggccatcttgcggttcaacccggaaggcaacaagctatacatcctggacagaaagggggccttcttcgtggaggactttgcgtttggcctgccccagtcgcgtgagatcaccaagtgtaagcaaatatactacaagtaa

SEQ ID NO: 864 - DNA, 3108 bp, Saccharomyces pastorianus
atgtcggtcgagtttgctacgaatccatttggccagaccaaaaacgcaaccgagttgcccagctacgggacacccgtaactgcaatctcctccgtattgttcaataacgtggactctatatttgcctacaagtccttttctcaagctgacttgttgcaccaagacttgaaaaaatggtcactgcagaatagtaacgggtcacgtggcaagacattcttccaagagctagatattagatctggcgctgggttaacccccttgggattctctcacggattgaacaataccactgcgattgttgctcccgggtttgcgctaccatatttcattaactctttgcagactgtcccacatgctggtaagtttattttaaatgttggtgccttgaactacgacaacaccagcggttctgtcaccaacgactacgtcacagcattggacgctgcttccaagcttaactatggtgttgtgaccccaatttcaaccaacgaggtgcaaaacgtcgctctgctagcgttggcggttgccactttcagtaaccgttcgggtgccatcaatttatttgatgggctgaattactcaaagaccgtagtaccattggttgaaactgctgcagaatcctccattttgggaaagttgtccaaagtcattgctccaaacgctgcgtttgatgatgtcttggacaagtttaatgaattatcagggttgagactacataattttcaatatttcggcgcccaagatgctgagactgtctttgtcacctatgggtctttggaatctgaattattcaactccataattagtggtaacaatgctaaaatagggttaatcaacgttagagtgccattacccttcaacgtggctaaatttgtgacccatgtcccatccacaaccaaacagatcgttaccattggtcaaactttagatggctcttcaccttcttttttaagatctcaagtctctgccgctttgttctatcacggccgcaaaagtatctgtgtatctgaatacatttaccaaccaaatttcatctggtctccaagtgctgtcaagtcaattgtttcttcattcatccccaacctaactttcgacaccgattcgtcatctagtgaagggttcatttattgggcttctgataaaagtgccaatattgatgttgcttcaaaattggtaaaagctttatctttggaggatggaaaatatgtatctcttagaaccaaattcgacaatctggccaacgccggtactttccaagctcaattcgttacctctggcgaacaggttaccacttcaaacatcgatattacaaagttggccattgtggaaaatattagtttactgaaacatttggatgtggttactaccgtcgaagaacaaggttccattgccttaatttctcaaacaacaaccaaagatttggatttggactcagtagaatcttatgttaagaaactgggaattccagaatcatttttgatttctgttgcaaagaaaaacatcaagctgtttatcatcgatgctgaagctattaacgatgaatccaaattatctttgttgattcaagccgttttctggaagctagctttcgatcttgatgtggcagaatctacgaaccgtatctggaaaagcattgatgcagatgccgacatttctgctgcttctatctctgaattcatcactgctgcgttgaaagactccattaaggaagttccatcaactgcctacattggattttctgaaatcaccattgaaaagaaagatgaagacgaagaacccgttgctttgccaatctttgtcaatgaaacatcttttgttccaaacaaaagtagtattgaagagatcccactagcccaaacatctgaagtatctgatattgctaagaaattgtcgttcaaagaagcctacggagtggaaaacaaactgagacctgacttaccagttaagaacttcgttgtcaaggttaaagaaaacagacgtgtcacaccggctgattatgatagatatatcttccacattgaatttgacatttctggtactggtatgacttacgacattggtgaagcccttggtattcacgcaagaaacaacgaagctttggtaaaagaatttttaaaatcttatggcttaaatgaaaccgaaattgtttcggttcctaacaaggacaaccatcatttcttggaaacaagaacagttttgcaagccttcgtcgagaacttggatattttcgggaaaccaccaaagagattttacgaatcattgatcccatacgccactaatgaagatgacaagaaaaaattacaagacttggtcactcccgcgggtgcggttgatctgaaaagatttcaagatgtggaatactttacatatgctgatatcttcgaattattcccatctgttcgcccatctcttgaagagcttgttaccattatcgaaccattgaaaagaagagagtattctattgcctcttctcaaaaggtgcatccaaatgaagttcacctgttgattgttgtcgtcgattggctggataacaagggtagaaagagatacggtcaagcttctaagtatatctcagacttggctatcggatcagaattggtggttagtgtcaaaccatctgttatgaaactacctccatctccaaaacaaccagttattatgagtggtttgggtactggtttggccccatttaaagcaatcgttgaagagaaattatggcaaaagcaacaaggtcatgaaattggtgaagtcttcttatacttgggttcaagacataaaagagaagaatatttatatggtgaaatatgggaagcttacaaagacgccggtatcatcacccatatcggtgctgcattctcaagagatcaacctcaaaagatttatatccaagatcgtatcaaagaaaacttagatcaactaaagactgcaatgatcgataacgtaggttccttttacttatgtggtcctacttggccagttccagacattactcaagctttgcaagacattttatctaaagatgctaaagaaaggggtgtcaagattgatttggatgccgcaattgaagacttaaaggaagcttcaaggtacattttggaagtctactaa

SEQ ID NO: 865 - DNA, 3513 bp, Saccharomyces pastorianus
atgaaggtggaggaactgattatcgatggtttcaaatcatacgctacaagaacggtcattaccgactgggaccctcaattcaatgccattacgggtttgaatgggtctggtaagtcgaacatcctggacgctatttgctttgttctgggtatcgcatcgatgactacggtgagagcatcgagtttgcaagatttgatctataaacgtggccaggctggtgtaacaaaggcaagtgtaaccattgtttttgataataccgataagtcaaactctccaattggattcacaaactctccccaaatatctgttaccaggcaagtggttcttggtggaacttccaaatatttgataaacggtcatagagcacctcaacaatctgttttgcaattgttccaatccgtgcaattgaatatcaataatccaaactttttgattatgcaaggtaaaattacaaaagttttgaacatgaagcctacggaaattctgtctttgattgaagaagctgccggtaccaaaatgtttgaagatcgtagagagaaagctgaaaggacaatgtctaaaaaggaaactaaattacaagaaaatagaactcttttgactgaggagattgagcctaaactggaaaaacttcgaaatgaaaagaggatgtttttggaattccaatctacgcaaaccgatttagagaagaccgaaaggatcgtgtcatcttgtgactactataatattaagcataagcatacctccataaaagaaaccttggagaatggtgaggcacatatgaaggaattgaatgagtttattcaaaagacctcccaggaaattgaaagtttaaacgaagacgtcaaagaaatcaagcttcaaaaacaaaatgaattgcacaaggatggtaagatttccaaattggaaactgaggaaagtactcttttgaatgagatttctcgtttgaaaacctcattatcaataaaaggagaaagtttaaatgacaccactgaaaagctgaaagccttggaactcgaaattgcaaattcttctgcaagacttaatgaaaaaagaattgaatataccaagaccgaggaagattataaaactgtacaggaaggactgagtaaacaaagggagctttacaaaaagaaagaagaattagtgtccactttaaccacagggatttcatccactggtgctgcagatggtggttacaatgcgcaattgattaaggcaaagtcaggattgagcgacgtctccttggcgataaacaaatcgaacatgaaaatggatttgctgaagagagaactatcagttattgtacccaaattaaatcaagctacaaaggacaacgagctgaatatcaagcatgtcaaagagtgccaagataactgcaataaattacaagcgcaactgaccgagtatgggtttgacccatcgcgaattaaggatttgaagcaaaaggagaatgaattaaagagtcaatactaccaaatatctaatgactctgaatatctgaaaaggcgtgtggcgaatctagaattcaattataccacaccttaccccgattttaaatccaacctggtttatggtgtggtgggtcaactctttgaattagatgatgataagattcgttactccaccgctctacaaacgtgtgctgggggtagacttttcaatgttgttgttcaagattctcaaacggctactcaactgttggaaaaaggaaggctgcgcaagcgtgtgactattatacctctaaacaagatttccactagacctataagtccacaagtgctcgagctggccaagaaaattgctcctggtaaagtggaactagctataaacttgataagatttgatacgtccgtcactaaggcaatggaatttatttttgggaatagtctaatttgtgaagatcctgagacagcgaaaaaaatcactttccatcccaaaattcgtgctagaagtattactcttcaaggtgatgtatacgatccagaaggtacgttatccggtggtagtagaaatacttctgactccttgttggttgatattcaaaaatacaatcaagttcaaagaaaaattgaaattattcaagccgaccttaaccacgtaacagaagaattacaaaaacaatacactacttcgcaaaaaacaaaaactattcaaaacgatttgaatgcttcatcgcataaactggatttggcaaagcgtaatttagaagtaaacccttcctctcaaataatggctagaaatgaagaaattctcagggaaattggagaatgtgaaaatgaaataaaaaataggcaaatggatttggaacggtgccgacaagaagtattaagtattgaaaaagacatgaaggaatacgataacgataagggatcaaaattgaatgaactgaaaaatgaattaaaagtgttggctaaaaatttggaaaagcaagaatcagaatcggaaggtaaatatgatttgttccaaaatctagaattggagacagagcagttaagttcagaactagactctaataaaactttattgcaaaattatttgcaatctattgaaaatttaaaatcagaaaatatcgaattagaggagaaaatacgaagtattgaagataatctagcaacaacccaggcaaacctaaacgaagaaaagaaaaggttgatgaatattgatgatgaactaaccgaactagaaacattaatgaagaagaaacaggaaaaaaagaaaagcagtgagttggaattacaaaaattgagtcatgatttgaataaatataagtccaatacggataatatcgagaagaaaattgaagaactacgacagaaacacgagtttttggaggattttgatttagtgacaagcatcgtaaaacaaaatgaaggtattgatttagaaacttacagggagagaagtaaacaattgaacgagaaatttcaagagctaagaaaaaaagttaatccgaatatcatgaatatgattgaaaatgtagagaaaaaggaagcagcattaaaaacaatgatcaaaactatcgaaaaggataagatgaaaattcaagaaactatatccaagttaaatgaatacaagagggagactttaattaaaacttgggaaaaggtgacactcgattttggtaatatttttgccgatcttttaccaaactcattcgccaaattggttccttgcaaagataaagatgtcacgcaaggtctagaagttaaagtgaagcttggtagtatatggaaggatagtttaatagaactatcaggtggacaacgatctctgattgccttagcattgattatggcattattacaattcagaccagcgccgatgtatatcttagatgaggttgacgctgctcttgatttaagtcatacccaaaacataggtcacttaatcaagacaaggttcaaaggatcgcaattcatagtcgtttctctaaaggagggtatgtttaccaatgctaatagggtttttaggactagatttcaagatggtacttctgtagttagtataatgtga

SEQ ID NO: 866 - DNA, 180 bp, Saccharomyces pastorianus
atggctaagtctaagaaccataccgctcacaaccaaaccaagaaggctcacagaaacggtatcaagaagccaaagacctacaagtatccttctttgaagggtgttgatccaaagtttagaagaaaccacaagcacgccctacacggtactgctaaggccttggctgctgccaagaaataa

SEQ ID NO: 867 - DNA, 441 bp, Saccharomyces pastorianus
atgggcgtgttggaacttgctggtgaatactgggaacagttgaaggagaccgttttgcccgtcgtggccgcggctgaggatgatgacaacgaacagcatgaggaagaagggggagaggaaaaagaagatgaagataagggagacgaagaagaagatgaagatgaagatgaagatgacgatgaggacgacgatgaggacgacgaggatgaggaggccgtcaccgatcaattggaagatctgagagaacacttcaagaacacggaagagggaaaagtgctcgtacaccactacgaagagtgcgccgagcgtgtcaaggtacagcagcaacagcccggctaccaggacctcgaccacaaggaggactgtgtggaggagtttttccacctgcagcactacttggacacgtgcacatcccccagactgtttgacaagctgaagtag

SEQ ID NO: 868 - DNA, 360 bp, Saccharomyces pastorianus
atgatcagaagggcccccactactctgcagctcagccaggacgatgtgtcttccctggtcgatgatctcaacgagcagaaactcaaacaacaactaaatatcgaaaagatgaagttcttccaaagcaaaaacagcaactctctacgctccaacacggacgtccaagacgtatcacaaaacgttgtcgacgacgacgatgacaacgacgacgacgacgacgatatggcttcttgcaacgacaaaacggcctccgttgcacacaacaggatcctatcctctctgcatctgtctaccgacaacaataccgcccacgaaacgtcgaacacaaacgacaaccccttctacatccgcgaggaataa

SEQ ID NO: 869 - DNA, 1674 bp, Saccharomyces pastorianus
atgagcgacacagagaaggatacggacgttcccatggtggactcgcgcgaagcgaccgaggaaccagcgacaacaaccgtgacaacgccatctttcccgcacctgcaacaggaacaggccaaagaggagtcagcctctttgggagtggaagtggctcataagaaggtaaactacgagcaggaggcacagaaacttgaggaaaaggctttaaggttcttggccaagcagacacatccggtgattattccctcgtttgcctcttggttcgatatttcgaagacccacgagattgaaaaaaggtccaatccggacttcttcaacgactcatcgagattcaagacgcccaaggcgtataaggacacaaggaattttattatcaatacatatcgtctttcaccatacgagtatttgaccattaccgccgtgagaagaaatgtagccatggacgttgcctcgatagtgaagatccatgcgtttttggaaaagtggggattaatcaattaccagattgacccgaggaccaagcctagtcttatcgggccaagttttaccggccacttccaagtggtgctggacactccgcaaggtttaaagccgttcttgccagaaaatgtgatcaagcagaaagttgaagaagaaggcgaagacgagccacacgtcaagaaggagttccccgtgaacctttcgattaaaaagaatgtttacgattctgcgcaagacttcaatgcattacaagatgagagtagaaactcgagacagatccataaggtttacatttgccacacgtgtggtaacgaatcgatcaacgtgcgctaccacaatctgcgtgcccgtgacacgaatctatgttctcgctgtttccaagagggccacttcggcgcgaatttccaatcgtcggatttcatcagattggagaatggcggaactgccatcaagaagcactggtcggaccaagaaatgcttttgttgctagagggtattgaaatgtacgaagatcagtgggaaaagatcgctgaccacgtgggtggccacaagcgcgtggaggactgtattgagaagtttttgagtttgccaatcgaagacagctatattcacgaggtggttggctcgcaactaaataacaagagcgaccacagcagtggcgcgtctgggtccaaactgatggggtgtgtgaacgatgcggtcgttgcgttgttgcaaggtaacgacaaactggataaggtttctgacaagtctaaggagatctcgcagaagtacattcaggaaagtcaggtgataattcaagagctggtgaaattgaccatggacaaactggagaacaagttcacgaagctgtgtgatctggagacgcaactggagctggaaaagctgaaatacgtgaaggagtccgaaaagatgctaaacgaccggttatcgttgagcaagcagatcctggacgttaacaagtcgctggaggagctgaacgtgtcgaaaaaactggtactgatctcggagcaagtagactcaggcatacagctggtggagaaggaccaggagggcggccacgaagacggcaacacggtcacgggacatggcgtgaagcgtgtgggcgaagaggatgagggcaacgaggcgggcgagggcgactctattgcccagctgcagccccaggtgtacaagccttggtcgttgtaa

SEQ ID NO: 870 - DNA, 888 bp, Saccharomyces pastorianus
atgaacgggtatctaaaaccgacactgctagtactaggattggtgtctctggcgtatgctttcaccactattgaaacagagatttttcaattacaaaacgaaataaatacgaaatatggctcagaaatgaacttctataaatttttgaagttacctaaactacagaaatcgagtgcaaaggagatcaccaagaatttaagaaggctgtccaagaaataccatccagataaaaatcctaagtatcgcaaattatacgagagattgaacttggctacccaaattctttccaatggttccaatcgtaaaatttatgattattatttacaaaacgggtttcccaactatgattttcacaaaggtgggttttattttaccagggtcaagcccaagacgtggtttatattggctttcatatggatagtcatcaacattggacaatatatcatttctattatacaatatcgttctcaaagatcaagaatcgaaaactttatcagtcaatgtaagcaacaagacgataccaatggactaggtattaaacaattgtcgttcaagcaaaacgaagaggacgaggggaaaaacttggttgtgaggtttagtgatgtctacgttatagagcctgatggaaatgaaacattgatctctccagacactttaaacaagccttcattgaagaactgttggttttggaaaatacctgcctcggtatggaacgttactttgggtagatttattggcactaccgtggaagaagaaatattaaaaaatgtaaaaaagactgacggtgaccaaacaaagaaggtaagcaaggtaaaaaagacctctgtgaagaagggccaaaaaaaaatggaactgcctaacggtaagacaatttactcacgcaagtaa

SEQ ID NO: 871 - DNA, 603 bp, Saccharomyces pastorianus
atggcaggtattcgattggtgcataaactataccaatattatcagttagccacaagtttcctatatgcagcattattcacgcggtggctgatactaatgcccttggtgggatcccggttcttacctggggggatccacgaatttttgatatacttgatgctttgctcgagcatcgtggaaacactttggctgcttaaattttacggggtcaagaatggcattttatctaggactttattaaaagatctaaatttcatctaccttgtagtggtaattcatttccatgacgattacgaacacgcattgatcttaaagaattcatcctattccagcttcatcatttgtttgtcgttatcgcaagcatactgtcattggtgcaaacttttcaaacgtaagggtgccaaggaaagaaccttgatctggaaagccaacacctttatcacgttgcccattttatatttgagtgaatttgcattattgctcttaaacattcaagtcaagaactatcattctactccaacattagacataattaatagggttgttctactagcatacttccctatattgttatcagcatacaaaatactgttaacaaagtaa

SEQ ID NO: 872 - DNA, 1125 bp, Saccharomyces pastorianus
atgagtaccccaaggaaggccaccagtgataaagaagacgcggaagtctcagagatcagaacgccttttcgagaaagagcgcttgaagaacaacgtctcaaggatgagatactgatcagaagtacaccaggctataggaaactcatatccacctctgtcaagtcccatgatattctcaacaaagaccccaaagaagtacgaagtttcttgcaagatttgagccaagctctagcacgcgaatcgcaagataacgatacaaattcaaacgagaatcgagctcgtaacctgatagatgaattaacgtacgaggaaaaccgaatagaagatgacaatttcctccagagtagtagtgggaagaccacagatagcaacaatgattatgacacgcatgcaggctacacttcgttatcacaaactgtgtttgcacaactacaagaaagagataaaggcattaaaagcaggaagattgatccgatcattatacaagatgctctaatggcagaagaagagaacgagttccaaacaactccctcacgggatggtaaaagtatctctatgaatgttttggagacgccacctggctttgggagggatcgcacagatgaactgtcgatgcatggtcagaagtcgatccctataacagaacaagatgaaggactgtctgaaccattgcccgatccatcttcaatgaatagagaagaagaagaaggggaggaggaagaagaggaagaggaagaagaggaagaggaagaagacggtgcgttcaaggatacaaataacgaggacgcagacaatccggtacatgatcccacgcgtttgcatgttccgacaataagacatgctacggtgaaaccgttagaaataagggacttaaagcatttaacaagacaatttttaaacgaaaatgaaataatattacccaaccaatcatggtccgccatacaggaagagtctttgcacataatggactttttaaatcagaaactggggtcattgcaaaagcaagatcttgtggattcatttattgacatgggtattattcaaaacgttgacgatatgttcgagctcgcgcatgaattgcttcccatggaacaccaatcaaagatcgaaacttacttattctga

SEQ ID NO: 873 - DNA, 888 bp, Saccharomyces pastorianus
atgcctgtatacgaacacttattacctgttaacggagcatggagacaagatgtcaccaattggcttagtgaagacgtgccctcttttgattttggtggttacgttgtaggttccgattcgaaggaggccaatctatactgtaagcaagatggtatgctgtgcggggttccctttgcccaagaggtctttgaccaatgtcaagtgcaagttgaatggtttttcaaggaaggttgcatcttggaaccttcgaagaatgactctggcaagctagtcgtagccaaaattattggacccgctaaaaacatcttgctagcggaaaggactgccttaaacatccttagtagatgtagtgggattgccaccgcttcgcacaggattatttgcttggcacgttctacaggttacaagggtaccattgcgggaacaagaaagactacacctgggttacgtcggttagaaaagtattcaatgctcgtaggtggatgtgacacccacaggtacgacctttcctctatggtaatgctcaaagacaatcacatttgggctaccggttccataacaaaggctgttaagaatgctaggtctgtgtgcgggtttgccgtgaagattgaagtcgaatgtttgagtgaagaggaagccatggaagccattgaggctggcgcggatgtcatcatgttagacaacttcgaaggtgatggtttgaagaagtgtgctcagagtttgaagggcaaatgggatggtaaaagacattttctcttggaatgtagcggtggcttgaaattggacaacctcgaagagtatttgtgtgacgacattgacatttacagcaccagcagtattcatcaaggtaccggtgtaatcgacttctcactgaaacttgctcattga

SEQ ID NO: 874 - DNA, 372 bp, Saccharomyces pastorianus
atgattgctacacctattagattagctaagagtgcgtatgagccaatgatcaggttcgtcggtgcaagacaccctgcagtgaaacacgctcccgagatcattgttcatccatgtgctaccaatggtatgttacctggtagtaaagactgtatttcagtgagtaaattcatggaaaactataaacctttccgtgtggtaccagtaaaccggagtgtcagcgctagtcccagcgctgcaaagacctccgcgttcgtaaacagagcattgggtaaagatgagcttgcatccattttcgaattacctgccaggttccagttcaagcccattggtgaaaaggaattagaaactataaacagtggtggagcatggtga

SEQ ID NO: 875 - DNA, 801 bp, Saccharomyces pastorianus
atgaaccacgatccttttagctggggcagaccctcagacgccacttacggcgcttacaacacacaaattgccaacgcaggcgcttctcccatggtcaatactcagcaaccaatagtaacaggtacttccgtcatatcgatgaagtatgacaatggagtaatcattgctgcagacaatttgggctcctacgggtcccttctaaggttcaatggtgtggaaagactcattcctgtgggtgaaaacaccattgtgggtatatctggtgatatctctgatatgcaacacatagaaaagctactagaagacctggtcactgaaaatgcatacgacaatcctttggcggattctgaggaagcccttgagcccagccatgtcttcgaatatctagctactgtgatgtaccagcgaagatcaaagatgaacccactttggaacgccatcatcgttgccggtgtagaatcgaacggtgatcaattcctaagatacgttaacctactaggtgttacatattcctcccccactttagccacagggtttggggcgcacatggctaatccactgttaagaaaggttgttgaccgagaatccgatatccccaagacaactctacaaactgctgaagaagccatcgtaaatgcgatgaaagtcctttattatagagatgctcgttcttcaagaagtttctccttggctataatcgataagaagacaggcttaactttcaagaaaaatttacaggtcgaaaatatgaaatgggatttcgccagggatatcaagggctacggtactcaacaaatttga

SEQ ID NO: 876 - DNA, 1638 bp, Saccharomyces pastorianus
atggtcgtgttggctgcttctatcactacgcgtcaggggaaaccccttctatcgagacaattcaaggatctgtccaaggaccgggtcctggagctgctgtccaacttccagaacctggtggccgagatctcgtcggaccacacgttcgtcgaggacaagcacgtccgatacgtgtacaggcccttcgacaactactacattatcctgatcacgaaccgccagtccaacatcatcaaggacttggccacgctgaacctgttttcgcaaacgatcaactcctatttgtccagtttccacgaccaggagatcttccacaacgccttcgagatcctgtcgtcgtttgacgagatcgtgtctatgggcgggtacaaggagaacttgtccttcacccaggtgcagacctacttgtccatggagtcgcacgaggagagaatccaggaaatcattgagcggaacaaagagatcgaggccaccgaggagaggaagcgtcgtgccaaggaaattgccagaaaggagcacgaaagaaagcacgggttcgtgtccgccaacggtgacttcgacggtgccaacaggttcatggccagtaaggatccaaacgcctcaaacgccatcaatagttactactcgcacgcctcgcccgcggcacaacagtcttatctccaaagcgccaacgctgctgctgctgcggcccaagtagcctccccactggctaccccccaccgtacgggaccttcggtcactggtggtatgaagttgggtggtagtgcaggaagaaggtctggcaccatgctacgtccaagcggggtctcttccgcctcctctgccacgcctcctcctccggaggaggacgctccagagaacaacggtattttgatctccatcaaagaagtaataaatgcggagttctccagggacggcaccatccattcctcggaattaaagggtgtcctagaattaagaatcaacgaccatgacctgtctcactctaacctaaaactagccgactccatcgacgtccgcgatagatccttccaattcaagactcacccaaacatagataagcagtctttcctatccagtaaactgatctctctacgtgataaatccaaggcctttcccgccaatgatcaaagcctgggtgttcttagatggcgtaaaattgcccccgcagacgatgattcactggtcccattgactttaaccacatggatctcaccctccgagtcacaacagggcttcgatgtcaccattgaatacgaaaatatctccgaactggaacttactgatttggtcttcaccattcctttgttccctcaagaaccagtcgacataaatacagagtcttccacgtccgcggaggccgaagtcatcaacatggaccaagaaacaggaacttccatcagtgtcagccaaatcggcgccaacgactcaggtgtgctagcattctccatcgaggctccgtacgaggacgcgttgtacccaatgaccgtttctttccaagaatcaagcagggacgtatccgctaagagcttcaccggcatggccgtcgattctgtcgtcatggccgctgaccacgaccaagagttgccttacgatgtcatcacctctttgaagtcagacgaataccttgtccaatag

SEQ ID NO: 877 - DNA, 825 bp, Saccharomyces pastorianus
atgccttcgttagccgaattgaccaagtcattgagcatagcatttgaaaacagcgactacgccacgtgcgagaagctgttgccccccaccaagatcgagctcatcaagaacaaccttttaataccggacctgtccatccagaatgatatctacttgaacgatctgacgatcacgaagaagatcctggaagtgggcgcgctcgccaacatctacacgtttgacttcgacgttttcgacagctacttcaaccaattgaagccttattacttcagtagcgaccacaaactgtccgaatcggataagaagtcgaagctgataagtctgtacctgttgaacctgctggcccagaacaacacgaccaagttccactcggaattgcagtttctagacaggcacatcaagaacttggaggatgactcgctcttgtcgtacccgatcaagctggacagatggctcatggagggctcgtaccagaaggcttgggatcttttgcagtctggatcgcagaacataacggaattcgactccttcaccgacattttgaaatcggccataagagacgaaatcgccaagaacactgagttgtcgtacgacttcctcccactgtccaacataaaggccctgttgttcttcaacaacgaaaaggaaaccgagaagttcgcgctggaaagaaactggtccgtcaccaactcgaaggtctatttcaaaaaccaaccaaaggaagcgcttgacgaagaagacgaaaccatgcatgaagacggccaaaagacaaagattattgaaagggcaatggactacgctataagtatcgaaaatattgtgtaa

SEQ ID NO: 878 - DNA, 1458 bp, Saccharomyces pastorianus
atggttcatttaggtccaaagaaaccacaagctagaaagggttccatggctgatgtgcctaaggaattgatggatgaaatcagcgaactggaaaaaatgttcaccgccgactctgaaaccttgagaaaggtggtcaagcactttatcaatgaattgaacaagggtttgaccaagaagggtggtaacattccaatgattccaggttgggtcatggaattcccaactggtaaagagtccggtgactacttggccattgacttgggtggtacaaacttgagagtcgtcttggtcaagttgagtggtaagcacacttttgacactactcaatccaagtataagctaccacacgacatgagaaccacacagcaccaagaagaactatggtccttcattgccgactgtttgagagacttcatggtcgaacaagagctgctgaacaccaaggaaaccttgccattaggtttcacattctcatacccagcttcccaaaataaaatcaacgaaggtattttgcaaagatggaccaagggtttcgacattccaaacgtcgaaggccacgatgttgtcccattgctacaaaacgaaatctccaagagagagcttccaatcgagattgtcgctttgattaacgacactgtcggtactttggttgcctcatactacactgatccagagaccaagatgggtgtgattttcggtacaggtgtcaacggtgccttttacgatgttgtttccgacattgaaaaattggaaggtaaactagcagacgatattccaaaggactccccaatggccatcaactgtgaatacggttcctttgacaacgaacatttggtcttgccaagaaccaagtacgatgttgatgtcgacgaacaatctccaagaccgggccaacaagcgtttgaaaaaatgacttctggttactacttgggtgaattgctgcgtatggtgttgatcgacttgaacaagaagggcttgatgttgaagggccaagatctaaccaagttgagcaagccatacatcatggacacttcgtacccagcaagaatcgaagaggatccatttgaaaacttggaagacaccgacgacattttccaaaaggacttcggtatcaagacatccttgcccgaacgtaagctgatcagaagactttgtgagttgatcggtaccagagccgccagacttgctgtctgtggtatcggtgccatttgccaaaagagaggctacaagacaggccacattgccgccgacggttccgtttacaacttgtatccaggtttcaaagccgctgccgccaagggtctaagagacatctacggatggaccggtgatgccaccaacgatccaatcaagattgtcccagctgaagatggttccggtgccggtgctgctgttattgctgctttatccgaaagaagaattgccgaaggtaagtctcttggtgtcatcggtgcttaa

SEQ ID NO: 879 - DNA, 1281 bp, Saccharomyces pastorianus
atgcatctgggacggtatttcgtaacaatgacatcgaaagctgtatttgacactaaagtcttaagagtaaatccgctctcaatccacttctctccaacagcacatttagatggatccttaccaacaataactgaccctgaaacagaagcagcactactagaggcagcaaagattataagagatactgacgaaactgtagcctttccaacagaaaccgtttatgggctcgggggctctgcgctgaatgataattcggtgctcagcatatataaggccaagaataggcctagcgataatcctttgatcacacatatttcatccattgaccagctaaacagaaagatttttaatcaagcggattcatccagcgcatctctgtctgataatataccagcaatttatcgcccattaatttcgaacctttggcccggtccattaactattcttttgcctgtaccacctccaaaccacaatacgctatcgaaactaacaaccgcagatcagtccacatttgcagtgcgtataccagctaatccagtcgctagagcattgatcgctttgagtgatacaccaatagctgcaccgtcagcaaatgcgtctaccaggccatctcctactttagcgtcccatgtttatcacgatttgaacggtaaaatccccatggttcttgatggtggtgcatgcaaagttggcgtagaaagtactgtggtcgatgggctatgcaatcccccaatgctactgcgacctggcggtttcacttatgaggagatcattgaattaggtggcgaagcttggtctctttgtaaggtcgaaaacaaaaaatctgttgaaaaaggtgaaaaagtaagaacacctggtatgaaatatagacattattctccctcggccaaggtcattttgttagtgcctaacacaagtgacaccaataacaacataacggagacgcagatggaaagtctgaacagaatgatcaaaaatgaaatacaagctgataaaactgtgaaaaaaatcgctattttgacttcactgaaactgcaagattcggatctacaatccaagatcgtggatgactctgatttttcttctaaaagttttgtcattgaaagacttgggcggacaggggaagaaatacaagctaacttatttgctgctttgaggaaagtagacgaaacggataacgttgacttgatattcgttgaaggtacgaatgaagatggagaagggctggctgtcatgaacagattgagaaaagcagctgcaaataattgtatactgttctaa

SEQ ID NO: 880 - DNA, 2853 bp, Saccharomyces pastorianus
atgagtgataatccatttaacgcgagtcttctcgatgaagactcaaaccgcgaaagagaaataatagacgctaccacagaggctctttcgaagccaaatccttccttagaatactgtaccttatcgatagaggaaacccttgaacaactccagactgatgggaacaatggtttaagctcttcgagcgaggccactagcaggagagcagttcatggccctaatgaaataaccgtagaagatgatgagcctcttttcaagaagttcctgtccaatttcattgaagatagattgatcctattattgatcgggtctgctgtcgtctctttctgcatgggtaatactgacgatgctatcagtatcacactagccattttcattgtggtcaccgtcgggtttgtccaagaatatagatctgaaaaatcgctagaggctttgaataaattggtgcctgctgaatgccatttgatgagatgtggccaagaaagtcatgtgttggcttccgctttggttccgggcgatttggtccatttcgggataggtgacagaatccctgctgaccttagaattattgaagccaccgatttgaccattgatgaaagtaatttaactggtgagaatgaaccggttcataaatcctcacaaacaatcgagaaatcttcctttaacgaccaacccaactcaattgtaccgatcgctgaaagaacctgtatcgcttatatgggaactttggtcaaagaaggtcacggtaagggtattgttgtgggaacaggaacaaacacttcatttggtgcagtgtttgaaatgatgaataacattgaaaagccaaaaactccactacaattaacaatggacaaactggggaaagatctgtcactggtgagtttcatcgttattggtatgatttgcttagtaggtgtcatccaaggcagatcttggttagaaatgtttcaaatatcggtttcattggcagtcgctgcaatcccagaagggttgccaatcattgtcacagttactttagcattgggtgtcctaagaatggcaaagcgtaaggctattgttagaagattaccaagtgtcgaaactttaggctctgttaacgtcatttgttctgataaaaccggtactttaacttcgaaccatatgactatatccaaactctggtgcttagatagtatgtctaacaaattgaacgttttgtcattagacagaaataagaaaagtaaaaattccaatgggaatttgaaaaattacttaactgaagacgttcgggaaaccctgaacatcggaaacctttgtaacaatgcctccttctctcaagaacatgcttcatttttggggaacccaactgatgttgcccttctagaactattaacaagctatgaaatgcctgatattagaaacacagttcaaaaagttcaagaacttccattcaattccagaaggaaattcatggccaccaaaattcttaatcctgctgacaataaatgtacagtatacgttaaaggtgcgttcgaaaaaattttgcagtgttctacaagtcatttgaaatcaaaggataaaaaaactgaaaaactgactgaaactcaaaaagacacaattattgagtgtgcaaattcaatggcttccgaaggtttacgtgtccttggcttcgctaaactggtattatccgattcatcaactccactaacggaagacctaatcaacgatttaacatttactgggttgatcggcatgaacgatcctccaagaccaaatgtcaaatttgctattgagcaacttctacaggggggtgttcatattattatgatcaccggtgattccgaaaatactgctgtaaacattgcaagacaaattggtattcctgtcattgatccaaagctttctgttttatctggtgataaattagaaaagatgtcagatgatcaattggctaatgtcattgatcatgttaatatttttgctcgtgctacccctgaacataaactaaacattgttcgtgcattaaggaaaagaggcgatgtcgtagcgatgaccggagatggtgttaacgacgctcctgcgttaaaactttcagatattggtatttcaatgggcaggatcggtacagatgtagccaaagaagcttctgatatggttctaaccgatgatgatttcagtaccatcttaaccgctattgaagaagggaaaggtattttcaataatattcaaaactttctaacttttcaattgtctacctctgtggctgcgttatcgttggtcgccctgtctacggcattcaaactacccaacccactaaatgcgatgcaaattctctggattaatattctaatggatggtccaccagctcaatcattgggtgtggaacctgtagatcatgaagttatgaagaagcctccaagaaaacgtactgataaaattttgactcatgaggtgatgaaacgtttacttactactgcaacttgtatcatcataggaacagtttacatttttgtcaaagagatggccgaggatggtaaagtaactgctagagatactactatgacttttacttgctttgttttctttgatatgttcaatgctttggcatgtagacataatacaaaatcaattttcgaagttggatttttcacgaataagatgttcaactatgcagttggactttcactattaggtcaaatgtgtgctatatatataccgttcttccaaagtatctttaaaaccgaacgtttaggggtgtctgacatattactgctattactcattagtagtactgttttcattgttgatgaattaagaaaactgtggatgaggaaaatgaacgaaagagacccaacgtactactccaatgtttga

SEQ ID NO: 881 - DNA, 699 bp, Saccharomyces pastorianus
atggtggtgattaacggggtcaagtacgcctgtgaaacgtgtatcaggggccatagggcggcgcagtgcacccacacagatggcccgctgcaagtgatcaggcgcaagggtaggccatcgaccacatgtggtcattgtaaggagctgaggaggaccaagaatttcaacccttctggcggatgcatgtgtgcttccaagcgacggctggcggtgggcagcgaggaagatgagtcgcggtgccgttgcgacgaaggcgagccctgtaagtgccacaccaagagaaagactagtaggaagcagaaggcagcatcgtgccatagctcagtcagtcctgaagcggcgaccgttaaaaatcttcgggtattagacttggaggcttctctgggcctgaacagcgtcgatcttattgacctgagcccctcgtcgtatgtggacatgacaacgactctgtctagcttggagtcacccctacaaagcgatggcgccaagacggacgacatagacgagctagggttgcctcttcttgacacgttccaacaatgctgcgattcggctgcaaccccccatagtgccaatgcaggcgcggacacaaatccaattgctgacactcatctaaacgatgttgacattccgttttctattaatgagttgaacgagctttacaagggagtattgccgcacactccacattcgaaataa

SEQ ID NO: 882 - DNA, 1344 bp, Saccharomyces pastorianus
atggatgagatccttgccaaagcaggctcacaggccgttacgtttgctataaaatccggcatatcgatagcatcaacctatgcattaaagacaatagcgaactttgttattcaaatccctaaggatgatgcgagaaggatagatcatttgaagttcaaattggaaagtcgtatagctattgtatccagtgccattgatctaataaaattggtggccgcaagagggaacacgaatttacagatcacgttgagattaactaaggatttgaaggaagagattgataggtttgatgaaaagataaatgaaatgacagaaaaggtggagggttcaagaagtgcgaaaacacagaatgaagctatcaaagcggtggagaactatatcaaagacttgttactaaggatagaagaaatcacaccatttattaatctctctttgaccacatcaggcgccaacctaaatagtgcacttcctcatcaaatctcgccaggcttattgttacaagcttctgattttgttaatgaaagcaatagaaaatacgacgacgccatgaaaagcagtaaaaagacaaaagatgaccgaaaagaactaaaagttcaagtggggcctatatttgaagtaacgttgttttccattttctataatttgacctcagaaagcaatggacaatcggggatagtttggaaggaagatatgaaacgagcacgaattaggatatgtagacaatactcttcagaaaaggaattcgattattttatgaaaatcgagcaagactttaatgatggcaggtatcatgaaaatgacgacaaggaggatacaccacaggaacttactatagatttgaaccatatgaaaaagttattttttagtgtttccggcaaacttcttcgattggaagaacaagattcaccggtgttggtgttgaaaataaactctcacggtgatcaagagaacgcgactactggagcagagaagccgcctatcgaagacattacttggtatgcggtaagtggatatgaagaagtagaaaaagacgacgacgaagaagaagaaaaagaagaagaagaagaagaagaagaagataatgaggaagggggcgaaagtggggaagagggggaaagcgaggaagaaaaactattggaagacaaaacttcatcgatcacgctactcgagtacattgtccggttgacgtctttgcaaagcaacgaccaaaaaagtatactggaggtcagcgatgaaagattgtccatttacctgaacgatgaaaacaccaactcaagaaaagaaggtatcagcaattctacaattaaagaaactgaagagaaattacaaaacctaatactctag

SEQ ID NO: 883 - DNA, 2697 bp, Saccharomyces pastorianus
atggcaagacgtagactaccagacagaccaccgaatggaataggagccggcgagcggccaagactggtaccgcgacctatcaatgtacaggactctgtaactcggctgacgaagccattcaaggttccctacaaaaatacccacatccagcccgctgctggtaaaatcgccaccgggactgacattatcgtgggaggaagatgcctgaggaaaaggtcatctactgtgtcgtactccggactggacgtggacgcagatgcggagcagatggagtatggtcaggacatcagtttggcccaactgactaaacgacggaaggatgctctcagtgctcaaagactgattaaggacccgacaaggctaactcacatcgaatacactttgagaaggtccttcactgtccccattaagggctatattcaaaggcacagtttgcccctaaccttagggatgaaaaagaaaatcacgccagaaccaagaccattacacgatccgacggacgaattcgccatagtgctgtacgatccgtccgttgatggtgaaatgattgttcacgacgctaccatagacaccaaggaggaagagctgaaaaatgtggccaagagcacccaggaaaaggagaacgcaaacaaagaagagagcccagaacaaaaaaacacacaaaaaatagggcatcacccttcattaatgacaaatggggtgagaaataaatccttacgtgaactgctgggtgattctggggactctgccgaaaacaacaagaagtttgctaatgtccctgttgtcatcgatccaaagctggccaagattttgagaccgcatcaagtggaaggtgtcaggtttttgtatcgttgtgtcactgggctagtcatgaaggactttttggaggcggaagcctttaacacttctagtgaagacccgttaaaaagtgacgagaaggcgcttgtgcagtctcaaaagactgaagggaacaatagaggtgcgtacggctgtatcatggcagatgaaatggggctaggtaagaccctgcaatgtatagcactgatgtggacactactaagacagggcccacaggggaaacgactcattgataagtgtattatcgtttgtccatcctccttagtcaacaattgggccaatgaactgatcaagtggctgggccccaacaccttgtctcctctcgccattgacggaaaaaagtcctcgatgggcggaggtaacaccacagtgtcccaagccattcatacctgggcccaggcccagggcagaaacattgtcaaacccgttctgatcatatcgtatgagactctgcgccgtaatgttgaccaattaaagaactccgacgtggggttgatgctggcagacgaaggtcatcgtttgaaaaatggcgattccttgactttcacagcgttggatagcatcaattgtcccagaagagtcattttgtccggtacgcccatccaaaacgatctttccgagtattttgccctgttgagcttctccaatcctggcttattgggctccagagcagagtttagaaagaatttcgagcttcctatcttgagagggcgcgatgctgacgctaccgataaggaaattacaaagggtgaggcacaattacagaaactgtctacgatcgtttccaaattcatcatccgtcgtactaatgacattttgtccaagtatctaccttgtaagtatgaaaacgtgatttttgttaacttgaagccattgcaaaacagtttatacaataaattaatcaagtctagagatgtgaaaaaaatggttaagggcgtgggtggcagccagccattaagagcaattggtatcttaaagaaactatgtaatcatcctaaccttttgaattttgaagacgaattcgaggaagatgaagacttggagttacctgatgattacagcatgcccaattcgaaagcgagggatatccaaaccaagtattctgccaaattctctattttggaaaggtttcttcacaagattaaaaccgaatccgatgataagattgtcctgatttctaactatactcaaacgttggatctgattgaaagaatgtgtagatacaagcattatagtgccgcacggttagatggtacactgtcgatcaacaagagacagaagttggtggatagattcaatgatcctgagagtcaggaattcattttccttttgagttccaaagcaggtggttgtggtattaacttaatcggtgcaaacagattaattttaatggatccggattggaacccagctgctgatcaacaagccttggcgcgtgtatggagagacggtcagaaaaaggactgttttatttacagattcatatcgactggtacgatagaagaaaaaatttatcaaagacaatcaatgaaaatgagcttgagttcatgtgtggtcgatgcaaaagaagatgttgaaagattgtatagttctgataacttaaaacaactattccagaaaaatgacaacacaatatgtgaaacacacgaaacttaccactgtaaccgttgtaatgcgcagggaaaacaattaaaaagagcacctgctatgctttatggtgatgcgactacttggaatcatttgaaccatgacgctttggaaaagacaaacgaccacctgctaaaaaatgagcatcattacgacgatataactttcgcatttcaatatatttcacattag

SEQ ID NO: 884 - DNA, 939 bp, Saccharomyces pastorianus
atgccgtccaataatagtagctttttggatattgatgacgatctcgaaggcgtggatgattttgccggtgaaaccaacccattcgatgatgccactgtgccagacagaccaagcatgaataagtcgaaggctggtgaagggaatggattttatggcacagcagacagtaagggcgagtctgcaccacttcagggccaaatggacccaccagcctatgaccaagtgataggggaaaacacgaacgagaacggtgggcgtgacgggttgaggccgggactaataaactactattcaagatactttcaacttaacttgacgcagttcaagaaaagattatctgcggtaatgacattcagaaatgatcacaatgccggggataacgacaacgactgcgatttgtacggtgctgtgtggatcactgccacagtagtgatgattaatttcaccatgagcggtgggctgagcttcatcataaacgaagtaattaaaggcaccagggccggtggagatgttgatagagccagtcagttcaagaagctgctccattcaatctggctgttttacgggtataccttcggggtgccattcatcacgatgcaggttttgcaaagggatgagcattcggaacgcaacagaagtttcaagagtgtccccgaattgatttcagtttacgggtactccaatttgatttggatacccgtttgtgttattttaaatatcttggatatgtctaaacgtttgagaacggtgcaggccattcaatgggcgatcgtagctcttgggtgggcacaatcgtcgtatttcttgaagtcacagatgtccaagaataatggcgaagacggtgagactcaagcgggtggcaagttatctttatctgttattgttgccattgccctgcacgctttattctgtttattatttaggtttataatattttga

SEQ ID NO: 885 - DNA, 3252 bp, Saccharomyces pastorianus
atgtcatctaggggtatcgtctatgatcctcagttcaaacctgttcaggggatttacgaaaatagattaagacaatttattgatacaggcggagattaccatgatttgaatttgaccaagttttacgacaagaaacgtatttcgttagatcatgaccatgtcaaagtttggtggtaccaggttccctttgaacgtggttcttctcccgtctctcccgataaaagaccgtcttggaagtctatcattgaacgtgatcaaaagggtgaattggaatttagagaggctaacaaaaatcagcctttcgggcccagttggtctacaacgtggttcaaagtaaaaatttccctacctgaagactgggctaaatctggtgagcaattactctttgaatgggactgctccaacgaaggaattgtcatagacccaaccactttgattcccgtgactgctttctcaggtagtgagaggaccgaatacgttttaccgaagtcatcggatgggaaacattttttttacatcgaagctggtaataatggtatgtttggttgcggcgcaggatctactataaatccgccagatgataatagattcttccacttgaggaaggcggatcttgtgtggcccgacctggatgctcgtgggctgtacattgatttttggatgctgggagatgctgcgagagagttgcctggagactcttggcaaaaacaccaagcgagacagctaggtaacgccgttatgaatatttttgaccccaatgaccgctcaagcgttcgtaaatgtcgtgacttacttcaaaaggagtattttgatccactttcagaaagcagtaaagtttatgaacaaggggactctcaagttttgacaaatgtttatggtattggtaattgccatatagatacggcctggttatggcccttcgcggagacaagaagaaaaatcgtgaggtcttggtcttctcaatgtactttaatggatcgtttccccgagtacaaatttgttgcttcacaagctcaacaattcaagtggctattagaagatcatcctgagttcttcaataaagtactgattcctaaaattcaacaatcccaattttttgctgttgggggtacatgggttgaaaacgacactaatattccctccggagaatcgttggctaggcagttctttttcggacaaagatttttcttaaagcactttggtatcaaatcaaaagttttctggttacctgatacgtttggatattcttcacaaatgccacagctttgccgcttatcaggaattgataaatttttgactcaaaaactttcttggaataatatcaacagtttcccacatagtaccttcaactgggcgggaattgatggctctcaactactgacacacatgcctcctggtaatacctatacagccagctcccactttggtgacgttttgcgtactgctaagcagaataagacacccgaatattacggttccggtttaatgttatacgggatcggtgacggtggcggtggaccaactgaggagatgctgcagaagatgagacgtattagatctatgagtaacaaaaatggcaatgttattccaaaactacaagtcggcatcactgttgatgagttttatgatgacattttgaaaagaacgaatcaagggcatgacctccccacttggagtggcgagttgtatttcgaattccatagagggacatataccagtcaagcccagaccaaaaagtttatgagactatctgaaatcaaactacatgatctagagtggatagcggccaagacctctgttctatatcccgactcgtatgagtacccagctaaggacattaatagtctatgggaaaatgtcctattgtgtcaatttcacgatgttctacccggttcttgtatcgaaatggtttataaatatgaggccatccctatgctgcataacgttgtcaagcagtctacctcaatgatagaaaagacaatccaatttcttcaaagtcagagtaaagctgatcttgttgagatgggaacgctaacctggtcaaaacccgaaacggtttctgagcagaactctctagatggtagttatacttcctcagtgacaggatacgatgactacatagttcttgctaatgggaaattgaaagctattatttgcaaaaaaacaggtgtgataacgagtattacggatgaaactttaggagtggaatatttggatacggagaacggaaggaacaaactgggtgctaaccagtttgttatctttgacgacaaacctttgggctggcaagcttgggatacagaactttattccgtaaaccagtatgagtatattactaagccaaagaaagttcaggttgcctgcaataccaaagagacatgcgctgttgaggtcattttccaagtttctgaaaaatgcaaaatcagatcagtaatatcacttaatgcaaccacgtctagcgatgccaacttgagtaaaatcgatattactactaccgtagagaactgggatgccagaaacaaatttttaaaagttgaattccccgtcaacgttcgtaatgaattcgcatcatatgaaactcaatttgggattacaaaaagaccaacgcattacaacacatcatgggatgtcgcgaagtttgaagtttgccatcataaatttgctgactattctgaatatagcaaaggtgtttcaattttaaacaattgcaaatacgggttttccacacacggtaacttgatgagactatcgttgttaagatctccaaaagctccagatgaacatgctgatatgggaacacacgagataaaatatgctatctatccacatagaggggcgttatccagtgacaccgtcaagctagctcacgaattcaattacaatttcaactacaagctccccaaagacattggccagagttttgatgacatcgtaagcatctccggcgatgagaacgttatcttgtccaacataaagaggggagaagaagatcgtgccatcagatccaattattctataaagccaaaggatgaacaaagcattgtggtaagagtttacgaatctcttggaggggaatcctttgcttcattgaataccacgctaaatttgaagcgtattgaaaaagtcgataatttggaaatgcaagtctataagaatttgacggcaacacgagatgaatcgaatcatacaattaataggattcccataaaattaaggccttttgaaattgcttcgttcaaattatacttctag

SEQ ID NO: 886 - DNA, 1131 bp, Saccharomyces pastorianus
atgtgtcaagtcgccaatgacctaaggaaagtcgtgtctaataagcatgagaagttttttgaacgtcatttacaattgctcccttcttcgcatcaaggacatgacgtgaacaggatggctatcatattttattccatggtggggctctcagtatttgacgttgacgtgcctgctaagtataaagatcaccttggctggatgcacaaacactatatcaagaaaactctcgatgatgtagacaatactgaaatatcaggatttgtcggaagtttggttatggacgttcccaatgcaataactattaatttagccaatacactttttgcgttgttatcatcgatcatgttgaaagactatgagttttttgagacaatactagacaaggagagtcttttgaggtttgtctccaggtgccaattgcccaaccgagggtcatttgtatcttgcttagactacaaaacaaactttgcttctcctgttgattcagacgatttgagattttgctatatcgcggttgccattttgtacatatgtggatgtcgatccaaagaggactttgacagatacatcgatacggagaaattacttgaatacgtaatggaacaacgatgtcgtagcggggcttttggtacccacaatgaaccgcatgcagggtatacgtcttgtgcactttctactctagcattattatctagtcttgaaatgctatcagatgagtttaaagaggacactataacgtggctagtgcataggcaggtttcaaaccatgggtgcatgaagcttgaagacaactcgaatgctacatatgaccaatcggatgacggtggtttccaaggaagagaaaacaaatttgccgatacatgctacgcattctggtgcttgaattctttgcagttactcacagacaattggcaaaaactttgccaaatcgaactaacagaaaattatctacttaatcggacgcagaaaactttaactgggggtttcagcaaaaatgacgaagaagacgctgatttatatcatagctgcttggggagtgctgcattggcattgattgagggtaaatttaacggggaactatgcatacctcaaaagatattcaatgatttttgcaagaggtgccatttctag

SEQ ID NO: 887 - DNA, 1026 bp, Saccharomyces pastorianus
atgagtgacgtagtcagtgaagatcgtaaggcattatttgactcggcaatttccttcttaaaggatgagtccatcaaggatgccccacttttaaagaaaattgaattcttgaaatcgaaagggttgacggaaaaggagattgaaatagcaatggcagaaccgaagatcaatgagaagctggataacggaataacgaagaggagtgacgtgtctgagaacacgacaaacgcgcaggatatgtacttttatgaggcgatgccaccggccctaccccacagagactggaaggactactttgtaatggctaccgccacggctggattactgtatggtgcgtaccaagtaactagaaggtacgtgataccgaatattttaccagaagcaaagaataaattggaggaggacaaggaagaaatcaaggatcagtttgccaaaattgataaagtcctcaatgccatcgaaacagaacagacagagcttagagagcaagaaagcaataagttgaaagagctaggtgacacaatttccgaactgcaacaagtactagtgcaaactacgagaaacaaagaaaagatcgaagacgaatttagactagttaagctcgagatgtccaacctacaaagcaccattgacaagtttgtttcagacaacagcaacatgcaggaactaaacaatatccaaagagaaatggattcgctcaagagtttgataaaaaaccgggaaccaactgacatgcatgacaatagaccattttccatgtctcctaatggcatacctggtatagacgcgatcccatctgcgtccgaaatcctagccaagatgggcatgcaagaagagaatgacgaagagaaggagaacggtgataatgctgccaacgaggcaaacaccgttccggcatggaaaaaagtgagagagcaaactgtcgatagcaatggctccatcccggaatggcaaaaaaacaccactgccaatgaaattagcgtgcccgactggcaaaacgcacagcttggggactctaccccatag

SEQ ID NO: 888 - DNA, 3396 bp, Saccharomyces pastorianus
atggaaaaggaatctgtatataacttagcgctgaaatgtgctgaccgacaactgacctccacggattttctgaacctttacaaggaattcttcaatgaaaagttctcatcattggttcaagaggaggtagatggtactgctaatgctgccacaatcagtgatatcaagaaggaactgtccttgacggatacatccggtagtagtgggtctacagatgttacacgcttggatgaagctctagatatcgtttgctctgattttgtcaaggttttaaacctagagaggcctttgatcctggcggattatatcgttgaggtgttgtttgtgaattacaactcggatatgataaaatgttttttgccgaaattgaactctgttaccaactcgttaattttggtgcatttcttctccaagtcttgttcatttttcgctaaactatcagatactttggtgattggccaagtacgcaaggatttgggtagtgttgtggtaccgagtattttaaacctcgacatgaactctttgaataaagaactcattgttgtaatatcgaagtttttgcatactgttttgaaactcgcaaccgccccaatccttttaacttctgtcagctgtaagaatggatcatttacacttctcaatcagctgtcacaaactaacaagctgctttttagaaagatctcacagacttttgaggcaaaattacacttcaaagacacgaagccgtttttaaacaaagattcaaccaacgaatatgtaggatctccttcattgacttctccccaatatattccaagtcctctctcttcaacgaaacctccaggctctgtgaattctgcggccaaatataaagacatgaagcttatacgttattataaaaatatctggcttaataacaaaataatcaactgggaaatagccaattcagatttcttgtcaaagtattctgcaataagctcctctattttccgagagggcctaaactctgttcacaacctggaccagttactttccgacttaattgagacatcatttacttgttttgctcaattcgtcagtaataaacaatatcatcaagcgaactccaatttaacgctgctagaaagacaatgggttatatttatctccaaacacttgccactgttgatccttgagaattcttcaagaagtcctcgtgtagtaacgaatgccttagataatatcgatgagaaagtcattaaagctattagaatatactttaccgaaaaggatgatatcaagtccactaatgaagatttgtttgatgattatccgtctactagtttagatataaggcatgatttcattaagggtttaattatgttgaatttacaacctgcttctatcatcaacaattatttgagagaagatcaaatgatcgacaccagtatactacctacaaatgatgatttggttgttcgtaatttgcaaggcatccaagaagtggttcataacactaacagtttcatcatttcatctttggacactttggagctagaatcaataactgattctaataataatgattccagtaatgggttattccaagtactacacaactttgaatctgttgcgcccacaaaacaacgtgagatagtaaggggcattttatccatctttaatgactcaataaaagaattaaactataatagaataaccaaaatttccgctctgttatttttcaatttttcacactcattgacaacaattctctcgttttcttcaccaacaacattggtggagaccttaatgaaattcatcgactcttcgaaaaatgatagaagtaactcaaatatcaatgatgaaagttcggaatacgaaacggtcaatatttcattatccctctcctgggcaatattactgctaataaatgtaacacaaacgtatggtatatccgtggttgatgtagcactcaaatcatccaacttatctctaaaggattccttcataattaattttatttcaaatctgcctaatgtgtcggataaatattatttggaagagtcaaatatcaacgattctgatatgctaactaagtcgcataataccgttcaaagctggctctgtgatctttttgtcaatgggtccatcaccgatcaattgattcaaaatattgaaaccaggcaattggctaatctcataccattcatcgtcaaacaggtcttgctttcagttgaaataggggctctgactgacatttcgagtttgataggtggattcgagtacttcttacagcctttgttactgatcggattagtcaaaacatttttttggctagaacaatttctttcatgtgtcaagaacgatactgtatcagaagatatcttacagaaattattcaatttattaaacacccttttcaacccaatcactcttaatgaagactcaaaagctttccatacggcagttttgaggttaaacgcaatcccattactaaaggttcttcgcaaatttagagttcaaagtcaatctaattatggtatatattcatctgatgcgcagggcgatccaaacctagagcctttgattgcaaaattgatttcggttttaaacatatcaccggtttatgatgttgatccaagaattatcaacgcggaaaatgattactctagaaagcagttgggttatggtaaatttctaattttgaatgaaaatccagtcaacaaaataatgactaaccaaatcaattcattttggagtcttcatagtagcacatattacaacttagattacttgtttgaattaattgaattggtgacgccaaagaattttctttttgatgtgttgaaaaccttggaatataaactagccacctatggagttccaggctctaaaaataaaagaggatctttagaatcagagcatgttttcgattactttttttattttcttgtactacacgatgtaaaaacagcagaggaagctactcaattaatagaatatatggaagatgacacgaagaaaaaaaacgatgacgctgacaagaaatgtgagtatccacaggaaaaagctaaggaagctgttgaggtgaaacaagaatcccaaccaaaaaacgaagttgctcaagacgatgattttgatatgctttttggggagaacgatacaagtgctcaagcttatgaggaagacgaagaggatgaaaacagctgtgataatgacaagcctaacgacatatcgatgataaaggtagaagaaggcctagccaagactaacaaaataggtattttgaagagggactcctttgcagtacttcttcatgaactaaaattgctgaacgattcggccttagcaattggtgagataactaagacggaacacgaaaagtttatcaaatatcataataaatatttatgcatgttgaaaacatgcgtcttttaa

SEQ ID NO: 889 - DNA, 1242 bp, Saccharomyces pastorianus
atgtggctttcaaagttccagttcctcccaaggccgatagccaagggtatttcgttaagatataactcgcccttgcttgtacgattgacatcaactgcttccaactcccaaagcaatgagaacatcacaacacagtactcggagctatccccactgctcgttaaacaggctgagaagtatgagactgaactaagggaactcgataaggatctctctagtggcattcacttcgacgtgaataagcagaagcatcatgccaagttatcggccctaaccgacacatttagtgaatacaaggaaaagctaagtgaattgaaaggtctaaaagagatgatcgcgttcgatccatcattaagggtcgaggctgaacaagaatacatggagctggtcccgaaatatgaaacaacttcgtcaagactaataaacaaacttcttccgccacatccgtttgcagagaagccaagcttgttagaacttcgaccaggggtaggcggaatcgaggccatgatttttgctcaagacttgttggatatgtatattggctatgctaataacaaaaattggaaatatcaaattatatcgaaaaacgaaaacgaaagtggatcaggcattatcgatgctattcttagtatcgaagaacctggatcttatgatcggttgaggtttgaagcaggcgttcatagagtacaaagaatccccagtacagagaccaagggaaggacgcatacatccacagcggccgtgattgtactaccccagatgggcgacgaatctgccaaatccattgatgcctatgaaagaacattcaaaccaggtgaaattagaattgacatcatgcgtgcaagtggcaaaggggggcagcatgtgaataccacagattctgcggtcagattaacccacatcccctcaggtatcgttgtttccatgcaagacgaaagatcgcaacataaaaacaaagctaaggcgtttacaatcttaagagcaagacttgcggaaaaggaaaggttagaaaaggaagaaaaagaaagaaatgctcgaaagagtcaggtttcgagcacgaataggtctgataaaatcagaacgtacaatttcccacagaacagaatcactgaccacagatgcgggttcacgttattggacctgccaggcgtattatccggggaaagattggatgaagtcatcgaggccatggctaactacgacagtaccgaaagagcgaaagatctgctagcaaatagctaa

SEQ ID NO: 890 - DNA, 1032 bp, Saccharomyces pastorianus
atgtatatttttcaccaactttttttcctttccatagcatattatagtttgtttgcaaacattttggttgaagggaagaaggcatctctaggacaaggtgtttgtagatttgaagatcaaaattttcaaacagagttttttctgaatgtcctcaaggaaaacaagttagaaaatttaaaagaggagtatgacaagtacaaaacgcaaagtgctttgtatactggctttgtaatcgagaaacagtatgaataccaaatatttcccttccaaattagtaatttacttcgagtaacattttgtagagggggtaaaccggtttggtataactctcttccttttcagaatgatttagattggtcgcaaccgctatgcgttccaactgtagaagacgacgctgtctcacaaaaccattccatatgtttcaaatttgcaagggtacaaaaatatacgcaaagaaacgtgacactttattttcccaataaattcgttgggttcgtatttttctgcaactcctctggtacattccctaattctagtgaaaattatggcacggttccattgacacctattatatctgataatattagggattacaagacttcttggaggataaaaggcaccgtcacaaaagtgattccctatttacatactttaagtatcccaatgtatcgatacgagatgctaacagaccctgatcatcataatccagagcaattggaatacaagtccttaacttcagaattcttggggagctataaaagccttgaaaagcttgggagcaaaggaatgtcttggttaaatgggatagatcccatggaaaaatacgacagaattaaaagcgagaacgtttggcattttcataaaaactttgaaaagacattaaacaaaattggacgaaacattgagaagcctcgtgctgctttgataagaacaataaatgcacgatccaatgatgaacgcatgacaaggaggaaatatttgaaaaagaaggtttctagaatgctacgaagcagaatacctttgcagaattga

SEQ ID NO: 891 - DNA, 654 bp, Saccharomyces pastorianus
atgtctaagatcacctcttctcaagtcagagaacacgtcaaggaattgttgaagtactccaacgaaaccaagaagagaaacttcttggaaaccgtcgaattgcaagtcggtttgaagaactatgaccctcaaagagataagcgtttctctggttctttgaaattgccaatctgtccaagaccaaacatgtctctttgtatcttcggtgatgctttcgatgttgacagagctaagtcctgtggtgtcgacgccatgtccgttgatgacttgaagaagttgaacaagaacaagaagttgatcaagaagttgtccaagaagtacaacgctttcatcgcttccgaagtcttgatcaagcaagttccaagattattgggtcctcaattgtctaaggctggtaagttcccaaccccagtttctcacaacgatgacttgtacagtaaggtcaccgatgtcagatctaccatcaagttccaattgaagaaggttttgtgtttggctgttgccgtcggtaacgtcgaaatggaagaagatgttttggctaaccaaattttgatgtccgttaacttcttggtctctttgttgaagaagaactggcaaaatgttggctccttggtcgttaagtcctccatgggtccagctttcagattgtactaa

SEQ ID NO: 892 - DNA, 1377 bp, Saccharomyces pastorianus
atggttttagcaatggaaggtagattggcgccagaaattcctgggcttatccaaccaggaaatgtcacacaagatttgaaaatgatggtttgtaaattactaaattctccaaaacccaccaaaactttcccaggtgctcaacccatatcatttcagcattctgatgtagaagagaagctgctttcacatgattattatgtgtgtgaaaaaacagacggtctgcgtgtattaatgtttatagtgataaatcctgtaacgggagagcaagggtgctttatgattgatagagagaataattattatttggtcaacgggtttaggtttcccaggctgcctcagaagaagaaagaagaactgttggaaactttacaagatggaaccctgttggatggtgaattggttattcaaactaatcctatgacaaaactgcaagaattacgttatttaatgtttgattgtcttgctatcaatggtaggtgccttgttcaatctcccacaagttcgaggttagctcatttaggtaaagagttttttaaaccatattttgatctaagagctgcgtaccctaatcgttgtaccacttttccattcaaaatttctatgaagcacatggatttcagttaccaactggtgaaagttgccaagagtctagataaattaccacatctctctgatggtcttatattcactcccgtgaaagcaccatacactgctggcggtaaagattcattgttattgaagtggaagccagaacaagaaaatactgtggatttcaaattaatattagatatcccaatggtggaagacctttctttacctaaagatgatcgaaacagatggtattacaactacgatgctaagccagttttcagcttatatgtttggcaaggtggggcggatgtcaattcgcgtttaaaacattttgatcaaccttttgatagaaaagaatttgaaattctggaaagaacatatagaaaatttgcagaattgagtgtctctgatgaagaatggcaagatttgaaaaacttagaacaaccactaaacggcagaatagtagaatgtgcaaagaaccaagagaccggggcatgggtaatgttaagattcagagatgataagttgaacggtaatcatacgtcagtggttcaaaaagtcttggagagtattaatgattccgtttcattggaggatcttgaggaaattgtcagtgagatcaaaagtcgttgggatgagagaagagccaatggcggtgacggtgtaagatcactaccgcagcatacccaaaatgccatgccaccacttcctaaacaaatgcaaccaccacctacaacgaacaatgatgagccaaaatatgtagatgaggatgattggtcggattga

SEQ ID NO: 893 - DNA, 1935 bp, Saccharomyces pastorianus
atgaatctcaatgagaactaccttgatactgacgtacctaagagacagttgagaccaagtaaaagtggcaatttcgatagtattcccatcgtagctgcaacgtcagagccaaccacgtccgttaacctggatgaaacattttttagaaaggctgcctcaccagtattaataaccgacgaacgttccgtgagtaggtccacatccataaattctttaaacactgcatatttggcatcttcaagacctttttcgcaagtgaggaaatttcaagctagaaataacttattatcagcggatctgataagcaacaatgatgataaatctcaaccgccaaaaatccaaaaaaagaattctgatctttattcagactggggaaacgatataagaagccgcgtggcggaaagtatctattccatggaaacatctgtaaggggatctgaaatacgaagacgaccttatgtgagtaacgaaattcccaacatattcaagctccccaaccctaatcatgttaacgaaccagatgcaagtcaagttttacgtgacaaaaactttcttatattcacatcagcgggtaaaccagtatattctatgcatggtaaagacgaacaaatcatgtcatatactgggcttgtcaatactgtaataagttacttccaagttaatggaccctctgacctgaaaactatatccacatttgcgtctggtcaaaggctcactttcctagataaatcgcccatattattaatggcacagtccgaaagaggcgagtcctcgaatgaactattgaatcaacttgattttctatattcgtatatcctttcttcattaagtgaacgccaactactaagattattttctaaaagggagaattttgacttaagaaactatttagaaactacggatttcgagaatttgaacgaaatttgttcattaatctgtaatagaatgtttcccgacctgcttttgaactcattacaatgcttaccatttcgccattcttcaagattgaaattacaagatttaatgcttcaacaattggataaaaggcaggatatccccaggggcaccttgttatatgggttaataattgcgcctcaaaataagctatgctgcgttcttcgacccaagggccatacattgcacaccacagacttgcatcttttgttttgtttaatatcccatcaatttcaaaatttggacgaaactcaagaactttgggtgcccatatgtttccccaaattcaattccagcggatttctttattgctatatcaaatttttaccaaatgatgctgataacaatgagaaatcggcattagtcttaataagtgcacaaaaagatgcttttttctctttaaaaacattcagcgatgagttagttgctaaactcgaaggcgagaggctattgaaaaaaataaatgcttcaaaagggttcaaactaagcgatatcccagcacccatggtccatcattttatatacaaatcgaaacaaaacgttcagtatgtcatgccgcatttcgaaatcaacagcagcatttcattggattcgccgcagggattagaatatgaattgaaattgaagacgtattatcagcaattgcatggcacggtggtaagagataacggaaatcttttgagtaggtccatattaaatttcgttaaatggagctccaaagacaaagaagacacaacagtggacggaatgggaatgactttttctgaactggacgaatacatcatcggaaactcgtcatttgaacaggaatccgtcaatatgctaggaatggcatgggtgacgcccaagtttgagttatatctcattggtaacaacggagttgttgacaagaaagttttattcaagagtgcgagaaaggtagtcaattggtgtcaaaaacacgagtcaaggctgtttatcagcgacggggccgtcttttga

SEQ ID NO: 894 - DNA, 381 bp, Saccharomyces pastorianus
atgctttatttaagtgacatcgaagaggaaggtacatctgggaacgaaacaaagtatagcttctcagaggttttgttgttttccaacacacaggaaaatctcatgaccatagttggagaattacatacgctttcggatcgtgtagatcattataaaattgatcctgtatcaagggaagttacagtcacaacacttccatctttattggctcttttgtcagaaaagagagaccaggcaagacgcgtttacagagatgttctctcaataaaaatgtcagaactaaactgggacgtggacaagctcttcgcgcagttgcaagaagagttaacgagaactgacgagtccctttccatgtaccctagaagaaggtcattatactag

SEQ ID NO: 895 - DNA, 2301 bp, Saccharomyces pastorianus
atgggttccaaaagaagattttcgtcagagcatccagatccagttgaaacttctattccagagcaggctgctgagattgctgaggaattaacgaaacagcatcctcctccatctgcagaagcgctagtgcaccatgatgccggtgagtttaaaggaatagaacgtcatcacactaccgcagagcaagcccaaaatttggaaaatggagtggtaaatccgtttactggcagagagttcacaccaaaatatgtcgatatcttaaagattagaagagaattgcctgtccatgctcaaagagatgagtttttgaaaatttatcaaaacaaccaaatcatggtcttcgttggtgaaaccggttccggtaagactacgcaaattccccaatttgtcttattcgatgagatgccccatttagaaaacacgcaagttgcatgtacccagcctcgtcgtgttgccgcaatgtctgttgcacagagagtcgcagaagaaatggatgtcaagctgggtgaagaagtcggttactccattagattcgaaaacaagacctctaataagaccatattgaaatatatgactgatggtatgttgttgagagaggcaatggatgatcacgatttatcccgttactcttgtattattttagatgaagcgcacgaacgtactttagctactgatattttaatgggtcttctaaagcaagtaatcaagagaagacctgacttgaaaatcattatcatgtctgccactttagatgctgaaaagttccaacgttacttcaacgatgccccattacttgctgttccaggtagaacttatccagttgaactatactatactcctgaattccaaagagactatttagattcggccattcgtactgttttacagattcacgcgacagaagaagctggtgatattttgttgtttttaacaggtgaagatgaaattgaagacgcagtaaggaagatttctttagagggtgaccagttagtcagagaagaaggatgcggaccattgtctgtgtaccccttatatggttcgttaccaccacaccaacagcaaagaattttcgaagcagctccagaatcacataatggtagaccgggtagaaaaattgtcatctctaccaatattgctgaaacttccttaacaattgatggtattgtctatgttgtcgacccaggtttctcaaagcaaaaggtttacaatcccagaatcagagttgagtctttgttagtttctcctatctccaaggcctctgcccaacaaagagctggtcgtgctggtcgtacaagacctggtaaatgtttcagattatacactgaggaagcatttcaaaaagaactgatagaacaaagttatccagaaattttacgttccaatttatcttctactgttttagaactgaaaaaactgggtattgatgatttagtgcatttcgactttatggatccaccggcccctgaaacaatgatgagagctcttgaggagttgaactatttggcctgtttagatgatgaaggtaacttaacatccttgggtaggttggcgtctcaattcccattagatccaatgttagctgtgatgttgattggttctttcgaattccaatgttcccaagaaatgctaaccatagtggccatgttatcagtaccaaatgtattcattcgtccaacaaaggacaagaaacgcgcagatgatgccaagaacatattcgctcacccagatggtgatcatatcactttactaaacgtatatcacgggttcaagtcagacgaggcttatgaatatggtattcataaatggtgccgtgatcactacttaaatcacagatctatttctgctgcagataacatccgctctcaactggaaagattaatgaaccgttacaacttagaactaaacactacagattatgatagccccaaatatttcgataacatcagaaaggctcttgcctctgggttcttcatgcaagtagcaaagaagagatctggtgcaaagggatacatcacagtgaaagataaccaagacgtcttgatccaccccagtacagttcttggtcatgacgcagaatgggtcatttacaatgaattcgtcctcacgtcgaagaattacataagaacagtcacatctgttaggcccgaatggctaattgaaatagcacctgcatactacgatatggacaatttccaaaagggtgatgtcaaattgtcgctagaaagaatcaaggaaaaagtagatagattgaacgacttgaagcaagataaaaccaaaaagagcaagcactctaagaaataa

SEQ ID NO: 896 - DNA, 798 bp, Saccharomyces pastorianus
atggaactagcctcaataaaggacttggaaacggatcaagcaaaaatttgcttggttaaggcattaaaggaatccgtatgtaagactcttttagaattcgtggatattcaaatcgagtgttttatgtatcccaatgatccaaagcgttttacgagaatattcaaagacaataaaatgttaaatgaaacatgcaataaagaaggtaaagcaaaaaactacccatcatcaatgggtattggtcattcagccctattttctttgatctacataagacagaaaacaaactcactacgatcgttgaacgaacaggaacggtccccaaccgagcttgttgaagatctaaataaaaagctaaaaagcatcggcgaagtctataatcacctcaatgaactatatcattcttacttaatggtaaagtacaataacataggccatcaaaaactactaggtgatttcgtcatccaaagtgacttcatgtttgacatcctccgcaggtacgctacgattacatcttcagtagcgaagagcagcgagaacaacagccgtctggtaggtattactaatcatttcatcgaagataccaatatattttataaacgcataatcagtaattccaacgcatacgcggaatatgatctcgtgaaacatggtgtaaatagaaattcaagtgaagaaacattagtcgaacttgaattcaaaaaactggacgtttcaggcatgcatctcgacgatgaatttgatgattttctacagaataggaaagtgtctctgaaaattacccataggagagtcatatag

SEQ ID NO: 897 - DNA, 1839 bp, Saccharomyces pastorianus
atgccagagaatcccagagataagagcagtgcagcgaacagcggcaatcgttctgtactttcaattgcgtctccaacaaaactgaacattttatcttcggattggtctagaaatcaaggtaaagtttctaaaggatcactgaaacgatcaagttcactaagtattagaaaccccaaacgaactagtttacaagcatctacgggttctatctacgcaagacctaagattaccattggagcaccaccattggtcagacgagattcttcattttttaaagaagagttcgaggctaaaaaagacaaaacaaatttttctacatatttgtcccgttcatattccacaaatggactagacagtacaactctccaaacatccttatctcaaccggcaacgtctagagattctgatgagcaatttacggtagcagcagacagatatattccaattctacagggcgcttcccaaaacaaggtcgatcctgaaaccttgcatgaagcactacctcctccgaatgcttccccaatcacgcatttgagggctcaaactaaaatagtctttaaacaaagcgtagccgaggcatgcggactagatatgaatagaagaatactacaatatatgcctgagccaccaaaatgctcttcgtcaaggcaaaaaagttatattatgaagaaaaggacacattatagttaccagcaagaacaaaagattccagacttaatcaaattaagaaagatcaatactaatcctgaaagaatccttgatgctcctggtttccaagacgacttttatttaaacttgttaagctggtctaagaaaaatgttttggctatagcattggacacggcactatatctatggaatgccacttctggggatgtgtccttgttaacggattttgaaaataccacaatatgtagcgtcacttggtctgacgatgattgccacatttccatcggtaaggaggatgggaacactgaaatttgggacatagagaccatgtctttgataagaactatgagatctggcttaggggtacgtattggctccctgtcttggttagatactctagttgcaacaggcagccgtagtggggaaatccaaatcaatgacgtcaggatcaaacagcatatcgtatctacatgggaagaacatactggcgaagtctgtggtttgagctataaaagtgatggattgcaacttgcttccggtggtaatgacaacaccgtaatgatttgggatacgagaacatctttgcctcagttttcaaagaaaacgcacaccgctgctgtgaaagcactgagttggtgtccatactctccgaatatcctagcctctggaggtggacaaacggataaacatatccatttttggaacagtattacaggcgcaagagtaggttcaatcaatactggatctcaggtgagctctttacactggggccaaagttatatgtccaccagtggtggcacaatgaataaagagattgtcgccacagggggcaatcccgagaatgcaatctctgtctataactatgagacaaaattcaaagtagctgaagtagttcatgctcatgaagcaagaatatgttgttcgcaattatccccagatggaaccacattggccacggtaggtggggacgaaaacctaaaattttacaaaatattcgatccaaggagcactgaaagacccagggaaaaaggcagcgtcatggatggtatgttaggtatgattggcaaagaagaatgtggcggaaatgacaaagagaatcgctccaagaattcaaatgagatccatacaggacggccttcttcaagcaccagccagttcttgatcaggtaa

SEQ ID NO: 898 - DNA, 969 bp, Saccharomyces pastorianus
atgaagcctgtgcaggactctcaagaaaagatatctattgaacagcaattggctgtagaatcaatcagaaagttcttgaactcaaagacctcttatgatgtgctacctgtttcttaccgtctaattgtcttagacacttcattactagtgaaaaaatcattgaatgtacttttgcaaaacagtattgtctccgccccattatgggactctaagacgtcaagatttgctgggctactaactaccagtgattttatcaatgtaattcaatattacttctctaacccagacaagtttgaattagtggacaaactacaattagacggattgaaggatatagagcgggctctcggagttgaccaattggatacagcttccattcatccatctagacccttatttgaagcgtgtcttaagatgctagaatcaaggagtggtagaataccattgatcgaccaagacgaagagactcatagagaaattgttgtcagtgttcttacccaatatagaatcttgaagtttgttgctctgaattgtagagagactcatttcctaaagatcccaattggggatttgaacatcattacacaacaaaatataaaaagctgtcaaatgacaaccccagtcattgacgtcatccaattgcttactcaaggccgcgtttcttctgtccctatcgtcgatgaaaacggttacttggtcaacgtatatgaagcatacgatgttctgggtttgataaaggggggcatctacaacgacttgtcactaagcgttggagaagcccttatgagaagaagtgacgatttcgaaggtgtctatacatgcaccaagaacgataaactatctactattatggataacatcagaaaggcaagagttcatagattttttgtagtcgatgacattggacgattgattggtgtcttgacgctaagcgatatcctcaaatacattcttctgggtaacaactga

SEQ ID NO: 899 - DNA, 2178 bp, Saccharomyces pastorianus
atgccacaatctgcaccaattcaagaagtacagcgcgtatcatgggataacaaacctgctttgaagcaaataactctccgagcgaccatagcaggtatcattataggatctttggtgctaacatcaaactttcaatttggcctacagactggttgggtttctatgatgtcgttgccatcggcattattagcatgcgcattcttcaagaacatatggcctctgatttttccaaatgacagaccattcagtgatgtagagaatgtatatgtgcaaagtatggctgtagctgtcggaacaggcccattggcctttgggtttgttggtgttatacccgccattgagaagttccttactaaccacgagagtggtggactaagggaacaaggacaatcattcagctttagagaattattgatatggtccaccgcattagcatttttcggcattttctttgcagttcctcttagaaagcaagtaattgtcagagagaaactgccctttcctagtggcagcgcaacagctactttaatttcggtgttgaatgggacagagattttacaagaggtttccaaatcagagctattggaaatgagacaaaggagattgaacgaatgtcctgaggtgttacaaccgaacagcgatccagaagaggctgattatttaataaactcttctattagtgatcttggcgattactcggcaaccagccaggacaatggctccgttctctccgctggtgctgaaaactataaggcaaacattcttattttattcaaaactttcattgcttcatcactctataccatggtgtcatattttataccagtgatacgatccattccagtatttgggaaatacctctcgaataattatctctggaatattcaaccatcgcctgcatatataggtcaaggaataataatgggtcttccaacagtgtcatacatgctcattggctgctttttaggttgggcagtattagctccgctagcaaaatataaagggtgggtgccaccggacgctgatgttcatgactgggaaaagggcgtacaaggatggattctttggtcgtccctttccatcatggttgccgacagtgttgtcgctttcattgttgtgactgtaaaatccatcgtaaagttcattctcattgatgataaagctactttgttgaacactattatcgatgacacatttcaatccatgctattagaagaagagcgtgccatcaacagcagtagaagaaatacaaatgtagatggaagacaagatacagtaagattagtaagtatagataacgatattgaagtagactctaagcatctagttcgttatactaccgttatcagtggatgcctaatatcctccattatatgcataggatccataatatatctgtttggaatagaagtcatccctctctatgccattattaccgctttgatacttgccctgtttctatccattcttggtattcgagcacttggagaaactgatttgaatcctgtgagcggaattggtaagatttctcagctgatatttgctttcattatacccaggaatagacccggatcggtattgatgaatgtggtatccggaggtattgcagaagcttccgctcaacaagcaggtgatttaatgcaggatttgaagacagggcaccttctcggcgcctctccaagggctcaattctgcgcccagttgatcggagcctgttggtctgttattttatccagtttcatgtacatgtgctacaataaggtttatacaatccccagtgaacagttcaggatacctacggcagtggtatggatagactgtgcaagacttgttactggtaaaggccttccagataaagctttagaatgctctatgattcttggggctatatttgctgtactatcgctgatcagaaacacttacagggattatggctatggatggattatatatattccttccggagtagcagtcggtgttggtatatttaattcccccagctttaccatcgcaagattcatcggtgggttggcttcacatctttggttaaaaaaacacaggggtgatttgaatgcgaaaaccaaaatgattgtattcagttcaggattggttctgggcgagggtatatttagcgtagtaaacatggttttcacttgcttgaatgtcccccattattaa

SEQ ID NO: 900 - DNA, 1551 bp, Saccharomyces pastorianus
atgtccacacaacagcagtcatacacaatttggtctccacaagacactgtgaaggatgtcgccgaatcgcttgggttagaaaatatcaatgatgatgtcttgaaggcgcttgccatggatgtggaataccgtattctagagatcattgaacaagcggttaagttcaaaagacattctaagagggatgtgttgactacagatgatgtatcgaaggcactgcgggttttgaacgtggaacctttatatgggtattatgacggctcagaggttaatagagctatatcatttagtaaagttaatacatccggagggcagtcgatctactacttagacgaagaagaagtggattttgataagctgataaatgagccattaccgcaagttccccgtctaccaacgtttactacacattggctcgctgttgaaggtgttcaacctgccataatccaaaatccaaatttgaatgatataagagtatctcaacccccattcattaggggtgctattgtcactgcgttgaatgataatagttttcaaactcctgcatcttcatctgctacaaacgcttccgtgacagataccagtgcctctcagcatctgtctaacgtcaaaccaggacagaatactgaagttaaaccattggtgaaacatgtgctatccaaagaattacaaatctactttaacaaggttatttcaactttaacagcgaagaatcaaaacgatgaaagcgtacagcatatgaagcaagcagctctgacatctttgaagactgatagtggtctccaccaattggttccttattttatccagtttattgctgaacaaatcacccaaaacctttctgatttgcaactactgacgacaatcttagaaatgatatactctttgttgagtaattcctctattttcttggacccttacattcattcattgatgccctcgatattaacattgctcctggctaaaaaactaggcggatcaccaaaagatgaatcgccgcaagaaattcatgaatttttggaaagaacaaatgcactacgtgattttgctgcatccttactagactacgtattgagaaaattcccacaagcctataaatcattaaagccaagagtaaccagaacactattaaaaacattcttggatataaatcgtgtctttgggacttattatgggtgtttaaagggtgtgtcagttttagaaggtgaatccataaggttttttttaggtaacctgaataactgggcgcgtttagtattcaatgaaactggtattactttagaaaatgtagaggagcatttgaacaaggaagcgaattcgactaggacaaaatttactaaagaagagacccaaattttggtggatactgtcattagcgcattgttagttttaaaaaaggatttgccagacttgtatgaaggtaaaggtgaagaagtcacagatgaagataaagaaaaattggtagagaggtgcggtgtcaccatcgggtatcatattttgaaaagagatgatgcaaaagaattaatcagctccattttcttcggtgaataa

SEQ ID NO: 901 - DNA, 1872 bp, Saccharomyces pastorianus
atgttgtcgagatacaatcgagttattgacatcgagggcggtaacgctgaaatttcgttacccattgtcaacttcccaccatttagacttagagcccagctgattgaaaaagatcccgttgtttggttgcatttattagagacatatgtaacttacttggagtatttgatgcaaggaactaacattgaactattgaatgattctacacttgatcatttccgtctatttttaagaagttatctacatgaaattgcggatgaagaagggaagttattaagtctcggtatcaatcatgatgtgtctgagcagttgcatctactgaagggctggatattctcattggttaagaagtgtggcctgctgcatcttcaaatatttggtgattctctttgggacatggttaagatatacgtcaaacgcaaccctgattctattcgtggtttgattgacggttcattgaaaccacaaattaacacgcaacgtgtacagttggacaaaacttaccaacttcaacagcatctaaaacagttgatagaatccggaaaattcaaaaagctagatttaaaatgtgtcgaagatctactaacagctaagtctatacaaccaaataaattcgcggaaaacttctttacagcgagctggattgaagttttagaggcattatggtcgaagggccaaggcagggcccatgaaatttctaaaaaattaattatcattaatatattttctgtttctgccaaccatttactgaaaataacccaagaattgggtataagtaatttggaaactttagcactatacccactattaggaacaatacttataaatgataatatccacaaaagacttcctgatttgaaaagcaagctccttttcttaaattttggatcactgtcaatgaataatggaaccagtactgaacatccatcatcaacaagtaacgaaattaatgaggatcatgtattgtcattaatggaattgtttccccaattctccaaatatcaattatcacaaacccttcttgcatatgatgataacattgagctagtgacgaataaaatatttgaagatcctactattattgaagcattccccagagaatccggagaagaagaaacaagaccaatttcgagcggaaacaacactgcttttacggatgaactaagcttatcaaacagagttcctaactctaagaataaggacttagataagaagattatctcaggacacgttccagatgaattaagaaataaaactctaacaagggcattgaaacttttatatgaaggtgatgaagatgaaagggatgatacttatgatgaagctgatgtgagccgatctgatttatcgaaaagaatcaacgttcaagaagacgagggaaaaagccaaaagcaggatgacacaagtgaagagaaacaaccttcgcagtacgatgctgttgaagcttacttatgggaattattaaaacaggaccgaaccttgtttgaaagatctaagagaggttcaaaagtaaggaaatctatgaaagaacacacttcatggtcagatgaacaaattgaaggctggtcgcgaatgttggagagatcacctcaacgagccaggcttcttgaagaaaaattcatgtttaagggtaatttcaaatctggtaagacgtcgtacgttcataaccgtgatgataattccaaagaatctactaaggaacaaacgaaaaagaaagcaccaaaggttatcaagaaggatgaaccacagtctgttgaaaagacaaaaagacaacatgccaaaaatgaaaagaagaaaggagcaagagctaatcacaatcgtaagggaggtcatgataagaagttagctcgtgttggaggtaacggcgtttga

SEQ ID NO: 902 - DNA, 426 bp, Saccharomyces pastorianus
atggggttgtgcggaagtaaatctcaaccaatgccctcgcaaaccacaacagtaacaccgagaacaagaacaaaaccagtcaatcgtggtactacgaacgcaaaagaacaacttcgacaaaaagagaatgaaagtggaaagaagaaaaagtcacctttaaaaagcacaacaggccagcctgtaaaaaagagagaaggtagcaaactcagtggcgcaagtgatacgagcaaagataaagtaagtcccaaagaagctgcaagactagcagccgagaaaagatttcaagaaacaaatgagaagtataataaaggtgagttgggtaagaaactggcgcaagaacgtgccaagtctcacaagactcgtttgatagaagagactgaaaaaaagcatgctgcacaagaaagagaaaacatgatatatgattga

SEQ ID NO: 903 - DNA, 450 bp, Saccharomyces pastorianus
atgtcagctaccagggccaacaaggacattttcacactattcgacaagaagggccagggcgccatcgccaaggactcgttgggagactatttgagggccattggctacaaccccaccaaccagttcgtgcaggacatcttgaacgcggactccagcttgagagatgcctccagcttgacattggaccagatctccagcctgattgaggccaacgggaaggaattagacgccaccaccagtgcaaagactgaggacttcatcaaggcgtttcaggtgtttgacaaggagggcacaggaagggtctctgtcggtgatttgaggtacatgcttacaggcctgggagaaaagttgactgacgctgaagtggacgagctgttgaagggcgttgaagtggacaacaacggccaaatagactacaagaagttcatcgaggacgtcttaagacaatga

SEQ ID NO: 904 - DNA, 1053 bp, Saccharomyces pastorianus
atgcaaccttttgatagtgggcacgatgatctggttcatgatgtcgtttatgacttttatggtagacatgtggcaacctgctcttccgatcagcatattaaagttttcaaattggataaggaaacaagcaattgggagctaagtgactcctggagagctcatggcagtagcattgtcgccattgattgggcaagtccagaatacgggcgcattattgcatcagcctcgtatgataaaacagtaaagttatgggaagaagaccctgaccaagaagaatgctcaggtcgtcgttggaacagactgtgtacattgaatgattccaaaggatcgctctacagtgtaaaatttgcacccgcacatttaggtttaaaattagcatgcataggtaacgatggaacgctcagaatttacgatgctttagaaccttctgacttgagatcatggacattaacatcagaaatcaaagtgctatctataccaccagcaaaccatctacagtctgacttttgtctctcttggtgtccttctagattttctcctgaaaagcttgcagtatcttcattggagcaagcgattatttaccaaagaggcaaagatggtaaactgcatattgcagccagacttcccggtcataaaagtttaataagaagtgtaagctgggctccttccattggcagatggtatcaactgattgccacaggttgcaaagatggtaagattcgcattttcaaaatcacagaaaagttattaggtgctatgacttcagaggagtcttctagcaactcaaacctattcgacaacggtactgatgtcgacatggatggacaaataaggccaagttcaaacaacgaagagaagggcgaactacaatcaagcttggaggttgaactattaagtgaacatgatgaccataacggcgaagtctggtctgtgtcttggaacttaacaggtacaatactaagtagcgctggcgacgacgggaaggtgcgtttatggaaagcaacctattcaaatgaatttaagtgtatgtctgtaattactgcccagcaatga

SEQ ID NO: 905 - DNA, 1923 bp, Saccharomyces pastorianus
atgccaccaaaagaagctcctaagaaatggaaggcgccaaaagggccaaaacctaatcaccgcaagaataagaataagcttgagttgggaagagccattaaatatgcccgtcaaaaagaaaactctatcgaatatttacctgatggtgaaatgaggttcactaccgataagcatgaagctaactgggtcaaattaagatctgtgactcaggaatcggctttggatgagtttttaagtacagctgcactagcagataaggatttcacagctgataggcactcaagtgtcaaaatcattagaatggacagtggtgatgattccgcaacgtctcaaggattttctctaactaatgagcaacgtggtaccctaaatgcaaagcagagggcactctccaaagatttaattgttccaagaagacctgcctgggatgaggacatgacaaagcttcaactggatagacaagaaaaggaggcatttttggagtggagaagaaaattagcacatttgcaagaaagcaatgaagatctgctgttaacacctttcgaaagaaatattgaagtttggaagcaattatggagagtggttgaaagatcagatttggttgttcaaattgtggatgctagagatcctttattgtttagatctgtcgatttagaaagatatgtgaaagaatcagatgaaagaaaggaaaatttactgttagtcaataaagccgatttattaacaaaaaaacagcgtatcacttgggccaagtactttatttcaaaaaatatctcgttcacattctattctgcattgagagccaaccaactgttggaattacaaaaggaactgggagatgattaccaagagcaagaaattgaagaagctgatgaagaagaattagatgttgatgaagaaattttggaaaaagttaaaattttgtctattgatcaattggaagaactgtttttatcaaaggcaccaaaagaacctttactgcaacctttgcctggccaatcctctttgattaatattggtttggttggttatccaaatgttggtaaatcttcaacaatcaattcccttgtgggtgccaagaaagtttcagtttcatccacgcctggtaaaaccaagcatttccaaaccatcaaattatctgattcggtcatgctatgtgattgtcctggtcttgtctttccaaattttgcctacaacaaaggtgaacttgtatgtaacggtgttttgccgatcgatcagttacgtgattacatcggcccagcaggtttggtagcagaaagaatacctaagtactacattgaagctatctatggtattcacattcaaaccaaaactaaggatgaaggtgggaatggagaaattccaactgctcaagaactgttagttgcgtacgcaagagcacgtggttacatgactcaaggttacggttcagccgatgaatcgagagcaagtcgttatatattgaaagattacgtcaacgggaaattactgtatatcaatcctccacctcatcttgaagacgatacgccttacaccagagaagaaagtgaagaattcaacaaggaactgtatgtctttgacaggctaccggaaaccagaaaagagcaagtgcaaagtgctgccaaagctaaaggtatcactgttgtggatttagctcgtgatttgaatcaactgacattctctgctcatactggtggtgacattgagaaggaagctaaatctgtcacacatggtggtaagcaagccgcgttatacaatgcggctgaagacttggatagagattttttcaggatgaacaacgttgaaggtagattaagtacgccattccacaaaattcaaaataatacggatggtaagagacacaacaaaaaaaataagagcaaaaatgccaagagcaaggttttcagcattgataacaactaa

SEQ ID NO: 906 - DNA, 1449 bp, Saccharomyces pastorianus
atggctaaaagaacgaacatcgcaaatgggggttcccaggatggccaccgagttaagaaaatgtcgaagactcacgcctctcacatcataaacacccaagaagactacaagcatatgtacttgagtgttcagccgttggatattttttgttggggttctggttctatgtgtgaacttggcttgggcccactcgccaagaacaaggaagttaaaagaccaaggttgaatccatttttgcctcgcgatgaggcaaagatcatttcttttgcagtcggcggtatgcacacattagcactcgacgagaacagcaatgtgtggtcatggggctgcaacgatgtgggcgccttgggtagggacacttctggtgttacggagcaactaaaggacatggatgctgataattcaagtgatgacgaagatggtgatctgaacgagtcagaatccactccagctacaattcctagagagcttttcccgcctttagcaaaaggttacagtattatacaattggcagctacagataacatgagttgtgccttattcagtaatggtgaagtgtatgcatggggtactttccgttgtaatgaaggtatcctagggttctaccaagaaaaaattaaaattcaaaacactccatggaaagtgcctactttttctaagtacgatattgttcaactggctcctggcaaggaccacattcttttcctagacgaagaaggtatggtatttgcttggggtaacggtcagcaaaatcaattaggaagaaaagttatggaaaggtttcgcctaaagactttagatccaagaccgttcggattaagacatgtcaagtacattgcatcgggggaaaatcattgttttgctttgacaaaggataacaagttagtcagttgggggttgaaccaatttggtcagtgcggtgtctcagagaacgtggaagatggtgcacttgttactaaaccactaaaggtagcattgcccgagaatgttgtagtaagaagtattgctgctggtgaacaccattccctggtcttatctcaagacggcgatttgtactcttttggtagattggacatgtttgaaattggtattccaaaaaacgatttacctgaatatacttataaagacgttcacaataaggcccgttccgtgccacttccaacaaaattgaaaggtgttcccaagttcaaaactgttgcagcaggttctcaccattcggttgctgttgcccaaaatggtattgcctattcttgggggttcggcgaaacctacgccgttggattagggccttctgatgaggataccgaaattccaactagaatcaaaaataccgcaactcaggatcataacatcattttggccggatgcggcggtcaattttctgtatctggtggggtaaaactgtctgacgaagaagccgaaaaaagagccgacgaaatggatgactaa

SEQ ID NO: 907 - DNA, 1734 bp, Saccharomyces pastorianus
atgaacctttttgatgttgctgattactatataaacaagatcgtgacgtcccggtcaaaattgagcgtggctaaagtcaacgagcaccaacgaattaaggttttactgctagataacaacaccactcctaccatatccttatgtgctactcaaagtgacttgctaaagcaagaaatatacttagttgataaaatagaaaacgaagagcgtgaggtctcgaggcatttaagatgcttggtctacgttaaacccacagaaggaacgttgcagtgcctcttgcgtgagttacgaaatcctcgctatggtgaatatcaaattttcttcaataatatagtttcgaaatcccaattggaaaggctagcggaatctgatgacatggaggcagtcaccaaggtggaagaaatatttcaggatttttttattttaaatcaggatttattttcgttggatttgcaaccgaaggactttttaagtaacacattggtttggagtgagccagggctgacagaatgtagtaatagtctagtatccgtgcttttgtctctaaaaattaaaccagaaattaggttcgaaggtgccagtaaactgtgtgaaaggttagccaaagaagtgtcttatgaaattggcaagaatgagaggacatttttcgatttcccagtgatggactctactcctattttgctgattttagaccgtaaaactgatcctataactcctttattgcaaccttggacttatcaatcaatgatcaacgagtatataggtgttaagcgaaatattgttgatctatcaaaagtacctaaaatcgataaggatctagaaaaggtcaccttatcctccaaacaagacgctttcttcagagacaccatgtacttaaatttcggggagttgggtgacaaagtaaaacaatacgtgaccacttacaaagataagacacaaacaaatagtcaaataaataccattgaagatatcaaaaacttcattgagaaatatcctgagttcaggaaactgtctggaaatgtggcaaagcatatggctatagttggcgaactagataggcaattaaagataagaaatatatgggaggttagtgaaatagaacaaaacttatcttcacatgatgcgaacgaagaagatttttctgaattgatcaagctacttcaaagtgaaactgtggataagtactacaagctaaagcttgcatgtatttactctctaaataaccatgccaattcagataaaattcgccaactggttgagcttttaacgcaggatttctctccggaagacgtcaattttttccacagattcaaatcgctcttcaaccgtcacgataaaaaggcccaaagtaatcatgacaaagacgatatactaagtgaactggcaaggagatttaacagtaaaatgagctctaaaggtaacacagctgaaaatgtatacatgcaacatatcccggaaatctcatcattgctaacagagctctccaaaaacacactgtccagagatcgttttaaaacggtagatattcaaaatcatgggatgactcaaactcagctcagaaatgatatacctcaggatgtcattttattttttgttggaggtgtaacttatgaggaagcaaggttggttcatgaatttaatgaaacgatgaatagcagaatgagagttgtcttaggtggcacatctatagtgtctactaatcaatatatggactcccttcgggcaatgaaatag

SEQ ID NO: 908 - DNA, 825 bp, Saccharomyces pastorianus
atgaaggagagtaattctgatttgaggaaaccttcggatgttgcggcactatcaattatccttacaggttcggccttaactttgatctatacatataaaaggtatctgactcaatttaaaaggacaaacgatattccacaacgcattttccacaaacgatggctttatggtaaagtcacatccgttggcgacggtgataatttccattttttccacatgcctggcggtataagaggcggatggggttggttacgatccatccctcaaatggtcaagaacgatcctaccgcagaaaaacttattagcggtgacgagaacttgagctttttcaatttgaattggatcatacatagaggatctagtaaaagccaaatacaaaaaactaaaagtcagtttttgaaattaaatgtaccctacaagaatagaaaaaacctaccgacgattcccattagattatgtggagtcgatgctccagaaagagcacatttcggtaacccagcgcagccgtttggcaacgaagcgttaatctggttacaaaaccggattttaggtaaaaaattatgggtgaaacctttgtctatagaccagtataatcgttgtgtggctcgagtgtcgtattgggactggctaggtggttggaaagatttgagcttggaaatggtcaaggatggattagcggttgtctacgaaggtaaggtaaatgcagaatttgacggtagagaagataaatatcgatattatgaatttttggcgaggtctaggaaaaagggactatggatccaaagaaaagttgaaacgcctggtgagtataaaaaacgtatttaa

SEQ ID NO: 909 - DNA, 1683 bp, Saccharomyces pastorianus
atgtcgctggttagcatattggctcccctagtcacttcagaaggtttagattcgaggatcaaaccctcatcgcaaaagggtacttctcccccaaccaaaccatcgctatggaaaaccaccgaattcaaattctactacttggtgtttttagttgcagtgcccttaatgttccgtgctggactgcaggctagttctttagacaatccaaattacactcggtatgaacgtctcttgtcccaaggctggttatttggtagaaaagtggataatagcgattcccaatataggttcttcagagacaattttgtgctgttatcgactttaatgatagctcatacctccataaaacgtattgtgatttattcaaccaatatttcaaaattaagatttgatctaatatttggtttgatttttttagtggctgcacatggtgtcaattcaatgagaatattagcccatatgttgatactgtatacactttctcacatgttgaaaaaccatagaaaaatagccacaattagtatttgggcttacggtatttccactcttttcatcaacgacaatttcagatcctatccattcggcagcgtttgttctcttttgagtccactagataactggtatagggggattattccaagatgggatgtttttttcaatttcactctcttaagagtcttgagttataatatggactttttagaaagatgggagaattttaaaactaagaagagttcaacttacgaatcaaaagaagctaaatcagccattttgcttgacgagcgtgccagattaaccgcagctcacccaattcaagattacagtttgatgaactatataggctatgtcacatacactccacttttcattgctggccccattataacttttaatgattacatttaccagtcaaaacatattctaccatcaatcaatttcaagtttatcttctactatgcagtgagattcgttattgctatcctatctatggaattcatcttgcacttcctttacgtcgtggcaatttcaaaaacaaaagcttgggaaaatgacacgcctttccaaatttccatgatcggtttattcaatttaaatattatttggctaaaacttttaatcccatggagattgtttagactatgggctcttattgatggaatcgatacacctgaaaacatgatcaggtgtgtggataacaactacagtgcattggcgttctggagagcctggcatagaagctacaataaatgggttgtccgttatatttacattcctctcggcggctcaaaaaatagaatcctaacctctttagccgttttttccttcgtggccatatggcatgatattcaattaaaattattattctggggttggttgatcgttctcttccttttgcctgaaatttttgctactcaatttctctctcattattccgacactatctggtacagacacgtttgtgcgattggtggtgttttcaacatatgggtgatgatgatcgccaatctatttgggttttgtttgggctctgatggtactaagaaattgctaagcgatatgttctgtaccgtttcaggttttaaatttgtcattttggcaagtgctagtttatttgttgctgtgcaagtaatgttcgaaattagagaagaagaaaaaaggcacggaatcgtcttgaaatgttga

SEQ ID NO: 910 - DNA, 1152 bp, Saccharomyces pastorianus
atggacgtctcgttcttaaccaaaattgttcagataaatggaactcagttcaagatactacttcagaatggacaaggtgcgtgtgcgctgattgcattggctaacgtcttattgatctcaccggtccatgctcgctatgctctggggctctccaatctggtgagaagcaaagaaacggttacgctaaatgagcttgtgcaaactctagccgatatcggtgttcaaaatcccaacggctccaatgttgatagagaacagttattacagattcttccccagctatatagtgggctgaacattaacccggaattcaatgggtctttcgaagatggaatggaaatgtcaatttttagactgtacaacgtcggtatcgtccatggctggataatagatggagacaatgatcctagcgcttacgaacatgtctccaaatattcctatatgggtgcccaaaaggccttagtgcagtcatatgagattcagaaaaacaatgctcaatttgaaaacgctgaacaaatccaatcagactcaacttacttgaaatcctttttggcgaggtctgccactcaattgactgattacgggttgaatcatctgagagaaattttagtggaaaggtcctatgccgtgctgttcagaaatgatcatttttgcacactgtataagaataatagcgaactatttactttagttaccgacccgacttacagaaaccgcagggacataacttggcaatcgctgaagtctgttaacggatctcaagatgcattttatacgggcaactttattcctacaagtctggaaagaactaatacaacaactacaggacagaatgaatcctacatctccaacccctttagtgatcagcacgcaggtagagcagccagtgatcaagctaatagcggggcaagtgggatgcaacagatcgaagatgacgaggagttggctaggaggttacaagagcaggaagacatgcgggtggcaaacaatatgcagaatggttatgcaaatcgtagtgggaacaatccaagagaaagatttgaaagacccgagaaaccttcaaagaaaagcaagttcctctcccacaacggaaataaagatggtaaagacaggaaaagagacaagttgaagaaaagctgtgtcatcatgtga

SEQ ID NO: 911 - DNA, 1557 bp, Saccharomyces pastorianus
atgacaaaagaagaaatcaaagaaaaaaagagaagagttgtagatgaacaagtaatcgaaaagaagaagagtaagaaacataagaaggacaaaaaggaaaagaaggataaaaagcacaaaaaggacaagaagagtgaggacaagcaagttgaagcaccaaagaaagaagctgagaagaaaatagaatctacccctgcagctactaacgaattttacgttcagagtgaagccttgactaatgttccacaatccgaaattgacgactttttcaaagaaaacgaagttgccattgaagatccattaaagctgaatttgcgtcctttattatcatttgaccatctttccttggactcctctattcaagccgaaatttctaagttcccaaagccaacacctattcaagcagttgcctggccatatttgttgtctggtaaggatgtcgttggtgttgctgaaaccggttctggtaagacatttgcctttggtgtcccagctattagccatttaatgaacgacaaaaataaaagaggtattcaggttctggtcgtttccccaactagagaattggcctctcaaatttacgataatttgatcattctgaccaacaaagttggcttgcaatgttgttgtgtatatggtggtgtcccaaaggacgaacagagaaaccagctgaaaaaatctcaagtagtagttgctacacctggtagattattagatttattacaggaaggttccgttgacctctctcaggtaaactacttggttttagatgaaggtgacaggatgttggagaaaggttttgaagaagatattaagaatatcattagagaaactgatgcgtccaaaagacagactttgatgtttaccgctacttggccaaaggaagtccgtgagttggcctcttctttcatgaaggacccaatcagggtatctattggtaacacagatcaattaactgctaacaagaaaattacacaaatcgttgaagttgtggatccccgtggtaaagaaagaaaattattggaattattgaaaaaatatcattccggttcaaaaaagaatgaaaaagttttgatttttgctctttacaagaaggaagctactcgtgtggaaagaaatctaaaatacaatgggtacaatgttgctgctattcacggtgatttatcccaacagcaaagaacacaagctttgagtgaattcaagagcggtaagtctaatttgttattggctaccgatgttgctgcaagaggtttggatatacccaatgttaagaccgttattaatttaacttttccattgactgtagaagactacgtccatagaatcggtagaaccggtagagctggccaaacaggtactgctcatactttgttcactgaacaagaaaagcatttggctggtggtttagttaacgttttaaacggtgctaatcaacccgttcctgaggacttgataaagttcggtactcacactaaaaagaaagagcacagtgcttatggttcatttttcaaggatgttgatttgaccaaaaaaccaaagaaaactacttttgattag

SEQ ID NO: 912 - DNA, 2085 bp, Saccharomyces pastorianus
atggagggattcaacccgggccacatagaacacctgtctcccattgactcgactggcaacaattcagcgtccttcatatatccgctgcccaaaactgccggcgagtatgtaaacaatcacaacgaaaatcacacagatgtaaatccatcccctgtgccgtctccgatggtgtctctaaatttcaagaacccttcctccccaaatggcgatttccatattcatacatctgcatcccctacggaagctgcagagcatggcaatcagccagaaaaactgaatcagaataatttggttcatctagatccagtgcccaattttaaagataaagccgacatcaagccttggttacaaaaaatcttctatcctcaagggatagagcttgtgatagaaagatcggatacctttaaagttgtcttcaactgtaaagctgctaaaaggggaagaaacacaaggaggaaaggaaaagataagtctaacgaacaggaccaagaagaggagaaattgcaggtcaatgacgatgaattcgaaaatacaagcagctcgaactttatagtatcaagtaacggggctagatcgtcgcccgaactaacatcttccgggaagccaaagaagaaaaggtgtgtctcaaggttcaataactgccccttcagggtacgagccacttattcattgaagaggaaaagatggagtattgtagtaatgaacagcaaccattcgcatccgttgaagttcaaccctgattctgaagagtacaaaaaattcaaagaaaaattaaggaaagacaatgatctggatgcgatcaagaaatttgacgaactagagtatagaacgttggccaacttacccattccgacagctacaataccttttgactgtggtttaacgaatgaaattcaaagttttaacgttgtcttgcctactaacagcaaatcgtcttcgtctgcatcttcttcaagtgtatcatcagtgtctctcgatcctttgagtgcatcgaaaagaccgtgcttaccccctgtaaataacactggtaatgtcaatactaacaatataaggaaaccaagaagccaatccaagaataaggacacactattgaaaagaacgaccatgcagaacttcctcactacgaaatcaagactacataagacgggcaccccaacatcttcacagcattcatctacagcattttcgggatatattgacgatccgttcaatttaaacgaaatattaccattaccgacttctgattttaagccgaatactgtcaccaatttaaacgagatcgatttcacaaatattttcaccaaaccgtcacacccccacagtgggcccactcatccaagacaagtcttcgaccaattggatgattgttcctcgatactcttctctccattgactacaaacacaaataatgattttgaagtagaatcggatgatttcgttcattctccatatttgaattcggaaggcgatttcagccaaatttttaataatgccccccctgctcatcatattccagatcacacgcgtctggaaagtcaagatagtatcgatagatttgccaatagttcgcaagaacagaacgagtacatcttgcagtatttgacacattttgacgccgcgaatcatgccgccaatacttcaaacgatatttcgcattcattaaacatccaccataacattactgacctgagcaactcacttctcaaacaggaaactctgatagataacccttcgaccagaattttggacgaattaaagttcttgcaaaatagcccacacggtgctcaccatcctgtagattttcagcatgaaaactataatcatctaatgtcgaatcaacctcaaatacgacaccagcaacatgaactgcagctgcagctgccccagcaacagcagcaacagcggcagcaggaatatccccatagtcatgaccaccacgatcatcaccacaaccagcatcaagaagtacgaaaagaggtacaaacacacgaaacgcttgaaatgatgggaaatacactattggaggaattcaatgacattaagatggttaacggcgaattgaaatacgtgaaacgagaagattaa

SEQ ID NO: 913 - DNA, 369 bp, Saccharomyces pastorianus
atgactacatttagattttgccgtgactgcaacaatatgttgtaccctcgtgaagacaaggagaacaataggctgttattcgaatgcagaacatgttcttatgtggaagaagcgggcagcccattggtgtacaggcatgaactgatcacgaacattggtgagactgcgggcgtagtgcaagacattggttctgatccgacgcttccgagatctgatagggaatgtcctaaatgccactctcgtgaaaacgtgtttttccaatcgcagcaaagaagaaaggacacttctatggttttattctttgtgtgtttgtcttgctcgcatatatttacttctgatcaaaagaatacaagaacgcaattttcgtga

SEQ ID NO: 914 - DNA, 612 bp, Saccharomyces pastorianus
atgtccctaagtatactagcgaagagatcctcctctatctggatgaaaacgcgcattacaccagcgttaaccaccccaatcaccatcacaacccgttttaactccacgactacaactgcaccattgtctaaggatgacgctaaggcaaccgtcccagctacagaggctaaacctgtcgaccccaaaatttccaaaattgttcaggatatctcacaattgactcttttggaaacctctagtttgattaccgaattgaagactgcattaaacatcccagagatgaccatgcctatgggcggatttatggcaggaggtgccggtgtcggtgctggtaacgcagcaggctcagctggtgaagcaggtgccggtgctgaagaagaagccaagccggaggccaaaactgtgttcactgtgaagttggattctttcgacgcaaagaccaaggctaaagtcatcaaagaagtcaaaggtttactaggtctctcactagttgaagctaagaaattcgtcgaggctgctccaaaggtcttgaaagaaaacatagccaaggacgatgctgaaaagatcaagaaaaccttggaaggtttaggagctaaggtcagtttggaatga

SEQ ID NO: 915 - DNA, 1155 bp, Saccharomyces pastorianus
atgtctacccctgtatccttttttggtcagcaggtcttaaaccgagtttccttcttaagatgctcaaaggaattcgttaagaaatcgttaaaccacgactccaccattttcatcccatttattgagggggaagcgctcatatcacctgaaaatggtaatttggtacagttatcttactctacgaagtcttaccagaatattctgtctactgtaattcctgcatataccactcttttgaactcaactcggtcaagaagtgatgagtcaggtatcaatttgacatttttaggtctgctagaagagacagattctacttttaattttgaatggtccaatatcgcctataaaggaacaccttactttggattagatatccgtgttacagacaacacattatttaagaaggcagatttcgagtcaatcttttccttcccgcagatgaccagagaccacatctttgagcaaacaaatgctgatgcctcactatattcacaaggaagaatgtacctagattggctagccaagtacaagttttgccccggttgtggatctaaactgtttccagtggacgcaggcaccaagcttcaatgttccaacgaaaacaaaagcctacactgcaatgtcagagatgcgcgtgtcaataacgtatgtttcccaagaacagatccaacagttattatagccatgaccaactcggactactctaaatgttgtctcgcaagatctaagaaaagatatggagattttgtgttgtattccacaattgcaggatttatggagccttctgagaccattgaggaagcctgtgtcagagaaatatgggaagaaacaggcatatcatgcaaaaatgtggacatagtccgctcacagccttggccctacccttgtagcttgatgatcggctgtctgggtattgtcgaattcaacttccacaatgaggtcatcaatctaaatcatgacgatgaattgttggatgcccagtggtttgagacaacagaaatcattcaagctctggatgattatactggtgggatccgcgttccattcaaaaatggcaccaatttgcccggaagcaccactattgcccaccaattgatcaagcaagtctgcgagaactataaaagactccgcacggccgcagcaagccatttgtag

SEQ ID NO: 916 - DNA, 744 bp, Saccharomyces pastorianus
atgagcgagcaaagtcaactagacgactctaccatagacaagctaattccacaaattttcaatgagatgagatctaatcttaacaacactactaataaatcttccaaaggaacgcaaaataatacaaatgataacatgttggccacgaacacttttacaaggccatataactcggtcacgacacagtccttactcaaggaatccgaatcgcttgataaaataacggcaatgatacaaaatgttactggtgcgttaaaaaatagcttacctgtatacgtcgatcaagtacacgacgtttgtaagtcaacgaattctatcctagattcgtggatcaacatacattctcaagcaggctacatccacaagttgatgactgaccaaacgtatttgaagataatcaatgaccggctaaacaatgagaagacaaacacaaatgacgaagaagacagtacgttacacaacatgatcgcaataaagaagagggaggttttgagtttaaaacaaaaattagaaaacaagaaaagagagaaagagaatctaccttccaaatcaacgaatcaaggatcgaatccaaggtatgccagccaacctggaagaaggccagtgtctgccaatggaaatgggaataacagtagggcgaaaaggccacacgttcccgcttcaaagaggcccagcgggataccaagggttaccagccggtggacaaagcccaccgctagtagttcgagaaagatgtttcgttag

SEQ ID NO: 917 - DNA, 1476 bp, Saccharomyces pastorianus
atgtccaggtatcaggttaattgcttgaggtatagacactttcttaggacttctaatatttcgcaaatccctgactttacgaaatactgtattggacccgtaaatgaggatttagctccttatattatggagaccatgaaggcatatccttcaaactccaattatattaatccacaacattactaccataataggacggtccttgtggaaaactacttaaagcgacacccaaatccggtgtcattgacccaattagcgcaatactatgacgattctaccaagttgaccagaactaagatcatcaattctgggaagtttgttaaagaggaacttgttatcagaattgctcacaagctgaatcagttacagcaattgccattcaatgtcgtaaacaacttccatttcgttcaagtttacgagtcatattacaacatatttgaaagttttagaaaataccccgcaataagaactttagatgatgcgtctcaattcgctaactttatcaagaatatgttagagggctttaacaccctaaatctgccgcatttaattatgggggcgctggaatgtacaattttagatctgtatcctcgtgagaaaatggaccaattactatccgatttgctaagggcccgaatatcaagaagactgattgtagaagaacacgtcagtatcacagctaactacactagtggcaaaaaagagaataccctggtattgggtgatatctttcaagaatgtagcgctaagaagtatttattagaagccagtgaagaatctcaaaagttcattcaagatatgtattttaaagacattcccatgcccgaatttgtcattgaaggcgacactgatttgagcttttactttttgcccacacatctaaagtatttgctaggggaaatattgagaaatacttacgaagcaactatgaagcattatattcgtaagggactggacaaaccagaaccgattatagtcactatagtaagtaatgacgaatcctatttattcaggatctcggataaagctggtggtatactgcatgatgatgaaaatctatggtcgtttggcaaatctaaagaaagagctcaagaatctttgaacaattttcacaaattgcctggcttgcaaacagtatccatttatgatcgagttcattctagtgctaaatgtaagtcgaatcttgaggcatcaccgtcagtgacattaaggccatacatgcatacgtcgttagaaccaatgagttatcctagtatcatcaatggacacataaaatatgaaacccccttaattgaactattgaaacgatctttcagatacaagctgggaattggtttggctatgtgtagagtgtatgccgagtattggaacggtgacctgtccttgcattcgatgcctggatatgggaccgatgcagttttgaagctggggaacttaatgaaacacacaaagaaactacaactagataaagtatag

SEQ ID NO: 918 - DNA, 519 bp, Saccharomyces pastorianus
atgtcgacaccagctagaagaagattaatgagagatttcaaacgtatgaaggaagatgccccaccaggagtatctgcttcgccactacctgataatgtcatggtatggaatgctatgatcattggcccagcagacactccgtacgaagacggtacatttcgattgcttctagagtttgatgaagaatacccaaataagccgccacatgttaaatttttaagtgagatgttccatccaaacgtctatgcgaacggtgaaatttgtttagatattttgcaaaacagatggaccccgacatatgatgtagcatctatattaacatccattcaaagtttatttaacgatccaaatccggcttcacccgcaaacgtagaagccgcaacattattcaaagatcataaatcacaatacgtcaaacgagttaaagagacggtagaaaaatcttgggaagatgatatggatgatatggacgacgacgacgacgacgatgaagatgacgacgacgaagaggctgactga

SEQ ID NO: 919 - DNA, 1587 bp, Saccharomyces pastorianus
atgcctcagaataccagacacacgtccattgtagaaatgctttctaccccacctcaattaccgaattccgcggactcgcccattctgtacgagcagacagacaggaatagcgtcggaaacaaaagcgacacagaatctctgcacaagtccatttcgaactcgtcttcgtcgtcttcgatctccacgctggataacatggaatactcaaattccaacaacactcactccttgtctactttaaactcacagaacctgctgtctgtgcacaagcaagaatggcaacacaccctgctttcggacttggtggagcagaacaaactgattttcatcaaaggttccatctctgtagaggaggcctttaatacgttggtcaaacaccagctgacgtctttgcccgtggaaaacttcccgggtgacatgaattgtttgacttttgactacaacgatcttaacgcgtatttgcttctcgtgctgaacagaatcaaagtgagcaatgacaggatcacgatggactgccagaacggtaaatccgtgcctgtgggagagatagtgaagttgactccgaagaatccattctacaaattgcccgaaacggaaaatctgtccacggtgataggcatcttgggtgcaggtgtgcaccgtgtcgccatcacgaacgtggaaatgacgcaggtcaaaggtattctttctcaacgtcgtctgatcaaatatctgtgggataacgcaaggtctttccccacattgaagccgctgttagactcttctttagaggacttgaacattggtgtgttaaacgcatcccgtgataagcctacatccaagcaatcccgtgttatatccattccaggcgatgagcatctgataatggctttgcataagatgtacgtcgaaaggatctcttccattgctgtggtggacgctcagggcaacctgattggtaatatctccgtaacggatgttaaacacgtcacgagaacttcccaatatccgctattgcataatacttgtcgtcattttgtctcagtcattctgaatttgagaggtctagagaccggtaaggattccttccccatcttccatgtgtatccaacaagttccttggcaaggacgttcgcaaaattagtggccaccaaatctcacagattatggatcgtacagccgaacgacaaccaatcttctgcatcttccgaaaaatcatcctctccgtcaccaaacactgcacctgtaacaactttcccatcgcttgcatcttccttccattcaaatccacactcgtcaagaatggctagctctccagttctaaaatcttcggacgcaacaaacaacaaaataaatgtaaatataaatttgaccggttctcccccacctcaaccacaatcatccatgtcgccagctcagcaacagcaaacttcaaacagttcttcggcatctccaactccagcccatttcgaaaaggagtatagaacaggtaaactgataggtgtcgtgtctttaaccgacatattaagtgtgttggcgagaaaacaaacccatcacaaggaaatagatccgcaaatggccagaaaacaaagaggccatgtaggttga

SEQ ID NO: 920 - DNA, 1518 bp, Saccharomyces pastorianus
atgcccacttctggaactactctcgagttgattgacgatcaatttccaaaggatgactccgtcagtggcggtcttgtcgatgaagtcgatttaacccaagccaacatcctggctactggtttgaacaaaaaggccccaagaatcgtcaacgggttcggttccttcatgggttccaaggaaatggtttcagtggaattcgacaagaagtccaacctagatcgtttgttggaaaaagataaccaagaaaaattagaagccaagggcaaaactcatatatccgaacaaccatggaccctgaacaactggcaccaacatttgaactggctgaacatggttcttgtttgtggtatgcctattattggttggtacctggccttctccggtaaggtccctctgcatttgaacgttctggtgttctccgtgttatactacgtcgttggtggtgtttccatcacagccggttaccatagattatggtctcacagatcttactccgctcactggccattaagattattctacgccgtcttcggttgcgcttccgtcgaaggttccgccaaatggtggggtcactctcacagaatccatcatcgttacaccgatactttgagagatccttatgacgctcgtagaggtctatggtactcccatatgggttggatgcttttgaagccaaatccaaagtacaaggccagagctgatatcactgatatgactgatgactggaccgttagattccaacacagacactacatcttattgatgctgcttaccgcttttgtcatcccaactgttgtatgtggttacttctttaacgactacttgggtggtttggtctacgccggtttcatccgtgtctttgtcattcaacaagccactttctgcatcaactccatggctcattacatcggtacccaaccattcgacgacagaagaactcctcgtgacaactgggttactgccattgttacattcggtgaaggttaccataacttccatcacgaattccctaccgattacagaaacgctattaagtggtaccaatacgacccaactaaggttattatctatctaacctctttggtcggtctagcatatgatttgaaaaaattctcccaaaacgccattgaagaagctctgattcaacaagaacaaaagaagattaaccaaaagaaggccaaaatcaactggggcccagttttgaccgatttgccagtgtgggacaaacaaaccttcttggcaaaaactaaagacaacaagggtttggtcatcatctccgggattgttcacgacgtatctggttatatctctgaacatccaggtggtgaaactttaatcaagactgcattaggcaaagacgccacaaaggccttcagtggtggtgtctaccgccactcaaacgctgctcaaaatgtcttggctgacatgagagtagctgtcatcaaggaaagtaagaactctgctattagaatggctagtaagagaggtgaagtttacgaaactggtaagtttttttaa

SEQ ID NO: 921 - DNA, 417 bp, Saccharomyces pastorianus
atgagtgcttggttatttatccttgctgttattgttaactgtatcaacttgttcggccaagtgcactttacaattttatatgctgatttagaagccgattatatcaacccaattgaattatgctctaaagtcaacaagcttattacacctgaagccgcattacatggtgccctatctttgctgttcttattgaacggttactggttcgtatttttaataaatttgccagttttagcctacaatttgaacaagatttacaacaaggttcaacttttggacgctacagaaatattcagaactttgggtaagcacaagagagaaagtttcctaaagttagggtttcacttattgatgttctttttctacttatacagaatgattatggctttgattgctgaaagtggggatgacttctaa

SEQ ID NO: 922 - DNA, 2871 bp, Saccharomyces pastorianus
atgaccgaacaaacagaccaattgccgccacactcacagccaaccaatggctacaagaaatacccgtcacacgataacgaacactccgggcccaacagtcaaccgaataaccactataacgaaaaccaatatggggccaaagactctcataataacaggcaataccaatcgaaaggtggtagatatggatctaacaaatacagcaatcgtaacaatagccaagggaactctcaatactacaataatagatacaacaatagctacagactgaataataacgattacaatgcagccatgatgccaaatatgcagtggcccgccaattactatgcccctcagatgtactatatcccccaacaaatggttcctgttacttccccaccatacacgcaccagccgcttaacactaacacaaccgaatctccttctgcgcctaaaactacaaagatagaaataactacaaagactggggaacgtttaaatctgaaaaagttccacgaagaaaagaaagcttccaagaatgacgagagcaacgatgagacagaacggaagtcaaaatccagtactccttttgaaaaggaggcaactcctgctgtggttgctaatcagccaactaaagagacgtcacctgaagctgctattgaaaaatccgtttcagaagcagaaaacactaagaggttatttttggaacaagtgaggatgcggaaagctgccatggaaagaaagaagaacggtttggcgtctggaaatgaacaaaaattggacaatgtgaattcctccaaaattgacacgaccaaacccaatccgttcctccaacccgaaaccgtcaaagaagaaccaaaaccagtcgaggaagaaccaaagcaaattgtggaagaaccaaaaccagttgaggaagaaccaaaaccagttgaggaagaaccaaaaccagtcgaggcagaaccaaaaccagttgaagaagctgatgaacctgttcttgatgtaaaaacggttgcaagtgaaattgcgccacaacaagataggactggaagtacaaccaaaacagtgacatttaatgaaccagaaagtgagagcagttctcaagataccactgaacttgtggaggagaacaaagatgatgtttctgatgcgaatgacaatgaaactgtaaataaaactgatacgattgacgaaggcaatgtgaatcctgaaattgcgaaatcagaaaatgcagacattccagcggaagaaacaacatcttttatatctggtattgaaatccctacagtgtcacaattacttgaaactttgaagaatgccgagccgatttccaatatatatggcttttcctatccagcggacatcgaaaagccagatatcaagtataaaaagccaagcgttaaatacacctatggtcccactttcttacttcagttcaaggatagattgaaagttaaggctgatcctgcctgggttgaagccgtttcctccaaaattgttattcctcctcatatggccagaaatagaccaaaagatggcggaagatttggaggtgattttagaagtccatctacgcgtaacttggaccctagctctaattcaaggatgtcttcaaaaagaagatccaaaaggatgggtgacgatagaaaatctaatagaggatatacatctagaagggatcgtgaaaaagcctatgaaagggcagaagagcaagctccaaaagaaaatgtcgttccgttggtaccaagtgctaatagatgggtgcctaagtcgagagttaagaaaaccgagaagaagttggctcctgatggtaagaccgagttactagataacgaagaagtggaaaggaagatgaagtctttactaaacaagctaaccttagaaatgtttgattcgatctctactgaaattttggacattgcaaatcaatcgaaatgggaagatgatggtgaaacactaaaaatagtcatcgagcaaattttccataaagcctgtgatgaacctcattggtcttcaatgtacgcccaattatgtggtaaagtggtcaaagatcttgacgttagcatcgaggataaagaaaacgaagggaagaacggtccaaagcttgtcttgcattatctggttgcaagatgccatgaagaatttgaaaagggttgggccgataagttgcctgcaggagaagatggcaatccgttagaacctgaactgatgtcagacgactattatattgcggcagctgctaaaagaagaggcctgggtttggtccgtttcatcgggtacttatattgtttgaatttattgaccggaaaaatgatgtttgaatgtttccgtagattaatgaaagatttgaacaacgatccatctgaagagactttggaatctgtcattgagctactggatactgtgggtaaacaatttgaaaatgacaagtttgtcacgcctcaagccactcttgaaggttcagtacttctcgacaatctatttttgttgctacaacatattattaaggaaggttctgtgtcgaatagaataaagtttaagttgatcgatgtaaaggaattgagagaaatcaaacattggaacagtgcgaagaaagatgctggaccgaagacaattcaacaaattcatcaagaagacgaacaattacgccaaatgaaaaacagccaaagaacaaattcaagatttaacaaccatcacaatcaatccaacagtaatcgattctcttccaacagaagaaatatgcaaaatgcaccaagagataactttgcctcttcaaaaacaacctctttcagaaataaccaaaaacagtctcgtaaagcagaagaatcttcccaagctccaaaggccaatatgtttgacgcattgatgaacaacgatggggacagtgagtag

SEQ ID NO: 923 - DNA, 930 bp, Saccharomyces pastorianus
atgagcagacaaggcggtatgaatgcgggagtacagaacaacccaccttcccgggtggtgtacctggggtccataccatatgatcaaacggaggagcagatccttgacttatgcagtaatgtagggcctgtgatcaacctgaagatgatgtttgaccctcagaccggcagatcgaaaggttatgcatttatcgagttcagagatttggaatctagtgccagtgcagcacgtaatttaaatggataccaattaggctcaaggtttttgaaatgcggttactccagcaatagtgacatatcgggtgtttcgcagcagcagcagccacaacagtataacggcagcggtgggaacaacggcagcaacaataacaacaacaataacaacaacaacaacaacaacggcggaaatagcaataataattacagtaacgattttcagaacagcggaaatgccaatttcctgaatctgaaatttcctgaattgccctcaggcatcgacgttaacataaacatgaccactccggcaatgatgatatccagtgaactagccaagaggccgaaagaagttcagttgaagtttctacaaacgttccaagagtggacgagaactcatcccgacgatgccgtttcgttgttagagctgtgcccgcaattgagttttgccactgcggagctgctgctaaccaatggcatatgcaaagtggacgacttgattcccttagcgtccaagccgcaggaggaggcgtcatccacgaacaacagcagcgttaacgaagtgctggatccggcggtgctcagcaagcagaaggacctcctaaagcaagtgctacaattgaacgacagccaaatcgctattctgcccgatgacgaaaggatggccatatgggacctgaaacaaaaggcattgaggggagaatttggtgcattttga

SEQ ID NO: 924 - DNA, 933 bp, Saccharomyces pastorianus
atggatagtaaggaggtgttggtgcacgttaagaacctagaaaagaacaagactaatgatgccactgttctggagatcctgcgtgtcctggataaagaattcgtccccactgaaaaactattgagagaaacaaaggttggtgtggaagtcaacaagtttaagaagtccagtaatgtggagatcagcaagctcgtgaaaaaaatgatcagctcttggaaagatgccatcaacaagaataagcgttccagacaaccacagcaacaacaccatcaagagcattcgtcagttagtatggagaataagacgcctgcaaatggatctatgaacgggtcagaacaacctgcctcttcccaaccagacgccaccaagcaagaaaaatacgtcagcacaaagccaagaaatagtaaaaatgatggtgtggatacagctttataccaccataaattacgtgatcaagtattaaaggccctttacgatgtattggccagagatagtgagcatcctcctcaatcaattttacacactgcaaaggcaatagaaaatgaaatgaatagagtcaacaactgcgataccagtgaagccgcctataagggcagataccgtataatttattcaaacatcatatcgaaaaataatccagatttgaaacacaaaattgcaaacggtgatatagcgcccgagtttttagctacatgcgatgccaaggatttggcgccagcacctttgaagcaaaagatagaagaaatttctaaacgaaacttatttaacgcacaaggtgccactatagaaaggtcagttactgatagatttacatgtggtaaatgtaaagaaaagaaggtgtcctactaccaattgcaaacaagatccgcggatgaaccattaaccactttctgtacttgtgaagcatgtggtaacagatggaagttttcttag

SEQ ID NO: 925 - DNA, 1029 bp, Saccharomyces pastorianus
atgcacacagcagaatttttagacactgaaccaacagaaatctcatccgttctagcaggaggttacaatcacccactgttgagacagtggcaaagtgagcgtcaactgaccaagggcatgttgattttcccactattcatctctgataatccagatgactgctcggagattgactctttgcccaatattaagagaatcggtgtcaatagactaaatgactacttggggccattagtgaagaagggtttacggtccgtaatcttgtttggtgtgcctctgagccatggtactaaagatccagtgggcactgcagctgacgatccagaggggccagtcatccaaggtattaaatttatttgtgaaaacttcccagacttgtacattatttgcgatgtatgtctttgtgaatacacttcccatggtcattgtggggttttgtacgatgacggctccataaatagagaacgcagtgtctccagactggctgctgtagccgttaactatgctaaagctggtgcacattgtgtggcgccaagcgatatgatcgatggcagaataagagatatcaagagaggtttgattaacgccggtttggcccataagacctttgttatgtcttacgctgctaagttcagtggtaacttatacggacctttccgtgatgctgcttgttctgctccttctagtggtgataggaaatgttaccaattacctcctgctggccgcggtctagcacgtagagctttggaaagggatatgaacgaaggtgctgatggtattattgtcaaaccttccacattctatctggatatcatgagagatgcaagtgaaatctgtaaggacctaccaatctgtgcctaccacgtctcaggcgaatacgcaatgctgcatgctgctgccgaaaagggcgttgttgatttaaaaacaatcgctttcgaatctcatcaaggtttcttaagagcaggtgccagattaatcattacctatctggctcctgaattccttgattggttagacgaggaaaactaa

SEQ ID NO: 926 - DNA, 651 bp, Saccharomyces pastorianus
atgaaaactttaattgttgtggatatgcaaaacgacttcgtctcgcctttgggttcgttgaccgtccccaaaggtgaggaaatagtcgatccaatttccaagttaatgcaggatgctgatagagactggcacagaattgtggtgaccagagactggcaccccgcaagacacgtatcgttcgccaaaaatcataaagacaaagagcctttctcaacctacacctaccgttctccaagaccaggtgatgactccacccaggaaggtatcttgtggcccgtgcactgtgtgaaaaacacttggggcagccaattggtcgaccatataatggatcaagtgctcaccaagcacatgaagattgtcgacaaggggttcttgaccgaccgtgaatactactccgccttcaatgatatctggaacttccacaagaccgatatgaacaagtacttggaaaagcaccacacagacgaggtctacatcgtcggtgtttccttggagtactgtgtcaaggctaccgccatctccgccgcagagctgggctacaagaccactgttctgctggactacacaagacctatcagcgaggatccagaggtcgtcaagaaggccatagaagaattgaaggctcataatgtcaacgtcgtggacaaataa

SEQ ID NO: 927 - DNA, 2619 bp, Saccharomyces pastorianus
atgcagaagtgtgctagccaggcaccattgacgactacgccgactttccgggtctctcaagacaccattcatgccctttcgcaggctattttaaaggcgttccagaaattggcttccattgacagcaatcaggaaatcaaccctgccgatatagcgttcaaactgataaactcgttcaagtatttgccggtttcggctgctggtgcagacgcgtttgacacagaactagaaaaactggacatattttcgccccttctacaagcagccattaccgctggcaataatggcgtcattatatgggaccttataacggtattgtttgcatacatttcgatccataggcaattccatcctttgatcctgcacaacctggacgtgtggaacgaatttatagtagatcataataacgaagttgcgagcacgagccaggagaggaacccgataaagttcggcgtgttgtcgcttctttccatagtacagaatttcgatgagattaccccaaacttgttcgagtttttcaaattgagcttaaaacctactttacttgagatttgggtaccccagtggcaaaactataatccgtcaacaacgaaattaatcaacggtgatgaaaagatttctaattggataacaaaagattatcatatggacttcattatcaccacttcattatcatcgtcatcatctttgaaagccttaccgtctcattattttgtctataagatttcgaaaagaatttctcatttccccaatttgattgatccgaaactgtatcaacttgcaattgcagtaataatggaaaatggaatctcagatatcgaaaacaacaataaccacagcgctaattacaacgatatacccttttatttccaaatcttaatggaagttatcgaccaccctgagttgaactatctacaagagaaccgtttgattttgttacttgacattgcattaaatcatttaatgttagtacccactcattgtctgcattcaagctttggaaacttgggctccactcaaagtttatcttccactttaaatattattcaattccttttatcgaaattcttaatcaacacgggcaatattacacaattaatcaataaaaacgtcaccaacaatagtaacaacaacaacaacaataagaaaaaagactggttccaatcccaacaaacgaattatcaaattccattttggtttgaagattccattttaccaccaatcccaccaatttcaaaatcattatttacttttgacaaagatttgagccacgagtcggattcaattatgatcgtgagggatttgttacgatgtttgaacttaacaatccttttaatttctaagcttttaagggactataacgatttgaatattaatgcattaactcaatcgccagaccatagcaacaatatcagtgatggaaacaaccatataatgatagaacagtacatgcaactctacctcattccactattcacttcactattattggctcaacagttaaacgatcaagaacaagaacaagaggataaactagaggaacaggaagacgaaaatcttattggatcatcctcagtcagacacttgtgttcacaactcatttttttcagttctttaaaattgtgcgaaaatttgatcattaaggaaaaaaatttggccctataccacctaatcaagtttatcactaaaatttctctagatgacctggtattacaaaagatctccatcaatctactaaatcatctgtttttccatcaaatcaatgatgggaggaaccatgacaatttgaaccaaaaattatgtctaaaaaatcaactctctttacaagctttgaaagactatatcacactatggaatgatggttcccatgcttataattcattctttaagaaccttttctatgaagatcagcctgagatagaaactaaaaaattaacaatgtctgacctcataggatttttctccgatgatgagcaaattgtattatctacgcccccaaccacggtgacatcagtctccaccaatgaacttcctatatcattacaaccaattccacagaaaaatatcgaggctttcactccatcatcaaaatacgatgcttattcttccaactcctttgtaccgtcctcatcgaataatggtaatacgaatactaataaacagcaacagcagccacaaaatacaacaccatcttcctctaatagatacttgttcaacaaaagtagccttatctcacaagaacatagtagcggtaacaacgatagcagtactcaagtatctggatctatgaatgacagttattctctagacaattcattcagtaccacaaacaccaatatgacgaggcaggcaactacgttaactagagccactgatgccatgacgactgcgccttcaacaccaacttcatacaataacagtaatagtaacaacaataacaatctatggattgaatcgccaatggcaaatttcaaaagctctatgatcagcaaaaactccaacaagaataaaatggtgaacactggtaagaattacattctagggggacacaacaaagttaaaaacaatagcagggctcaatcgatacatatagatgactttgaaaacaataacgattaa

SEQ ID NO: 928 - DNA, 1536 bp, Saccharomyces pastorianus
atgcaaagtccatatccagtgccgcaggtatctaacgctgacgatggatctttgttgagggacaaccagagcaagtccaagacgactgtgaaatcagaggcgcccagaccgcacgcttgccccatatgtcaaagagcgttccataggctggaacaccagacaagacacatgaggattcacactggtgagaagccccacgcctgtgacttccccggatgtgtgaaaagattcagcagaagcgatgaactaacaaggcacagaagaatccataccaactctcatcctcggggtaaaagaggcaggaagaagaaggtagtcggctcgccaacaagtagtgccagttccagtgccaccagtatacctgatttgaatacggcaaacttcgctccattactgccaaaccagcagcaacagctatccccctctggtcctatagcgattgctccgaaggagcatccgagtcgatcttccacccgaaagagcagaagaacgaaattcgaaattggtgaaattggtggtggtggtggtaatgacgcgtctgtgactacttctcccaacccgctagctaagatacccgtatcagtaaagcctccccctacgttgacattgaacaacatgaactgtcatacgacatccgctccctctacctcttcctcgttgaatactagtcatagtggcagtagattgaagttgaatgcgttgtcctctttacaaatgatgactcccatcgccaacagttcccctagaaccgtattcatagatacccctgagcagaaacagcagcagcagcaacagcagcaacagcagcaaaattcgcagtcacaacgttattcaaacactgttatactaccaaggccgcgatccttaacggatttccagggactgaacaatgggagcacaaacagtaatggggggtacagagcccaaaccagccaaagctccatacagttgaagaggccaaactcagtattgagtctgaacgacttattgattgaccaaagaaattcaaatgaatccgactccgatttcaccaccggcggagaagatgaagacgatggtctaaaggatccatccaactccagcatcgacaatctcgaccaagattactctcaagaacaatcaaggaaaaagtccaaaacctccacacccacgacaatgctgagtaggtcggcaagtggtacgaatctgcatactttggaatacgtaatgaaccagaaccattcccattctgaatcttcgtcgtccgatttccagagagagttgagcagcagattactgaacgttcaacagcagcagcaagagcagcattcattgttacaattgcaaaactcgtcgttgtccagtcaaaatcaaattgtaacctccaataactctttaagtactacacctctattattatcgccaaggatgaacatgattaataccgccgtatcaatccagcagacgcccaaatcgctctcagattcacaaactcaagaaccggaaagattaccaccgctaaggagtttgccattacctttcccacacacggactga

SEQ ID NO: 929 - DNA, 264 bp, Saccharomyces pastorianus
atgcaattctcgcagtatttgtcgttaatttccctgttggttccagctttagcacaggatgtggcggtttcatgcgaacaaattccctctgctagcttagagtcgacgccatattctgtgtcaaccactgctattcttgccaacgggaaagcaatgcagggtgtattcgaatactacagatcgataacttatgtcagtagttgcgggtctgtggccactacaacaaagaaaaacagccctataaatacgcagtatgtcttttga

SEQ ID NO: 930 - DNA, 468 bp, Saccharomyces pastorianus
atgaaggttgaaatcgattccttttcaggtaacagaatctacccaggtagaggtaccttgtttgtccgtggtgactccaagatcttcagattccaaaactccaaatctgcttctttgttcaagcaaagaaagaacccaagaagaatcgcttggactgtcttgttcagaaagcaccacaagaaaggtatcactgaagaagttgctaagaagagatctagaaagaccgtcaaggcccaaagaccaatcaccggtgcttctttggacttgatcaaggaaagaagagctttgaagccagaagttagaaaggctaacagagacgaaaaattgaaggctgacaaggaaaagaagaaggctgacaaggctgccagaaaggctgaaaaggccaagtctgttggtactcaaggttccaagttctccaagcaacaagctaagggtgctttccaaaaggttgctgctacttctcgttaa

SEQ ID NO: 931 - DNA, 363 bp, Saccharomyces pastorianus
atggtcaatgaaaaagtagaaaaaccaaaggctgcaaaaggtactttagttagtgggaaagtctggaaggtggaaaaggcgccattgagggtcaaaagtagtgttgttaagaataagacgttgacatcatgggagcttaaaaaacaaaaaagactggaggataaacagttcaaagaaaggttaacggctttaaaggatgaaaaagaagaagcacgtcaaactaagataaccactttaagggaaagaagagaaaagaaggcagaaaatgaaagatacgagcgtttatctgctaagatgcacgctaagaaggttgagagattaagaagaagagaaaagagaaacaaggcgttgaaagaacgttaa

SEQ ID NO: 932 - DNA, 708 bp, Saccharomyces pastorianus
atgcactgggcagcagcggtggcggtactctttgttgtggttacgaagtttctacaatacacagccaaatatcacgataaatggatctctcaaatggcaccagggactgaattgtccaagaagtatttagtcaagatgaaagagcgtcatgaattaaaagagttcaacaattccatttctgctcaggataactatgctaaatggaccaagaataatagaaaattagattcattagacaaggaaataaatgacttcaaaaatgacatacaatcacaaaacaaggctttccaaggccatctccacaagttgagactattgacaataacggtgccattctttgtattcaagattgtgtacggtaaggtccccgtttacaagttgagctcttcgacgagcaccttattccctacctttgtcacaggtgtttggtctcaaggctggttgtatgtcatattacacccactaagaaccatctctcaaaaatggcatatcatggaaaacaggtttggtgccgccaagtttgatgccatggctttacaaggcgtttctttggggatctgggtctgggcattgatgaacgtcatcagtggactagaattcatcattaatcaactgttcttggctcccaagatggaaccacctgcggtgttagagactcaagaagaaaaaatcttggatgttgtcgacgataccgttattttagattag

SEQ ID NO: 933 - DNA, 840 bp, Saccharomyces pastorianus
atgtcacaagattttatagaagaccattcacgtacaggatcctcagacgacgaggatagtggggcatatgacgagtggatcccgtcattttgttccaggtttggccacgaatacttttgccaggttcccaccgagtttatcgaggatgacttcaatatgacctctttgtcccaagaggtgccccactaccgtaaagccctggatttgatattggatttggaggccatgagtgatgaagaagaagaagaagaagaagacgtggtagaagaagaggaagtggaccaggagatgcaaagtaatgacggccacgatgatggcaagaagaaaaacaagtcccccgtggtgaacaaaagcattatcgaacatgcagcagaacagttatacggtttgatccacgcgaggttcattctgaccaagccaggtctgcaagcgatggctgagaagttcgatcacaaggagtttggaacgtgtccccgttactactgtaacggcatgcaattactgccttgtgggctaagtgatacagtggggaaacataccgtgagattgtattgtcctagttgtcaggacctgtatctgcctcaatcatctaggttcctgtgcttggaaggtgcattttgggggacgagtttccctggtgtgttcttaaaacattttaaagagctggaagaatatgtagaaagaaaaagtaaagaatcctatgaattgaaagtctttgggttcaggataaatgacgaagccgtatctggccccagaatgaagtggttgagacaatacccattcacggaggaagactgggaagagttctcaaaatgcgaattcgagaccccagcagtttaa

SEQ ID NO: 934 - DNA, 555 bp, Saccharomyces pastorianus
atgttaaagtactcgattcaacgaagactcgtctctacattttacgaactattccccaagaccttccccaagaaactgccaatttggaccatagatcaatccaaattaaggaaggaatacaggcagttgcaagcacaacaccacccggacatggctcagcaaggtagcgagcagtcttccacgcttaaccaggcctaccatacactcaaggaccccctcagaaggtcgcaatacatgctcaaactcttgcgcaacatcgatttgacacaagagcagacctcacatgaagtgaccacgagtgatccgcagctcttgttggaagtgctagacgttcatgacgagttgtcccagatgaacgacgaggctggcgtgaagcagctggcacaggagaacaaacagaggattcaggatattgaaacacgattggagcaatgctaccgtgacaagaattacgctgctgcagtgaaattgaccgtggagctgaaatactggtccaacttggcaaaggccttcaaggactgggtaccaggacaaccattagaattgaatcattag

SEQ ID NO: 935 - DNA, 1512 bp, Saccharomyces pastorianus
atgtctgacagatttgttatttgggcgccttcgatacatagtgagctggctgccaagtgtgggtactgtcatggtaataaagaggagaacagggaccaactgttcgcattggactcatgggcccaacagtatgtggacgaattggacgctatagaggttaataattgcacgatgggctcgttcgtagagcatatggacgtggccacatacgaccggttgtgtaatatggggtttagacggtctggcaagtttctttacaaaatggatccattgaggaactgttgtaggctgtacactatccgaaccactccgcaggaactggtcatgtcgaaggaattgagaaaatgtgttagccggtttgtttctaggattacggatgatgggtctcgcatggctattgttccaggcaatgattttgttggaaaaattgtcaatgcagagttgaactctacgaagttccacactaagtttgaacctgcactttatagtgacgagaagtaccagttatttgttaagtaccaagaaagggtccatcaggatttcaaaaactcgccaaagtcttttaaacgattcctatgtgacacgccgtttggtcctgagtccatattggggacgcaagaatcgtgggaccagttgaacaactggcaatccatgaaaccaggcgagaaactgatgcatatggggcctgttcatgagtgttactactacgagggtaaactaattgccatcacggtatcggatatcttgcccagtgggatttcctcagtgtattttatttgggatccggattacagtaaatggtctctggggaagctcagcgctctacgtgaccttgctatcattcaaaagacaaacctgaaatactactatctaggctactatattcaggactgccctaagatgaactacaaggcaagttatggtgctgaagtattggatgtatgctgtggaaagtatatcccattgaaacacattgaaaatatgatttccagaggcaatctgtttgttctgggtgaagaggacgctgatatttccaaagagttatacattgttgactccgataatgggaaaggatcaagttttgttactgaaaacggtgccaagcagatgaatatcgccgaagaagtatacggtgtggatggatgtgcattcaaatctgcaaacgagtctgtattaaaattgaaggagctttacagcgtaccgtacgaagaagaagattcagatactatctattaccagcaaggacaacatgaccaagctccgcgtggcatccccaacgttgtgcccggattgcttccgctctgggagttgttggatttcatggaatctggcaaaattactgacttggagggaaggctattcttgttcgaagttgaaacggatgggattcgcccactgacaaatttctacagtgaatctccccccgttaagagacgcatttgcgatgcgatacggttattcggcttcgagacttgcatgaaatctgtcattctatatagtgagcaaatgtga

SEQ ID NO: 936 - DNA, 1422 bp, Saccharomyces pastorianus
atgggtaacgataatacgaagaagagccaagtggagggagagaatagacaatccaagcagccggtaaatttcctgcctcaagggaaatggttgaagccgaatgaaatcgaatacgagttcggtgggaccgtcggtgtcattggtatgttgatcgggttcccgttgctgatgtactatatgtggatttgtgcagagttttatcacgggaaagttgcgctgcccaaggcgggcgagtcgtggttgcacttcatcaagcacctttaccagttgttcttggacaacggtgtccctgaaaagtatgactggactatcttcctgacattttgggcgttccagattattttctactatacgctgcctggtatctggaccaaaggccagcctttgtcccatttaaagggtaagcagttgccctacttttgtaatgctatgtggaccttgtatgtttctactgctttggtcctagttttacacttcaccaagctgtttaggttgtacgttattattgaccgtttcggtaaaatcatgacatgtgccatcgtttcgggttttgctttctccatcatactgtatttatggacgctgtttgtttctcatgactatcacagaatgacaggcaaccacctgtacgatttttttatgggcgctcctttgaatcctcgttgggggatcctagatatgaagatgtttttcgaagttagattgccttggtttactctttattttatcactttgggtgcctgtttgaaacaatgggaaacgtatggctacgtcactccacaactaggtgttgttatgttggcccattggttgtacgccaacgcatgtgccaagggtgaagagttgattgttccaacttgggatatggcttacgaaaaattcggttttatgctaattttttggaatatcgccggtgtcccatacacgtactgtcactgtactttgtatttatactaccatgagccatctcaatacaactggtcaccattgtacaatatttcactgtacgtcgtcctactatgtgcttattatttctttgatactgcaaatgctcaaaaaaattcgttcagaaagcaaatgtccggtgacaagtctgttagaaagaccttcccatttttgccctaccaagtcttgaaaaatccaaaatatatggtcacttctagcggctcatatcttctgattgatggttggtacacttgggcaagaaaaatccattacacagcagattggactcaatccttaatttgggccctatcttgtggcttcaattcggtattcccatggtttttcccagccttcttccttgttgtcttaattcacagaaccttcagagatcagactaaatgtaagagaaagtatggcaaggattgggacgagtattgcaagcattgcccttacatctttattccttacgttttctga

SEQ ID NO: 937 - DNA, 759 bp, Saccharomyces pastorianus
atgtccggtgctgctgctgcctctgctgctggttatgatagacacatcaccattttttcccccgagggacgtttatatcaagtcgaatatgcctttaaagccaccaatcaaactaatataaattcattggcgattagaggtaagaattgtaccgtagtgataagtcaaaagaaagtacctgacaaactcttggacccagatactgtttcgtatatattttccatttcaagaacaatcggtatggtagtaaacggtccaataccagatgcaagaaacgctgccttaagggctaaggctgaagctgcagaatttcgttataaatatgggtacgatatgccgtgtgatgttctggctaagagaatggccaatctgtcccaaatctacactcaaagagcttacatgagaccattgggtgtcatacttacatttgtttccgtggacgaagaattgggcccatccatttataaaacagatcctgcaggttattttgttggttataaagctactgcaacagggccaaaacaacaagaaattaccacaaacctagaaaaccatttcaaaaagagcaaaattgataatattaatgaggaatcttgggagaaagtagtcgaatttgccattacccatatgattgacgcattgggtactgaattttcaaagaatgacttagaagtcggcgttgcaaccagtggcaaattcttcactttgaaagctgagaatattgaagaaagactagtagcaattgctgaacaagattaa

SEQ ID NO: 938 - DNA, 525 bp, Saccharomyces pastorianus
atggctagaggtttactaaatttaagatctcaactcgggttttacaagtcttaccaccacgaccccaaaaatgttttgattcactccatattcgttcctactatcctgtttagtggtttttgcatgcttcaaagagtcaatttatatcgcggtttcacgttaactactttgttaagcatttcattttttatattttattgctgtttatatctgcctacaggccttctagcaggatttttcttacttctactaaaccatgcgctaatcaatgacaaaattcatttgtcgtttggacaagagctaggtttgtttgttatcggatggattttccaatttataggtcatggcgtttttgagaaaaagaggccggcattgattgataatttagttcagagtttggtattggctccgtactttataatgttcgagtttctttttaagttaggttttatgcctcgattaaatgcagacttggagcatgatctagaggtaaaacaaaaaaatttggagaaacaaaagcaatga

SEQ ID NO: 939 - DNA, 2340 bp, Saccharomyces pastorianus
atggtttacgttccatccacaggcccaagaactctttatgataaagtttttgacgcacatgtcgtccaccaagatgaaaacgggtcctttttgttgtatatcgatagacacttggtccatgaagtcacttccccacaagcttttgaaggtttagaaaatgccggcagaaaggttagaagaatcgattgcactttagccactgtagatcataacattcctactcaatcaagaaagaattttaagtctctagacacatttattaagcaggctgattcacgcctacaagtcaagactcttgagaacaatgttaagcaattcggcgttccatatttcggtatgagtgaatcaagacaaggtattgtccacaccattggccctgaggaaggtttcactctaccaggtactactgttgtctgcggtgactctcacacatctacccatggtgcctttggttcattggcttttggtatcggtacttccgaagtggagcatgtcctggccacccaaacaatcatccaagccaaatctaaaaacatgagaattactgtaaatggtaaactatcacctggtatcacttccaaggatttgattttgtatatcattggtctcataggtactgcaggtggtactggtagtgttatcgagtttgcaggtgaggctattgaagccctttcaatggaagcacgtatgtctatgtgtaacatgtccatcgaagctggtgcaagagcaggtatgattagaccagatgaaaacaccttttcttacactaaaggtagacctctggctccaaagggtgccgaatgggaaaaggctgttgcctactggaaaactttgaaaaccgatgaaggtgccaagtttgaccacgaaataaacattgaagctgccgatgtgattccaactattacctggggtacttctccccaagatgccctaccaattactggttcagttccagatccaaagaatgttgctgatccaattaagaagtctggtatggagagagctttaagttatatgggtttagaagcaaacacaccattaaaaagtatcaaggtagataaagttttcattggttcctgtactaacggtcgtattgaagatttgagatgtgctgcagctgtagtgaagggccacaaactggctgatagtattaagttagccatggtcgttccaggttctggtttagtcaaaaaacaagccgaagaagaaggtctacacaaggttttccaagaagccggttttgaatggagagaagctggttgttcaatgtgtttgggtatgaacccagatattttggaggcctatgaacgttgtgcttctacatccaacagaaacttcgaaggccgtcaaggtgccctatctcgtacacatttgatgtctccagccatggctgctgctgccggtattgccggtcatttcgtggatatcagagaatttgaatataagaaccaagataaaggtagtccaaaagtggaagtcacttcagatgatgaaaaggagcttgaaagcgctgcttatgatcacactgaacctgttcagcctaaggaagctacacaggatgttgccaatgatgaattgaaggatattccagtcaagtcgaatgatacccctgttaaagctgccgcctccggtatgaagccatttttgactttagaaggtgtcagtgcaccattggacaaagctaatgttgacactgatgctattatcccaaaacaatttttaaaaactattaagagaacaggtttaaagacgggtttgttctatgaatggcgtttccgtaaagacgatcaaggtaaggatcaagaaaccgatttcgtattgaacgttgaaccttggagggaagccgaagtattggttgttaccggtgacaatttcgggtgtggttcttcaagagagcacgcaccatgggctttgaaggattttggtataaagtcaattatcgctccttcctatggtgatattttctacaataactctttcaagaatggtttattgccaatcagattggatcagcaaatcattcttgataagttgattcctattgccaacaaaggtggtaaactatgcattgatttgccaaaccaaaagattttggattccaacggtgccgttcttgttgaccattttgaaatagaacctttcagaaagcactgtctagttaacggccttgacgatatcggtattacattgcaaaaggaagatttcatttctaaatatgaggctttaagaagagaaaagtactcgttcttggagggtggttctaagttactaaagttcgacaacgctccaagaagaaaggctgttactaccactttcgacactgttcaccaggactggtaa

SEQ ID NO: 940 - DNA, 3534 bp, Saccharomyces pastorianus
atgtctaggcaagacgaaaactccgctttattggcaaataaggcaaacaatcaaccatcatacacaagaaaccagaacggagaccaagacgattttaagctttcaaaaagtcagctttcggatctgcacaacccaaaatccgtagggtcgtttatcaaattattcggtgaagaaactggcaattttttcaaatatttaaaaacagataaaaatgcaggtatttcacttccaaaaaggacagactatcgcaagacaacccgttataagaattacggagacaactctcttcccgaacgagtcccaaagtcttttttacagttagtgtggatagccttcaatgataaaacaatggagttactgtcagttgctgctgtcgtttcctttgttttaggtctgtatgaattgtgggtgcaaccaccacaatatgatcctgaaggtaatttaattaggcaagtcgattggatagaaggtgttgctatcatgatggctgttcttgtggtggttctagtaagtgccgccaatgattaccaaaaggaattacagtttgcaaagctaaataagaaaaaggaagaccgtaaaattatcgccataagaaacgaccaggaagtactgatttccattcatcacgctttggttggtgatattatttcactacaaactggtgatgttgttcctgctgattgcgttatgatatcagggaaatgcgaagcagatgaatcttctatgactggtgaatctaacacgataaaaaaacttccaattgctaactcattaaaggatttcaaaaaattcaattccggtcacgaccacttacgaaagaagccattagatataggtgatgctgacgaagacggtaatagagtcgctgattgtatgctaatctctgggtctagaattttatctgggttaggcagaggtgtaatcacatccgtaggtataaactcagtttatggtcaaacaatgacttcattgaacgtcgaatccgaaagcactcctttacagctacatttgagtcaattggctgacaacatatctgtttacggttgtgtggctgctatcatccttttcttggtcctattcatcagatatttattttatgtaatacctgagaatggcagattccatgatttagatcctgctcaaaaaggttccaaatttatgaacattctcattacttccattacagttattgtagtggctgttccagaaggtttaccattagcggttacgctagccctggcatttgccacaacaagaatgactaaagatggtaacttagtaagggttctgagaagctgtgaaactatgggctctgctactgcagtctgctccgataaaactggtactttgacagaaaacgtcatgagtgtcgttcgtggtttcttgggcaattttaattttgatgacaataaatccttacctgttagtgaacagaaaaagctaaattctaagaaagtattcggaaaagactgttcgtcatctttaagaaacgatctattagctaatatcgtgctaaattcaactgcctttgaaaatagagattttaagatgaaaaataaaggcaacagcagcactgatagagattcctcagagaggtccagttcttccaacgggtggatgtccaaattattgttttttaagaagaacaagaacgacaaccatgaagatcaattattcgagaatgtttctaaaggaaagcaagagccattcatcggttccaaaacagaaacggctttactcagtctagcaagattttctttgggtttgcaagttggagaattacaggatttgagagaccagccgactgaaaaattcaatatcgaaaagattgttcagacaattccatttgaaagctctcgcaaatgggccggactagttgtaaaatacagaggtagtgaaggtaaaagaccgttctataggctttacgttaaaggtgccgcggaaattgttttccaaaattgtttatataagagaaatttagatgatactttgaaaaaaattgatgaagaaactaaagaacaaataaatggtgaaatcaaaaatcttgcatccgatgctctcagagcaatcagtgttgcccacagagatttttatgaatgtgaaagctggcctcctgagcagttgcgcgataaagattcgcccaacacagctgcacacgatttacttttcaacgatcaaagcattgaaaagggtctgattctagatggtatacttggtattcaggatcctttgcgtgaaggtgtcagggaatctgttctgcaatgtcagcgtgccggtgtaactgtacgtatggttactggtgacaatatattaactgcaaaagctattgcaaggaattgtagtattctttccggagacgtttcccctgaatcatactctgccatggaaggcactgaatttaggaagttaaccaaaaatgaacgtataagaatcctaccaaacttaaaagtcttggcaagatcatcaccagaagataagaggttgttggtagaaacgttgaaaggaatgggagacgtagttgcagttactggtgacggtacaaacgatgcgccagctttaaaactagctgacgtggggttttcaatgggtatttcgggtaccgaagttgctcgagaggcctcagatattattcttatgactgatgatttttctgctattgttaacgctattaaatgggggagatgtgtttctgtctccataaagaagtttattcaatttcaattaattgttaacattactgcagtaattttaacttttgtgtcgtctgttgcatctagcgacgaaacgtcggtattgacagcggtccaactattatggatcaatctgattatggacactttagctgcgttagctttagctactgataagcctgatccaaacataatggatagaaaacctaaaggccgctcatcgtctttgatttctgtttcgacttggaagatgattttatcacaggctacattgcaattgatagttacttttattttacacttctacgggcccgaattatttttcaatagccacgaagatcaaataacgagtcatcaacaacaacaactaaatgccatgacattcaacaccttcgtttggttacagttctttactatgctagtatcgagaaaattagatgaagctgacggcatatcaagttggagagatagaatttcaactgcaaacttaaacttcttccaagacttgggcagaaattattatttcttaacaataatggcaatcattggcggatgccaagttttgatcatgttttttggtggtgcaccattctctattgccagacagaccaaatcgatgtggataaccgctgttctttgtggtatgttgtctttgattatgggattattggtaaggatagtccctgatgaagtagcattgaaagcatttccggttgcttatgttcaaaaatttaaatatgtatttggacttgagtttctcagaagaaagcaactcgcaaaaaatgacgacgaagaagcgcttttggacgaatctgatacaccagagtctacggcgttctactag

SEQ ID NO: 941 - DNA, 840 bp, Saccharomyces pastorianus
atggccgacttatctattgcagatgatgatgatatcttaggaatgttttttgatgaggaatttgttcctcacgcatttgttgatatacttttaacaaatgcacttgacgaagatgaaatccaaacgcaatccatatcgtcatcgctattgaccaggctggacttctacacaaaaaaccttacaaaggaattggagaatactatatggaatttggataaattgtctcaaacactaccgatggcgtgggcaccttctagatccagggaagaattagacaaagatgattcatcagtatattcgactgaatcgctaaggtcatctaagctggagtactatctggataccttgggaagtgccgtaagagcattagaaacaggaatgaagaatgtgacggaaaaggtaaaagagatagatcaacaaaaagatgagaacactaatgttagaaaacaactgcaaaatttagtgctaattaaagaaagaattgagaagacaatatattatttagaacaaatcaagaccgttatgaatatttcgacaacaaaagaaagtggaaacactgctaccatgggtagcgacatttcaataagcgacttcaagacatctctgaagactctagagaatacgattgatgaatcgctagctttaacgtctggaaatgaagccaaaaaccaaaaaaattccgatttgatagaaaaaattgactcactttccgaactgaaggccttgtttaaaggtcttgataagttctttgctgaatacgtcaccttttcagagagtataaaatcaaaagcacaaagttatttatcaaccaaggatattgacgaagagctaatttcttga

SEQ ID NO: 942 - DNA, 1701 bp, Saccharomyces pastorianus
atgtctacaaactcaaacccgttcatgaataatacaccttcttcctctccacttaagggttctgagaataagaggatatcgaaacggccgatctccagttcgtcatctgcctcactattatcctccccctccagacgatcgaggccgcctacagtatatggtgatagatatattcctaacagaactgacatagatttgaattctatcgtttcaatcagtagcataacgaacgttcctgccctcaacccatcgagcacagaggatcaagtcgagtaccaaaaggaaagacaagcacatgaaacgtacaacactctgttaaagaatgagctttttggtgaaatgcttagtaaggatacagtagggccagaaagtagtatagaccgtataaagaacactaggccatctactatgggcgttgtacatgcagaaaattcaagtaaccgtggttatgagctggaacgagtatcaacaccgccacctgaaggggctggtttagaagacttttctccacactctacgccagtcacgcctcgacgtcttttcacttcacagcaagatgaagtcatacggccttccagtagctcagtgagaggcgccagcctgctgacctatcaacaacgcaaaggtagaaaactctcagcagcatctttgttacagtcacagttttttgattcaatgtcgccagttaggccagattcgaaacaattattgttgtcaccaggaaagcaattcagacaaatagcgaaagtcccttatagagttctagatgctccatctttagcagacgatttttattatagtttgatagattggtcgagcacagacgtcttggcagtcgcccttgggaagtctatatttttaacggacaataatacgggggacgttgtgcatttgtgtgacacgcaaaacgaatatacaagcttaagctggattggagcaggctctcacctagcagttggccaaggcaacgggcttgtagaaatttatgacgtaataaaaagaaaatgtataagaacattatcaggacatgtcgatagagtggcgtgtttgtcttggaataatcatgtgttaacatctggaagtagggaccatcgaatactgcatagagatgtaagaatgccggatcctttcttcgaaactatagagtcgcatactcaggaagtctgcggcttgaagtggaatgtagcagataataagcttgcatcaggtggtaacgataatatggttaatgtttacgagggaacttccaaatccccaatcttgacatttgatgaacataaggctgctgttaaggcaatggcttggtctcctcacaaaaggggcattttagctacaggcggtggaacagcggatagaaaattgaaaatttggaatgtcaatacttcgacgaagataagtgatatagacagtggctctcagatatgtaatatggtatggtcaaaaaatacgaacgaacttgtgacatcgcatggttattcaaaatataacttaactttatgggattgtacttccatggatccaatcgcaattttgaagggacacagtttcagagtccttcatttgaccttatctaatgatgggaccactgttgtttctggagctggagacgaaacattacgatattggaagctttttgacaagccaaaagcgaaagttcaaccaaattcgttgatatttgatgcattcaatcagatccgctaa

SEQ ID NO: 943 - DNA, 651 bp, Saccharomyces pastorianus
atgttattacactacgtcttactggctcttgtgttatcgcccttcagagcctctgcattttatttctatggttatggtggagaccgaaaatgtttcctaaaggaattatccaaggacacccttttaaaaggctcttataacttgggagttcatgatgaaaagttggaggactatgctcttcccagtcaaagtgattacggcatagttatagatgtggaagaggtgtttgataataaccatagagtggtccatcaacagagttctccttcaggtgacttcacgttcctggcattagaatctggggaatacaaaatctgtcttcaatcccaagtaaagaattggataggtaaaaccaaaacaaaactggaagttgaatttgaaatcggttttgaagccatgttggattcaaaaaggaaagatactatagaaactttgcacgagaaagtcaatatattaaattcgaaaatcatggaaattagaagggaacagcaattggtgagagaacgagaagaatccttcagagatatatccgaatctgtaaactctcgcgcaatgtggtggatcgtgattcaagtcattatcctgatctcaatttgtgtatggcaaatgaaaagcttacgttcattttttgtcaagcaaaaagtcttgtaa

SEQ ID NO: 944 - DNA, 1050 bp, Saccharomyces pastorianus
atgtcaaacatagattcagttttaattattggtggttccggtttcctcggattgcacttaattcagcaattttatgatataaatcccaagccagatattcacatttttgatgttagaaacctcccagaaaaactttcaaagcaattcactttcaatgtcgatgacatagaattccataaaggtgatctaacctcccccaatgacatggaagatgctatcaaggaaagtaaagcaaatgttgttgttcattgtgcttcgccaatgcatggtcaaaatccaaatatttacgacatagtgaatgtaaagggaacgcgtaatgtgattgatatgtgtaagaaatgtggtgtcaatgttcttgtatatacttcttctgcgggtgttatttttaacggtcaagacgtgcataatgcggatgaaacttggccaattccagaagttcctatggacgcatataatgagacaaaggctatcgctgaagatatggtgttgaaggcaaacgatccagacagcgatttttatactgttgcacttcgtccagcaggtatttttggtccaggggatagacagttggtgccaggtcttagacaggtcgcaaagttaggacaatcgaagtttcaaattggtgacaataacaatttatttgattggacttatgccggtaatgtcgctgatgctcatgttttagccgcacataagttgcttgacccaaaaacaagatcggaggtctctggtgaaactttctttattaccaatgacacccccacttacttttgggccttagctcgtacagtttggaaggcagatgggcatgttgctaagaacattattgttttgaaaagaccagttgcaatttgcgctggttacctttcagaatgggtttccaagctgctgggtaaagagccagggttgactccgtttagagtcaagatcgtgtgtgcataccgttatcataatatttctaaggctaaaaagttgctgggatatacgccaagggtaggtattgaagaaggtatcaataaaacattagcctggatggacgaaggtttgtaa

SEQ ID NO: 945 - DNA, 1425 bp, Saccharomyces pastorianus
atgtcatcttcagatatttttgatgttctaaacattaaacagaaatctaaaagtccggctaatggcccgacttcggtgccctcgtcctcggcagccaatcgattcaaacctcaggtgactggtatgcaaagagaactatttaacttgctgggggaaaatcaacctccagttgttattcagtcaggaaataacttcaaggaaaaaatgctttcgacatcaagaccatctccctggtcatttgtagagtttaaggctaatcccttcgttactctgcgccattgggtcaagggttctaaagaattggtaggagatgaactgaaggaatcgccatattctaaatttaatcagcacttatctatcccatctttcaccgaagaagagtacacgaccttcatgcatgacacagaaaatcaagagaaagtgcaaaacgataaaaaccccaatgacagcactgaaattggaaagaagaacgataataaaaactggtcttttgaggaaataaactatttatttgaactctgtcgaaagtatgatttacgttggttcttaattttcgacagatataactataataaatcacgaatacttgaagaccttaaggaagaattttaccgcatctgtagaaattacttcaaaacaaacaaccctagccatccactcctatcttcgttgaacttctcggctgaaaaggaaatagaaagaaaaaagtatctacaacgtctactttctcgttctgcagccgaaattgctgaagaggaagcactgatagttgagtcgaagaaattcgaaatggctgctaagagaacactagcagaaagggaatcattactaagactattggattctcctcattcagatcagtcaattacacaatatctcacatctcaggggatgtcacagctgtacagcacgcttttagcagacaaaactaggaaacgtaagcacgatccaaacattcctgaaaatccttggatgaagcagcaacagcagtttgctcaacatagacaacttcaacaaatgaatgtgaaaaagccggaagtcaaagaaagtccttcccccaagaagacaaaaagacagagacaagagatgcaaactgcactcaaaagaagatctgagagtgcgtacgctgaactattattgaaggattttaattccgaagaaaggaaggcgttgggcgtaataacacacggtgaaaaactatcgccaggagtttatttgagatcaacaaagctatcgacctttaaaccagcgctacaaaacaaaatttttgctgttcttcaagaactttctttaccctctcgtcctgtgatgccatcaaacgacgtaatggaaagacaagaagagcttgtaaaaaaaatcaatacccttatcgatttaaaaaaacatgtcgataaatacgaagccggtatgtctattacgaagtga

SEQ ID NO: 946 - DNA, 1398 bp, Saccharomyces pastorianus
atgagcgaaagaaataatgaaaatatagattctagaaactcaagccaaatagttgaaacagatcctgcagaaagcaagaataaacacatccgtagcgctttgagaaaacgaaaaggtagattaaccgcccaagcttatgaagaagatcaagaagctattttgtcatctcctttattaacttctacgcccaaaacagtctctagatcattagtgaggctgtatccatatttaatcgttgtggataattttttgagcgtcatcacatggtccaatgataacatatttgtaaacgtgtttggaatatttacctttactgtttgtgttttgtactttggaaccatcacaaagtattttggacatttaatgattgtgggtataatatgggcatatctattaatagacaagcacgtccaagaaacaatggcatcttgcccttcattagatgatataatacatgtaatggatagagtttctatgaagtctagtgctgtcttgtcacccattactattttaagcgctcaagatgtcaggagattgttatttactgttgcattcctatccccaatttacatttttcttacaatgtttgtgctacctccaaattatttgatgctggcggggggactgtatgtacttacgtatcactctaaactgattagaagaatgaggagatatatgtggaagttccgcattgttagattacttgtattcttcgtaacaggattagaccttgggggaccagacaacaataggcgcttatttgcttctgttaacaagaaaataaggtcctttgtctggaatgaagtaggtaatacgtctagtaccaaaaagactgttcttttcaaagtcgccctttttgaaaaccaacgccgttggcttggtattgggtggacgtccactatgctgagctatgagagggcatcttggacagatgaatttctgaattcttcccctagccctgatatgtttacattaccagagaaacagtctggaatggcatgggaatggcatgataaagattggatgctcgacttaacaaatgatggggcaattcagcttcctgcttctgctactaaaactaagtttaagcctggtgcagatgaaggctttatatattgtgacaatacctggaataacccttcagctacagacacatataaaaagtacacaagaatacggaggtgggtcaggacagcaacagtgacgaccacgtatgacaatgagcccaatgtggagaaagtttcgatgaataccctcgctccaaaaagtgaggataatgataaaggcaggaaaagaaaggtttcgttcagtgcagcaaatgaagtgcatattataccttcctctagtaacagcaaattaatagagatgtcagacattgcaatggacggttctctataa

SEQ ID NO: 947 - DNA, 1203 bp, Saccharomyces pastorianus
atgagtagtaacgcaccaggggctcccactctttctgctaattctgcggcttctgaagggaaggagaaatcggataacgtttccggtgatgagtatctttctcaggaggaggaagtttttgatggtaatgatattgaaaacaatgaaaccaaagtgtatgaagaatctttagacctggacttggaacgtagtactagacaggtttggttggtcagattaccaatgtttcttgcagagaaatggagggatagaggtaacctgtatggtcaagaattgggtaagattagaataaacaaggatggcagtaaaatcacgctacttttgaatgaaaatgataatgattctataccgcatgagtatgatttagagctcaccaaaaaagtggtagagaatgaatacgttttcactgaacaaaatttaaagaagtatcaacaacggaaaagagagttagaagctgatcctgagaagcaaagacaagcttatttaaaaaaacaagaacgcgaagaagagctcaaaaagaagcagcagcaacaaaaacgtagaaacaacagaaaaaagttcaatcacagagttatgacagatagagatggtagagacaggtatatcccatacgttaaaacaattcctaagaaaaccgctattgtaggaacagtttgtcacgaatgtcaagttatgccatctatgaatgatccaaattaccacaaaattgttgaacaaagaagaaacattgtcaagcttaacaacaaagaaagaatcacaaccttggatgaaaccgttggtgtaacgatgagtcatacaggtatgtctatgaggtcagacaactctaatttcttgaaagttggacgcgagaaagctaagagtaatatcaaatctattcgtatgccaaagaaggaaattttggactatctatttaagctgtttgacgagtatgattactggtctctaaaggggctgaaggaacgtactagacaacctgaagcgcatttaaaggagtgtttggacaaggttgctactcttgtaaagaagggaccttatgcgttcaagtatactttaagacctgagtataaaaaactgaaagaagaggaaaggaaggcaacattaggtgaattagccgatgagcagacaggttccgcgggagagaatacccaaggggaggctgaagctgattttgaagatgaaatagagatggaagatgttgtttag

SEQ ID NO: 948 - DNA, 972 bp, Saccharomyces pastorianus
atgacgataattttagatcctgatagagtttggatagacggctgctttgacttcacacatcatgggcatgcgggagctatcttgcaagctcgtcaaacggtttcaaaagaaaatggtaaacttttctgtggtgtgcataccgatcacgatattcaacataataagggttcgcctgtcatgaattcacaagaaagatatgaacataccagagcaaataggtggtgttcagaagtagttgaagctgcgccgtatgtgacagatcccgattggatggataggtaccaatgccaatacgttgttcatggtgacgacatcaccctggatgctaacggagaagattgttataaagtggtcaaagaaatgggacggtttaaagttgtcaaaagaacatacggggtaagtactaccgagatcatacatagaatattaacaaataatacgttggcgcctactcatcctgattattatgctaacactcaagagctaggtttttattcagttgccgaagatgcggtttcgaaacattgttatgtttttcaaaaagatttgagttacgtcctggtaagtggtggatacgatttcaacgtaggagattgcgtttacgttgatggagatttcgacttatttcacatgggagatattgaccagttaaggaagttgaaaatggatctccacccagacaaaaagctgattgtcggcatcactacaaatgattactcaagcaccatcatgacgatgaaagagcgttctctaagcgttctaagttgtagatatgtcgatgcagttattattaatgctgatgccgacgcattagctcagtgtaattggaaaaaatatcgtataggcacggctgtcctcacggaaggcggaaagtttagcgaatacttgactaaagacgtcatcgtcaagagaatagaatctcgaagggatgtctatgttgcgagaaaccaaaagaaaggtatgtccatttaa

SEQ ID NO: 949 - DNA, 255 bp, Saccharomyces pastorianus
atgactagaacaaataaatggactgaacgtgaatcaaaagctaatccaaagtacttctcacacactggtaactacggtgaatccccaaatcacatcaaaaaacaaggttccggcaaaggtaactggggtaagccaggtgacgagatcgatgatttaattgacagtggtgaaatacctccagtattcaagaaagatagaagagggtcaaactctcaagcacatgaacagaagttcgaaaacactcaaaaggaataa

SEQ ID NO: 950 - DNA, 1959 bp, Saccharomyces pastorianus
atggggttgaagaaattcttcaagattaagcctccagaggatgcgacatctgaacaaaataaggacactttgatggaattaggtattagcgtcaaaaatccaaataagaaaagaaaagaaaagttttccgcttatggtaaattcgcgaatgataaatctgaagataaggtgtatgcaccaccaggttatgaacagtacgctaagccacgggatgaactagaggatttgaatgcctctcccctagatgccaatggtaacgaagcgaccgctcagcctagtcaaacttcaactggcacgggacaacaaggaggccttgcagagtctaattctatgcagaaagatctttacgctattgaaaacgaagattaccgatatgacgatgacccctatgcaagatttcaggcgaataagagcaatagtgggagtagcgccaatccgtcggcgtacggtggttttggaggaggctataacagtgcacctattaattccttcaacaacggaggctcttatagtaaccaaagtgcaggaaatagttggtccagtggaaatgtcagcaacaatcaaaaccgaacaaatgataattttaatccaagacaagcacagcagaaacaatctcctgtttcagtgtcacggaaacctccaatggcggaccagaggggctactcatcaaaccctacgcaagagaaaagaaatccttatgctgatacgaatagttacggtggtggatatgacgttaatactaacaaaactggtagtagccgaaatggaagtgccacgaattcaaatccatacgcttctatgacaaacgatctttacagcaataccaacccaaacaggtctgcaaatccatactccagaagaaacaatagtcaaccgcaatcgcagcccgcaccaatgacttacaccccatcatttgttgccgccaatgaagcagaaacaaaaactgaagttgacctaaacgacgcacctagagggggtgagttcgactttgaagatgcctatgcagacaaatctgcagaaaacagggtggcattagatgagcccgatttgaatgcagtaataacaaatgatgattctgtagatttaaatgcatctgaagtagatcaacgttcaagacagcaacaacaacaacaacagtggttcatggatgagcgacagcaacagcaacaagacctcaatgcaactactggccagtatgaagatcagagaggctataagacattcgaagatatacaaaaagaagaggaagctcgccaacagcaggaagaagatgaggctgtggatgaaatcaagcaagagatcaagtttaccaaacaaagttctgtcgcttctactagaaacacactaaaaatggcgcaagacgccgagagagctggtatgaacacactgggtatgctaggtcaccaaagtgaacagttgaacagtgtggagggaaatctagatttgataaaagtacaaaacaaggtggccgacgaaaaagtagccgaattaaagaagttgaatcgtagtatacttgccgttcatgtttctaatccgttcaattctaaaagaaggagaagagaaagagaagagcaattgaagaacaggaaaattgaagaaaaattgatgagagaacaaacaaatcaacaaatctcaaggtccactcaaagaatagaaggtgctatgaatgcaaatggtaatactagtgaagtacgtgagagataccaaagacagaatattttagaaaaggcgaaaagatatcaatttgaagatgatgaagaagatgacgaaatggaattagaaattgatagaaatttggaccaaatccaacaagttagtaatcgtttaaagaagatggctttgaccactggtcaagaattagactctcagcaaaaacgtctcaataacattgaggaaggtactgatgatttagatatcaatcttcacatgaataccaacaggttggccggtatcagatag

SEQ ID NO: 951 - DNA, 1188 bp, Saccharomyces pastorianus
atggaccccacaaaagcacccgactttaagccaccgcaaccaaatgaagagttgcagccaccaccagacccaaagcataccataccaaaatctggacccatagttccatacgttttggctgactacaattcttcgattgacgctccttttaatcttgatatttacaagaccctgtcgtcgaggaaaaaaacttccaactcaagcaaccgaatggatcatattccgttaaatactagtgacttccagccgttgtctcgggatgtatcgtcggaagaagaaggtgaagagcagtggaacggaattgattccaagctgcagaatgttacgacggctaacaatttgggcgtgttaaagagccaaattgctgacctggaagaagtccctcacaccatcgtgagacaagccagaactatcgaagattatgaatttcctgtgcacaggctaacaaaaaaactacaagatcctgaaaagctacctctaatcatagtcgcttgtggatcgttttccccaataacatacctacatttaaggatgttcgaaatggccttggacgatattaacgagcaaacacgttttgaagtggttggtggttatttctctccagttagtgataactaccaaaaacgtggattagcgccagctcatcatcgtgtccgcatgtgtgaattagcttgcgaaaggacctcatcgtggttaatggttgatgcatgggaatctttacagtcaagttatacaagaaccgcaaaagtcttggaccattttaaccatgaaataaatattaagagaggcggaatatcgaccgtggatggtcaaaaaatgggtgtcaagattatgttactagcaggtggtgatcttattgagtccatgggtgaacctcacgtgtgggctgattccgacttgcaccatattttgggtaattacggttgtttaattgtagaaaggactggatcggatgttagatctttcttgctttcacacgatatcatgtatgaacacagaaggaatattctcattatcaaacaacttatttacaacgatatttcatctacgaaggtacgtcttttcatcagacgtggcatgtcagtacaataccttcttccaaactctgttatcagatacatccaagagtataatttatacattaatcagagcgaacctgtcaaacaggtattagatagtaaagaataa

SEQ ID NO: 952 - DNA, 573 bp, Saccharomyces pastorianus
atgtctagattaagaagatttaacaggaaaattttgggcttgaatcccggttacgcttatgaagttgagtcagaacacgatgacatatccatgttaccgttagatacagaggaacaagaagaacttatacaaaaatttgaggtcaatgcccacattacgaataagacgtacataaacgttttaagtgtactttatttgctgtatggaggattgctaatgatattcgtaagaaaatcgcgagggcatgttaaattagcacttcttgctggcgctaattccttgatctgctcatgcattacgcttagatataatatcataaatgattaccttttattcagcaaatttaaattacgagtgagtaatttttcaattaatacattaaacattgttttgttagtatttacgggttggataagtttcaaccatgcgatggaagataggaaaacattgttctatttacaggttccgatggttttattttgggtcgctgtaatcgtaaaaaggtgggctcggaatatggaagatgaaattgcggacctacggcgtttaaagtataaatacaagaatgcttga

SEQ ID NO: 953 - DNA, 900 bp, Saccharomyces pastorianus
atgtcgcatgaaatggcaccgtgggtacccatgtttattcagtcatgtaaaaacaacactgagccattcgtaccattccaattcgctactgtggataagttgaccaacaagccacgctgtagaacggtagtgttcagagactttctgttccacgataagaaaactaacgttttgacctttaacactgatatgaggagttctaagataacggaatcattcatagaaccaagctcgagtaattctggtggtgacaaccaaagatgcgagactccattttttgaagtgtgtgtctatttcccagaaacttgggaacaatatcggtttagtggtcaaagctttatattatctaggcagttcaaagaaataccggatgaaatcatttccaaatatgaaattttttcaccgcggctttcagaagcaagtgacaatagtactgatgaagacatagatacttcaattaacgaccacaacgataaaaataatgacgccgacgatcataacattaacaacgataacacactcataaaaacaacagacgacgacgacgacgacgaacatcacgaggatgaggattctcaaccacaaccacaggaatgggatgcagaactactaagacaatggtcttctctatccagacatacaaaatcattatatagaaagccagcgccgggccaaaagcttacctctgaaaccagcaaacagttagacaagcttcatagaggagttgatggcgctaaagaagatgtgggtttggaaaattttggtatcgtttgtctttgtattgactctgttgattatttgaatttgaaggagggaagaggtggcgaaagatggattttccagaaaactgacggtaaagacgaagaggatctgtgggaggaacaagaagtgtgtccatga

SEQ ID NO: 954 - DNA, 1416 bp, Saccharomyces pastorianus
atgtccatttgtgaacaatactacccagaagaacccgctcaaccaacaatcaagaccgattctattcctggtcctgagtctcaaaagcagttgaaggaactaggtgaagttttcgatacgagaccagcatatttcttagcagattatgagaaatccttgggtaactatatcgctgatgtagacggcaatacttatttggatttatatgcacaaatctcctcaatcgcactaggttataacaatcctgccttaatcaaggcagcgcaatcaccagaaatgatccgtgctttggttgaccgtcctgccttgggaaatttcccatcaaaggatttagacaagatactaaagcagattttgaaatccgcaccaaaaggtcaagaccatgtttggtcaggactctccggtgcagatgccaatgaattggcattcaaggccgcctttatctattaccgtgccaagcaaaggggcttcgatgctgatttttctgaacaagataatatatccgtcatggaaaataacgctcctggtgctccccaacttgctgttctgtcattcaagaaagccttccatggtagactatttgcctccgggtctacaacctgttctaagccaattcacaagctagatttcccagctttccattggcctcatgctgaatacccatcttacaagtttccgttggaagacaatgccgatgaaaaccgtaaagaggatgaccgttgcttgcaattggtcgaagaattgatcaagacttggtccatcccagtggcagctttgatcgtcgaaccaattcaatctgaaggtggtgataaccacgcctctaagtatttcttacaaaagttgagagacgttactttgaaacacaatgttgtctacatcattgatgaagtgcaaacaggtgttggggccactggtaaactctggtgtcacgaatacgccgatatccaaccacctgtggatttggtgacattttcgaagaaattccaaagtgcaggatatttcttccacgaccccaaattcattccaaacaaggcatacagacaattcaacacatggtgtggtgaacccgccagaatgatcattgctggtgccattggacaagaaatctccgacaagaagttgactgagcaatgtacaagagtgggtaattacctattcaaaaaattggaggatttgcaaaaaaagtatcctgaaaacttccaaagcttgagaggcaaagacaggggcacattcatcgcatgggatttacctactggtgaaaagagagatctgctattgaagaagttgaagtctaatggttgtaacgtgggtggatgtgcagtcaatgcagtgagattgagaccttcattaacattcgaggagaaacatgccgatatttttattgaagcattgaccaaatcagtcaatgagctatga

SEQ ID NO: 955 - DNA, 357 bp, Saccharomyces pastorianus
atggctgagaaacgtactcttatagctgtgatagctgacgaggataccacaaccggtttattgttagctggtattggacaaatctctcctgaaactcaagaaaagaacttcttcgtttaccaagaaggtaaaaccaccaaggaggagatcactgacaagtttgatcacttcaccgaacaaagggacgatattgctattcttttgatcaaccagcatattgctgaaaacataagagcaagagtggactccttcatcaatgcattccctgctatcttagaaatcccctccaaggatcatccttacgatcctgaaaaggactctgtgttgaaaagagtcagaaaactgtttggtgagtaa

SEQ ID NO: 956 - DNA, 837 bp, Saccharomyces pastorianus
atggcaaagactataaaagtggttaggaaaaaagaccccaagaaaaagaatcaatctgatccgttggctaaacaaaaacttatctggaagattggtcatgttttgactttagttttcggcttggtgttttccattacatatttctatcatgccttaatcttcttcaaatatcgttcctggaaatggttgttcttgagagttaacaagaactactcctttattcaaagtaggaaatggtacatgaaactgttaggttggagcccacaaataatgtaccgtctgtctctaattggcgtatttatgtctgaatccgtaacaatgcaacaaaactgggttggacttaaccctacatggagtgatttattgtcttccgagaacttccattctgttttgattgcctgcttatggttcttcggtggtggaaagtcgttctacaagctactgcctttcatgattctaagttatttacacttaacgaaaatgaattacgaattgaatgctgacaaagaaaaaagtattcctgtgacacctagagacaaaaaacttttacatctgctagcttattcggagttgcttgttatcctagctttgactttggatactatattattcaagacaggaacctccggatttatgctgatcatctacgtcggtatttattggttgcgactaaacttttcaccatatgctcaagtgactgttttggaattacttgtcaaatttgaaaaatatgttcctaagcaacataaaagtaagtggcatgttatcaagaatttcgtttatttgaaaatgaaagagcacgaaaagagaactaaagaggttgccaggtacgcctaa

SEQ ID NO: 957 - DNA, 327 bp, Saccharomyces pastorianus
atgcctccaaagcaacaattatctaaagctgccaaagccgctgccgctcttgctggtggtaagaagtctaagaagaagtggtccaagaagtccatgaaagacagagctcaacacgctgtcatcttagaccaagaaaaatacgacagaatcttgaaggaagtcccaacttacagatacgtttctgtctctgttttggtcgatagattaaagattggtggttctttagctagaattgctttgagacacttggaaaaggaaggtatcatcactccaatctccaagcactccaagcaagctatctacaccagagctactgcttccgaataa

SEQ ID NO: 958 - DNA, 1089 bp, Saccharomyces pastorianus
atgtcacgcagattcgatttgaagactataacagatctgtcagttctagttggaacgggaatctcattgtattatttgatcagtcgattactcaacgatgccgaatcaggacccttatctggtaaatcaaaggaatcaaaggctaagcagtctttacagtgggaaaaattgataaaaagatcaccggcactggcagaagtatcgttggactcatatgaaaagactatactgtcgtcgattgtcacgcccgaggaaataaatataacttttcaagatattggtggtttggacccgcttatttctgatttgcatgaaagcgttatatatcccttaatgatgccagaagtgtattctaatagccctctgttacaagctcctagcggagtcttgttatatgggcctccaggctgtggtaaaaccatgctggcaaaagctttagctaaggagagtggtgccaactttatctccataagaatgtcatctattatggacaaatggtacggtgaatcaaacaaaatagttgatgcaatgttttcattggcgaacaaattagagccttgcataattttcattgatgaaattgattcattcttgagagaacgttcttccaccgatcatgaagttactgcgactttgaaagccgaattcatgactttgtgggatggtttattaaacaatggacgagtaatgattattggtgctactaaccggataaatgacatagacgatgcgtttttaagaagattgccaaaaagattccttgtttcgctacctggttcaggccaacggtttaaaatactaaatgtcctactaaaagatactaaacttgatgaaaaggattttgacttgcaactaatagctgacaataccaaaggattctcagggtcggacttaaaagagctctgcagagaagcggccttagatgcagcaaaagaatacattaaacagaaaaggcagctaattgacagtggcaaaatcggtgttaacgatacttcttctctgaaaataagaccattgaaaacaaaagattttacgaaaaaactaaggttggatgttacaagtacattgtcgtctcaacctctggattaa

SEQ ID NO: 959 - DNA, 480 bp, Saccharomyces pastorianus
atgttcaagggcgtttattacggtgaaagtaacacaaacttagacatctcttcttacactcaatgcctactgtttcttcaagaatcaatcataccacctttaacaaataatagcgacaatggtacgctcatacagtatcacggcatatcaaaaaacgataacatcaaacaatccatagacaagttaagtaaacaaatcactgcctctgctgtaaatttagagcaacaacagcacgtactttgtgtattctcttatggtcctcatattcagaaaatgctaagtattttggagatattcagaaaaagttacaccaaggaccacgaaagcttgcatcagtggaataaattgacgtcgttcgatgtaataaaagagggtaggaacgaactattagagaaaaaactaaaagttccaattttgatcacttttgtatccggttctaatgccatgggtctagacctgcatggatttaccaaacagtaa

SEQ ID NO: 960 - DNA, 738 bp, Saccharomyces pastorianus
atgaacgcaagcttgtttaaatcttctcttcgtttaggatatatgaagcccttgttaccacgatctagcactatcattgttccatccataatgacacgaacatctctatttagaaaggctctatctagtagaacgaggttatacactaacggcgcaggtgcagcgtcaggaaagagcgatgccaagactggcaataagcacaaaccgttatggccacaggttaagtctgcttctacatttactttctcaggcatacttgtgataggcgctgttggtatatccactattgttatttatttaattctttcagaactattttcgccttcaggtgacacacaacttttcaatagagccgttacaatggtagagaagaacaaagacgtaagaaatttattacaatgcaatgacggtattacgggaaaagaaagattgaaggcatacggtgaacttataacaaacgataaatggacaagaaacagacctatcgtatccacgaagaaaatggataaggaggggagaacacatcattatatgagatttcacattgaatctaaaaagaaattggcactggttcatctagaggctaaagaatctaaaaaaaattaccaacctgatttcattaatatgtatgtagacgttcctggtgagaagcgttactatttgattaaaccaaaattgaattcagttcctagttctaagggctttttgggaataagatggggtcccagaaaagattaa

SEQ ID NO: 961 - DNA, 363 bp, Saccharomyces pastorianus
atgcttctcacaccagccaatcttgcaagaccgatggatactgaaaactctgacaacaatagcagtaagaacagtaactcgttcatgcgctccatcgtttcttccttaatggttaaaccaatatcatccctcacaaacacagtcacaagaaacaaaggtaagggcgaaagcactccgcgcaatagcacacctaacaaaattacaagatacgatttgtttaaagctgctgctgataatgacttgaaaagaagcaagacccaagaaagggccaaatccagaagaggctccaatagtagatacaatgacgacatttctgtgtctagtcctatttcaggaatccaacggagtagaagcagtatataa

SEQ ID NO: 962 - DNA, 264 bp, Saccharomyces pastorianus
atggtttcacaattattcgaagaaaaggccaaggctgtcaacgagctaccaacaaaaccctcaaccgatgaactactggaactttacggtctatacaagcaagctacagtaggagacaatgacaaggaaaagccaggtatttttaacatgaaggaccgttacaagtgggaagcctgggaagacttaaagggtaagtctcaagaagatgccgaaaaggagtacatcgcgtatgtcgataacttgattgccaaatactcttcttaa

SEQ ID NO: 963 - DNA, 669 bp, Saccharomyces pastorianus
atgaccgaattagattatcgtggagctgctcaggcgacttccgcctcatacagccgagatcaaacagaacttaagccatttccttctgccggcagtgcttcttcgtcaatcaaaactacagaaccggtgaaagaccatagaagaagacgttcatccagtataatttcacatgtggaacaggaaacctttgaagatgaaaacgaccagcaaatgctaccaaatatgaatgctacatgggtggaccagcgtggtgcttggatcattcacgtggtcgtcatcacactgttgaaactatttttcaacttgttccctggtgttaccgcagaatggtcatggaccctgactaacatgacttacgttgtggggtcgtacgtcatgttccatttgattaagggtacgccgtttgatttcaacggtggtgcgtacgacaatttgacaatgtgggaacaaattgatgacgaaactttatttactccttcaagaaaatttttgattatcgtgccaattgccttatttctggttagtactcactatgcacactatgatttaaaaatgttttcctggaactgctttttgacaacattcgttgctgttgttccaaagttacctgttactcatagactaagaatttctattcctggtattacaggtcgtgctcaaattagttga

SEQ ID NO: 964 - DNA, 1671 bp, Saccharomyces pastorianus
atgtcacaaatatctagaaatgattcggctaccactgacacttcaatatcaacctcgggatctacaacggtattgtccacatcctcgtccgataaggacactgtgagtataaaccaacaacgcgcaagaataaggtccggctcattatttgtcgagggatctcatctatctccatcatcggaaacgaaatcatataacatttacatcgatgataccaaatacgataaaatctttagaggagattcaacctcaagtggcacgggcagtccgcaggtcttcgaagatgctaaagatgataatttccacgaagaatcacatagagctttggagaattcaattttggatttaatacgacgaggctcggaagctgcagaattcccattacctccgccgtgctcaagtgacagaaacagaaattcttcccacggctcttccgcagaaacgaatccaaatggacacagtagcagcggtactatttctacttcagtacttttgaacttgggttccgctgaaaagcatgctgagaccgccaggggtgattatatagattcatcttcagtaaaatcatcagataaaaaaaaggagagacgttcttcgtcatactatccgccatactatccaccaaatggaggtagcccccaaaaccaacagccagggaataccgtttcgaaaagccgagcctcaagtcaagtgcaggatgaatactcttcattttcctctgtgcggtatgatgacgggttcgtaccatcgattgaagaagctgttgaagtatctaagaaaaagatttccaatgacgcatcaaaaggtgtttttcctgaccagactttcataccgcatgagtttcaaataccaaaaaaggcttggaataggccctcggcacatacccctacaaagtcatttcccatggtcaaaactccaagaaaccattatctgctaaccgacatattaaaaccgtctgaagcggttgactttgccaatcaacaaaggtctcctaccttgctaaataacacattacaccctaatacatggcatagctctgctaaagaaggcccccaaccccgaaaccaagatgaaaagctgcgggaaaccaaccgatccgctccaaatcatatttatcgttcccaagctcctcttgatgtaggagcgaacacctcgggtggtcaaaactcactgtatcatgaagaacattcaactaatgcggatgactattcagtttctaaagaaatcggtcaagaaaatcaggatggcacaaaatacgaatacaaaacatttgctaaaggcgcggaccaagaatggcaatcgccctttcaaatgcacacgatacccattcagagaatagacacatcctccatacattcgtatgactcccaaacgcgtggattctccgaagtctatagtatatcaagaatcatggtgacactgtgcacctgtgttttaattccgccgctgttctttttcttttccattgatggaaataacggtatttcaaattatagactaatgagaatgataatgaatcatgagcatagaattggcctactcaaaggattcgaatgggacattgacataaaatggttcagaacgttatgttttattttaggatgcatagagttgttagctatattcgctggtataggaataggatttggcgtgggagtaactcgagagtag

SEQ ID NO: 965 - DNA, 810 bp, Saccharomyces pastorianus
atgctatcacatatcgttgagtatgaatgccaatataccgatcagatttacaaaaaacgcaaaatttggcatgatggcaaactaaagtattttcaaataaacagcagattcatgctctatacggaaaaggataacattttattaactagtgaattcaaaacaagttccaaagagctgaaggccattttgaacccggaagggtttgatatcgaagagcataggattttcagtcagtttttagtaataatctcaggtattatcgacgaatatgatagagatattcaagtaacagcatttcacgtcagaacagatcctcctattctatcagtgcaaaaaaagcaacctgcttcctcagaacgtgtgcctactttgaaccacatttcaactgcaagggagatacattcaaatacgaaagtcacaattcctaaagacaagcagaaacaggacagtggcgctagaggtggattcaacattagcaagcttactttaaaggtgaacaagccttttaagaagcccaagaggatattgaatgctaatgtagtgaatgagttgaacaggccgagtataagggatagaagaagtccagaaacggtgcaaccagatgaggtaaatattggtatagagaagatacatgaagttgaaaaaatcgtgctgggtgaagatgatattttaaaatgtccaggtgagacaaatctgcaagattctaagggtacagatggttctgaaaagaaaactggtgtaagaatggcggccaagagtaagagaggaagtagaatacgaaaaatcgttcacaaaccactcaaaatttga

SEQ ID NO: 966 - DNA, 1002 bp, Saccharomyces pastorianus
atgtcagaacactcagacaaaaaacagaaagttgctatttcgtccttggaccagttgaagaaggctgggacccatgtggtggctgattctggggattttgagtccatttccaagtacgaaccccaggactcaactaccaacccttctctgatattggccgcttcaaagctagagaagtatgaaaggctgatcgatgcctctgtcgagtacggtaggaagcatggtaagaccgatcatgagaaagttgagaatgccatggataaaatattggtggaatttggttcacagattttgaagatcgtgccaggtagagtatccaccgaagtggatgcaaggctgtcctttgacaagaaagccactgttaaaaaagctctccatataatcaaactgtacaatgaggtgggcgtgcctaaagaaagagtattgatcaagatagcttctacatgggagggcatccaagctgctaaagagttggaagcaaaacatggcattcattgtaacatgaccttgttgttttccttcactcaagctgtagcatgtgcagaggcaaaagttactttgatttccccatttgtgggaaggatcatggatttctacaaggagcggtcaggtgaggactacaccggagagactgatcccggtgttctctctgtgagaaagatttacagctactataagaggcacggctacaataccgaggtgatggcggcttcctttagaaaccttgacgagctgaaggccttggcaggtattgatgacatgactctcccactgaatattttgcaacagttacacgagtcaacagatcctattgaaaacaaattgaacgcagagaccgctaaaaaggaaggtgtcgacaaaatatcttttatcaacgatgaacctcacttcagatacgtctttaacgaagatcaaatggccacagaaaaagtatctgatggtattagaaaattttctgtagacatcgaagcgctgtacaagttagtcgaggaaaaaatgtga

SEQ ID NO: 967 - DNA, 1158 bp, Saccharomyces pastorianus
atgtttcgagtctctgaaaatcgcctaaacttactgctgagaggccgcgcaacacatgcaagcgtgttgagaagacttttgagtacgcgtattaaggaagaaaagactaccttagaggatgctggcattatctctaatagaacaattcacgaaaagcaaaatcaccatattgaagggattactaaggacaatgatctggaattactagaaaaaggtatcaggaaatctgacgagatgacttccaatttcacaaattatatgtacagatttcacagactccctcccaattacggaagtaatcaactcatcaccatcgataaggaactgcagagagaactgcatggagttatggcgtctttcaaggctccttgcaggtttgcatttggttacggctccggagtttttgaacaagcagggtattctaaaacagatagcaaaccccaaatcgatattatcttaggtgtcactcatccatcacattttcactctattaatatgagacaaaatccccaccactattccagtttgaaatacttcggttccgaattcgtttccaaatttcaagaaattggtgcaggggtgtacttcaacccatttgctaatataaatggacacgacgtaaaatatggagtagtttctatggaaacgcttttaaaagacgtagctacttggaatacattctatatagcggggcgactacaaaaaccggttaaaatattaaagaatgatctacgagtgcaatactggaaccagctaaacctgaaagctgccgctacattggctaagcattacaccctagagaaaaacaacaacaagtttgacgaattccaattttataaagagataaccgctttgagttacgcaggtgatattagatacaaactaggtggagaaaatcccgacaaagttaacaacattgttactaaaaactttgaaaggttccaaatatactataaacctatttacaaagaggtggtcctaaacgattcattttatcttccaaagggattcacattaaaaaacactcaaagactcttactcagccgcataagtaaatcgagtgcactgcaaaccattaaaggtgttttcactgcgggggtcacaaaatcgattaagtatgcttgggctaagaagatgaaatcaatgaaaagaagttag

SEQ ID NO: 968 - DNA, 3075 bp, Saccharomyces pastorianus
atggtggcacggaaatcaaagagggaccaacaaaagcagcttgctaaaccagaggaatccgatgttccaaaggaaaatgaagaagatgaagaacatttgtatggtaatattgacgactacaagcatctaatccaggatgaggaatattgtgatgaagatgtacctcgcgatttgcaatttagcgaagatgaggacgactctgagcgggatgattctttgctggcagaattttcagactatggggaaatatctgaagatgatgaagaagatttcatgaatgcaattagggaagcaagtaacttcaaagtgaaaaagaaaaagaaaaacgataaaagtaaatcatatggccgccaaaggaaagaaagagtgctagatccagaagtagcgcaattgctctctgaggctaatgaagcatttgttagaaatgatttacaagttgcggaaagattatttaatgaagtcatcaaaaaagatgcgcgtaattttgctgcttatgaaactctgggtgatatctaccaattgcaaggaagacttaacgattgttgtaactcgtggtttttggcagcccatctaaatgcgtccgattgggaattttggaaaatagtggctatcttatctgctgatttagatcacgttagacaagccatatactgtttgtctagggttataagcttgaaccctatggaatgggaatctacgtatcgccgggcaatgttgtacaagaaaacgggacaattggcaagagctctggatggatttcaaaaactatatatctacaatccttacaatgcgaacatattaagggagctggctattctttacgttgactatgacagaatcgatgacgccgttgaactttacatgaaagtgtttaacgcaaatgtcgaaagaagagaagccattttggctgctgcagaaaatgctttagattcttcagatgaagaaagcggggcagaagaagaagccgaaaaggaacctcacgatcaagacgaggatatgcagatgtttcctgagattaactggaaaaaaataaattcaaaatataaatgtataccattcgattggtcgtctttgaatattctcgccgaactctttttgaaactggcagtcggtgaggttgatggtattaaagctatcaaaaaatgtgcacgttggattcaacgtcgtgaaggtgaggtgttttgggacggcgttccggatgattcagaatttgacaatagaaggtttaaaaatagtactttcgactctctacctgccattgaaaaggaaaaatcgtatactattccaatcgacatcagagttaggttagggttgttgaggttagacacagataaccttgttgaagccctcaatcactttcaatgtctttacgatgaaagttttaccgacgttgcagatttatattttgaagcagcgactgctttgacaaaggccgaaaagtataaagaagccattgatttctttacgccgttgttggctattgaggaatggcgtacaactgacgtttttaagcccctagcaaggtgttacaaagaaaccgaaacttatggaacagctaaggaatattacgaattggccatcaaatctgaaccaggcgatttggatattcgtgtgtcactcgcagaagtttattatcacctaaacgatccagaaacattcaaaaatatgttagttgacgttgtggaaatgagaaaacatcaagttgatgaatcactcaataggatatctactgagaggggctctggtgatagtttgaacgatgtctccagtaaaccattattagaggatagcaaatttcgaacctttagaaagaaaaagcgcacaccctatgacgcagagagagagagaatagaaagggaaagaagaataactgcaaaagtcgtagagaaatatcagaatatcaagaaattcaagtttgatccagcacttggtgaagccaaacaagccactatatggattaatacggtttcagaactggttgatattttttcaagtgttaaaaacttcttcatgaaaagtcgttccaggaaattcgttggtatcctacggagaactaaaaaatttaataccgagcttgattttcaaatagaaagactatccaaactagctgaaggagatagcgtgtttgaaggaccgttaatggaagagagagtgactctaacatctgcaacagaattaagaggactgtcatatgagcaatggtttgagctatttatggaactttcccttataatagcgaaatatcaaagcgttgaggatggtttaagtgtggtagaaacggcccaggaagtgaacgtcttttttcaggatcctgaaagagtcaaaatgatgaaattcgtgaaactggctattgtactgcaaatggacgatgaagaagaattggcggaaaacttaagaggtcttctgaatcaatttcaatttaacaggaaagttttgcaggtatttatgtattccttatgccgcgggccttcctctctgaatattctaagttctaccattcaacaaaaattcttcttaagacaactgaaagccttcgatagttgcagatatagcacagaagttaatggtcaagcctcaataacgaacaaagtcgtggacaaccccgacaaaaagtcatcgccatacctgtactatatctatgctgttttgctttactctagtagaggctttctttcagcattacagtacttaacgaggctagaggaggatattccagacgatccaatggttaaccttttaatggggctatcgcatattcatcgtgccatgcaaaggttaacggctcaaagacattttcaaatacttcacggattgcgatatttgtatcgctattatacaataagaaaaagtctatacacagatctggaaaaacaagaagcagattacaatttagggcgctcttttcatttgattggtctggtatcgattgcagttgaatattataacaaggttttagagaactatgatgatgaaaagttgaaaaaacacgccgcatacaactgtattataatttatcagcaaagcgggaatgtgcaattagctgataaactcatggaagagtatctaagtgtttaa

SEQ ID NO: 969 - DNA, 1092 bp, Saccharomyces pastorianus
atgttttccgggttcagttcttttggcggaggaaacggctttgttaatatacctcaaacgtttgaggaattctttagatgctatcctatagccatgatgaatgatagaatacggaaagatgacgcaaacttcggcggcaagatcttcctgccaccaagcgctctgagcaaactgtctatgttgaacattagatatcccatgcttttcaaactgactgctaatgaaaacggaaatgtgacacatggtggtgttttagaatttattgctgaagaagggagggtatacttgccccaatggatgatggaaacattgggcatacagccgggatccctattacagatttcatcagcggatgtgcctctgggtcaattcgtgaaattagaacctcaatcggtagactttttagacatttctgaccccaaggcagttctagaaaacgtgttgaggaacttttccacattaactgtggatgatgtgatcgagatcagttataacggaaaaacattcaaaattaagattttagaggtgaaacctgaatcgtcatcaaaaagtatatgtgtcattgagaccgacttggtaacggattttgcgccacccgtaggatatgtggaacctgattataaagcactgaaggcccaacaagacaaagaaaaaaagagccctttcagtaagggtcaagtcttagatccatcggtgcttgggcagggatcaatgtccacaagaattgattatgcaggcattacaaacagtattaataatgatcgatctaaattcgttggtaaaggacaaaatatatctgggaaggctcccaagaggaatccggaacccgggcaagatttaaagaatataaagataacgtttgatggccaacctgccaaactagatttgcctgaaggccaactattttttggatttccaatggttctaccgaaggacgatgaaggaagtgatagtgaagctaaatctaacgaacaaaatttccatggtcaagggatctcgttacgaaaaagcaacaaaagaaaaccgaagaaagatcatgactcgtctaaatcaaaagcaccaaagagtcctgaagtcatcgagatcgactag

SEQ ID NO: 970 - DNA, 843 bp, Saccharomyces pastorianus
atgttttcaaggagcgttttcagaagcacgataccaattaagggaactctccctcgattgtactcgaactctataaaattggctaacctgggagaggttactgattatttggtaggtgacggtgtacctaacttactacaaaggatgctcaaagaatctgtactcgctgataatattactttgagattatttcccacttcgcatccctatatcccagtgttgcacggaagatccaaatataaggcttctttgaatgccatcaggatgatagtacgaaagttcgtactcgacgaagagtgccgcttgcatataagtttagtcaagactttaaattcgacatcgaaaggcggagaattcaaagaaaattctcagaattacaacactcttacgcccaatgacaaactggttatcaagtggcaaagttgtataccggaagatcgttgcaaaatttctaagccagagattaacgacgagttgaaagaaaagaaagacagggtcgaaggggataattcgttttcaattagatcggtaccagtgatagattacattttacatcctacgataaataatctgaatcaaagggttgttacagaatacattgatgacgcagccgaaaagtccatacaaaattttaacaaaaacggagatattaaagaaggtaagattggaaaagatgacactataaaaaagaataaagtgagaaggttatcacggttaataagaggcacttttatatttgaattcaacgaagaaaactctaaaattttagtccataccattgaagacgtcgagttgattcattacggaaaaaaaattgccactggcggcgcatttgcatgttga

SEQ ID NO: 971 - DNA, 1731 bp, Saccharomyces pastorianus
atggccgaaggaagaacttttctttctcagttgaatgtcttcaacaaggaaaactaccagtttccctcttcttccacaaccaaaaagaaatcgagcgccacaacggtagatgttgacaacgatgcctccgattttgaagcaggccaacagttcgctacagagttggaccaaggtgaaaagcaactaggtgttctgtcatgtatcgggcttatctgcaacagaatgcttggtacaggtgttttcgccgtgtcctcgacaatttacacattatgtgggtctgtgggacttgctttgatcatgtgggccgtcggggccattattgccatttctggtttatacgtctacatggagttcggtacagctataccgaagaatggtggtgaaaagaattacctggaagccatcttcagaaaacccaaatttttcattacctgtatgtacgctgcctacatttttttcctaggttgggctgctggtaactccataaatacagctgtcatgtttttaactgcggctgatgcggaaatcacgaaatggaaccaaagaggtattggtgtggctgtcgttttctttgcgtttttgataaattctttgaacgttaaaattggtttatatctacaaaacattttgggtgttttcaaagttggtattgtccttttcatctccattaccggttgggttgcccttggtggtgggctaaaagacggttaccaatctcacaatttccgtaacgcctttgaaggtaccgaaactgccactgcttacggtattgttaacgccttgtatagtgttatttggtcatttgttggttactcgaatgttaattacgcacttggtgaagttaagaaccctgtgagaactttgaagatcgcaggtcctacatctatggtttttttggcaatcgtttacatttttgtcaatattgcctactttgctgtggtgccaaaagaaaagctaatatcttccaagttagtcttagcagctgatttctttgatatcgtttttggtggccaagccaaaagagctgctgccgcattggtcgggttgagcgccttgggtaatgttctttctgttattttttctcaaggtagaatcattcaacagttgggtcgtgaaggtatcctgccgttttccaacttttttgcctcttccaaaccattcaactccccaatggttggtttgtttcaacattttgttgtctgtacaatcaccattatagctccgcctccaggtgatgcgtatctactagttcaaaatttgatttcttacccaatgaacattatcaatttcgccatcagtgctggtttactatggatatattggcaacgtagacaaggtaagattgaatggaacccaccaatcaaggccggcgtttttgtcacagggtttttcgcattatctaatctatatctgatcattgcaccatatgttcctccatcaaacggcgagtccgtttattcaagcatgccatactggatccactgtgtgatcgcatggggtatcttcctctttggtggtgtttactacgttgtatgggcacaattattaccaaaatggggccactacaaattggtcacgaaggatgtgcttggtgaagacggattttggagagtcaagattgccaaagttcatgatactaatgacagcgatgatatggatacacaagaagacggtattgtcgaaactgatataatcgaacattataaaagtgaagaagaaaaacaactatag

SEQ ID NO: 972 - DNA, 993 bp, Saccharomyces pastorianus
atgtgtgcgaaaaagctcaagtatgctgccggagatgactttgtacgttacgcaacgcctaaagaggccatggaagaaacccgacgtgaatttgacaaagagagacaaaggcaacaacaaatgaaagccgctccaccaccaccaccaccaccgtctaacactagaatccattcggctccaattcctctccaaaatcagtacctcaaaaaccgggttgagagcggacaccaatcttacggctctccccaaaattactctcttagacatacgaaagtacctattgatcctagatataataacacggtacagaaaccggccagtaggcctatccccccacaaccgaagcattataacagtgcagcctcatcctctctacgcatagcctcccctgcatcagtgcataacccacaagtaccggcctcaactgctccttttgatagtaaagaagatctgagagatatgcaggtagccgttcagctgtttcacaaccatgacattaagggcaaaaatcgactgacggcagaagagttacaaaacttattacaaaacgatgacaattctcatttttgtatatcatcagtggatgccctaataaatctatttggtgcttcaaggtttggcactgtgaaccaggcggaattcatctctttatacaaacgagtgaagagttggagaaaaatctatgtggataacgacatcaatggatcactcaccatttctgtaagtgaatttcataattcacttcaagaattgggttatctgataccttttgaggtccgtgagaaaacatttgatccgtatgctgagtttataaatagaagcgggacaggcaaagaactaaaattcgacaagtttgtggaggcattagtttggctaatgagattaacaaaattatttaggaagttcgatactaatcaagaaggtattgcaaccatacaatacaaagattttatcgattctacattgtatttgggccgtttcttaccacactga

SEQ ID NO: 973 - DNA, 1536 bp, Saccharomyces pastorianus
atgaaatcaaaggagggtaggctgccaacagattgtcccgttgagttttcccaaataatcactggattttctgaggaggccaaagtacataaacaaagttctcaaggaaaacacgtggatcaatatcaaacaaaaagccctaaatcaagaagtattagacagagatcatcatcttttgtaaacggtaagtgcaaaagcaaagaaactccattgtcagaaaattatggtgtagacgaaatgaattcaaaattagacggccgaaatattgggattagaaatttgccacaccagcgcgagttgttgaatgccaagaatggaatccactttacagtgatggtcgcaggtcaaagcgggttgggcaaaacaacattcattaattccctgttcgctacctccttgattaacgacaatatcaaagaaaataggcctatcgttcgttataaaaatattatcgaaggtgacggaacacaccttagatttggggtcattgatactcctggcttcgggaatgatatggacaatgcgttcacatggagaacaatggtcaactatattgacgaggaaataaggtcctatatttttcaagaggaacagccagataggacaaaaatgatagacgatagagttcattgttgcctgtattttctgaagccttccaataaaggcattgatgcattggatgttttaacaatgaaagaattagcaagaagggttaatctaattccaattatcgcaaaagcagacttattgactaaacatgaactaagtattttcaaaatggaaattagagaaattataagagtacagaatatttccgtttgttgtttttttgataacaatattctagatgcaacaaaagatattttccagaagtttccatttagtataattgcgtctaaagagtatgtgttaaataaaaagggcgagaaagttaaagggagagaatataagtgggggactgttgaaatcgagaacgaaaagcattgtgattttaaaattctacaaaagattcttcttgactggcatctgatcgactttgtagaaagtactgaagattattacgaaaagtgtagatctgaaatgttaagaacaaggttattaaaagccagagactgtctaaccaccaacacggttgaaataacggatgaacagagaaagtttttgcaagaggagatgaactttgaagacattgaagagaacaaattgaaaaattataaatgctatgaaataatcaataaagtgattatggataaagtggctacagaatgggaccctgaatttataaccagacagctagaggccaagaaaaggttcaacgatatttctaaccaagagattctcaagattaaggaatggaaaaaaagcctatttatgaaacaggaaaacttcaatcaagaaatcgaagaactgaatcataatttggagaacttacaattggaatgtcaagatttagaatacaggttactaatggataagagttccaaccatcattcaacggatagtgctactttagtgaacgttcacatcaagagatga

SEQ ID NO: 974 - DNA, 930 bp, Saccharomyces pastorianus
atgtctgccgttttcaataacgctactctttcaggtctggtccaagctggcaccttttcccagactttacaaaatgtcgcgcactaccaacctcatttaaatttcatggaaaagtactgggctgcctggtacacttacatgaacaacgatgtcttggccaccggtctaatgttcttcttattgcatgaattcatgtactttttcagatgtttgccatggttcataatcgaccaaattccatactttagaagatggaagttacaaccaaccaagattccaagtgctaaagaacaactatactgtttgaagtctgttcttctatctcatttcttggtcgaagctattcctatctggacattccacccaatgtgtgaaaaattaggtattaccgtcgaagtcccattcccatctattaaaaaaatggctttagaaatcggtctattcttcgtcttagaagacacatggcattactgggctcaccgtctgttccattacggtgtcttctacaagtacattcacaagcaacatcacagatatgccgctccattcggtctatccgctgaatacgctcaccctgctgaaactctatctctaggtttcggtaccgtcggtatgccaattctatacgtcatgtacaccggtcacttacatttgttcactctatgtgtatggatcactatgagattattccaagctgttgactctcattccggttacgatttcccatggtctttgaacaaggtcatgccattctgggccggtgccgaacaccacgatttgcatcaccactacttcatcggtaactacgcctcttctttcagatggtgggattactgcctagacaccgagtctggtccagaagcaaaggcttccagagaagaaagaatgaagaagagagctgaaactaacgctcaaaagaaaactaactaa

SEQ ID NO: 975 - DNA, 951 bp, Saccharomyces pastorianus
atgtttaagaggttaatcaatcgtcaaaatgctgttgcattttccttaccaagcccagctggcctacggtatggtaggtttaacgcgagtacgaagagaaatttctcactttttcaaagtgtagcagacacatttctaactctacatgaggcgtcgcagataccttggatagtgattgttcccttgagtacaatcacactcaggaccctggtgacgctgccattcagtgtgtggcagcggaaaagaatattgaaacagcaagaactgaggaaactggttcaaccaataacgcctattgtcaaacttcgattagcagctatcactaacaaaaagtccaagaaccctgtcaagattaacgcgaatggcaccctcattccactaccagtgcaggatccaggcgtcttgaccccagatcaaatcactcttctagcagtgaaagagacaagaaataggcaaaggaaactattcaaaaagtataatgtctcattgtggaaaaacgcgctattgcctattgtccaaattccgctttgggtgacgctctccatgggtatcaggacgcttacagaggcccagctaatagaaactttctatcctgcttggattgctgcactggggttcggatctttcgatctaagctcacctttaacagcaatgcccctattagcgcccattctggttggaactttggccgtgctgaacgtggaatataacggccgactaatgtttagttccaacatgtcatcgcaaggtataaagactgtttcaagaaattcgtccagagtccaagaggcaatggccagcatactgaatgtgtcgaggctcggctgcgtcgtcatgctagcaatgtcctcgcaggctccattccttctctcgctctactggatctcctcacagctgtactctttggtgcagaacattgtccttaactggatatacccctaccaaagatga

SEQ ID NO: 976 - DNA, 888 bp, Saccharomyces pastorianus
atgtcatctctaaataacactggagggaaacttattgcgcaaaaagctaaggaagatgacgatatcgaagacatattcgcttcaacctatgtttaccagtctgctgtgattaaaaatccctcgattgatatctcgtctcccaaaggaaaaaagggcaaaagtgatctgtatgaagaagagacccattcaatgggcaagaatggcaaatatatctacaagtcggttgacaggcatttggacttcttgagaccaggcttgagatttggtggctctcaatcgtctaaatacacatattatactgtggaggtaaaaattgatactgttaatttgccactttataaaacctcgcattctttggacccacacgtcacaggtacgtttaccatacgaaatctgactccagtactggataaagtggtcactcttttcgaaggctatgtgatcacgtatgaccaatacccattatgttcgacgcactggcccgcagaggaaccgtttgatccgtacatggctcaaagagaaagtgattgttctcactggaaaaggtttggtcacttcagtactggaaaatggtcaccgacgcaaagaaattttggtcagtacgattacgacaccacagaatttatgaaccaacgttatatttatctcaaatggaaagagagatttctactagataacgaagatcaagataacctgacgttaaatgatatctatcacctggacggtgcctcatttgaagggttttactacgtctgcttggaccaagaaacaggttcaatggagggttattactatcatcctgcttgtgaattatttcagaaactcgagctggtgcctactaattgtgatgatctgaatacccattctagtggatttgaaattgcctag

SEQ ID NO: 977 - DNA, 3450 bp, Saccharomyces pastorianus
atgaatagtaatgaactgaatctaaggcatgaatatttttatgaaattttcggtaaaaagagaaaatcggacacttttgttcctactcagccatatactctcaaggttcagccagccgtcggtgacatttccatagagaacgatgaagacgtagtcgaaaatgagactacattcaaagacatcgcattaacacatgacgccagtgcacaatataatactgcgccaaaggctttccttcagcattcgaagacatctcctgctctacacatttcaacaaattttaattcaagttcccaacctttcttgacagacgtgttgtactccaaaagtaaaatagaccaaccaatacatgcatcaaatggccggaacgctgctgccaaagccttgtcaccttctcaaaaaagatcgaatcctatattgccccccaacacaaaaaaatattcgtctaactcaatattatcgccatccaagggcaatagtagtcatgccgtggatccgaatccgtattctactcctccaactcccaaaagtgcagacctcataacggcttcccatgattcatttgataaaaagcccaatacttcaagcacttcttctttgtttgctttggattcactgaaaaatcaaaataggcgctcatcaaactcttccaatcattcgaatcagtatcaacgctacggcaaccatcatcaccgccatcattcaagatctaaatcaagccccgtctccctatcagagatttctctgatcaaaggaacacccctggtttactctgcacttttatcattgatcgctataaaattcaaacagactattcaattaagtactcataagaaaatgggactactttatagagattcatttacagggaaacaagcgattgatacattgtgcttgatcataggcactttaaatcgtaatttgggtttactaatcggtaaatcgttggaagctcaaaagttgttccatgatgtcctttatgaccacaatataagggattccgtattagaagtttatgagttttcttcaagttcggttttcatagctcatcagttacatagttttacgtcagttgccagtactctttcttcatcaacttcttcgattaacttagttggtactaaaactgaaattaatggtgttttcgttccactttcgcattgttattcgcccacatgttctatggaaaaactttgctactctatctcctgtcctaatcgtttgcaacaacaagcaaagctacatttgaaattaggtggtggccttaagagaaacatttcgttggcactcgataaggacgacgatgaaagaatctcttggacaagttccgtgccaaagagtatatgggagtcattactcaaaacacaaataaaaagacaagaagcaatatacgagttatttaccacagaaaagaaatttgttaaatccttggaaatcatacgagatacattcatgaaaaaattattagaaacaaatatcattccatcagaagtaagagtaaattttgtgaagcacgtctttgcacatgtcaatgaaatttattttgtaaatagagaatttttaaaagctttagcacagagacaagcattgagttcaatttgtcctggaattgctgatatatttttacagtatcttccgtttttcgatccgtttctctcttacatcgcatcaagaccatacgccaaatatctaattgaaacacagagatcagttaatccaaactttgctcgttttgatgacgacgtgtccaattcctctttaaggcatggaatagattcgttcttgtctcaaggtgtttcaaggcctggtagatactctttgttggttagagagataattcattcttcagatcctgtaaccaataaagacgatttgcaaatgctaatgaaagtgcaggatttattgaaagatctaatgaaaagaatcgatagagcaagtggtgcggcacaagatcgttctgatgttaaattattgaaacagaaaattctgttcaaaaacgagtatgtcaatctaggtctaaataatgaaagaagaaagattaagcatgagggcctattgtctaggaaagacgtaaacaaggtggacgcatcgtttgcaggagatatccaattttatctgctcgacaatatgttattgtttttgaaatcaaaggcagtaaacaaatggcaccagcatactgtattccaaagacctattccattgcctctgttgttcatttgtcccgctgaggatatgccatccataaaaagacacgttactgaaaacccaaattgctcagcaggcatactttctccccaatatcaaacaagcaacgtcaaaaatgccatcacgtttgcctattatggtactaaacagcaatatcaagtagctctgtatgccccacagctggctgggttacagacattgatagagaaggtcaaacaagaacagagcagatatcttgatgaaactaagcagatcacttttaagcagttgataggccaatttttccattcttatacaaataataatcacattaatgatgttttactattttcaggaggtagattattattagtcgcaacaaatctcgggctttatgtcatgaattataactcttcgatcaaccagaaaccaattcatcttctgcataaaatctcgatatcgcagatatctgtgttggaagagtacaaaatcattgttttactaattgataagaagttgtacggttgtcctttgaatataattgaagatccacaaaatggtgattttattttcaaaaagaaatccaaggtcttgtcaaaatatgtcatgatgttcaaagatggtatctgtaatggtaagagggtcattttggcagctcataactttttgcatacgataaagttaataaatgtaggtcccttgatatctgactttggcaatagtaattttaagaaaaacctgaaggcaagcttactggagtttagtgtcgattcagagcctttgtcattttcatttctggaggacaaaatatgcatcggttgtaaaaagaacataaaaacactaaacgtgcctaacgtttttgaaaagaattctttcaaaataagagaaatttttaatccatacaatgacaaagtgttattggggttttgtaaggaaacatttaaagcgatttccatattttcagtgaaaaacctatattttatttgtttaccagaacttggattctttgtgaataaacaaggaaggagggaagaagcaaaagaaattatccattgggagggggaagcacagcagttcgcatattctcatccttacgttttggcagttaatgaaaactttattgaaattagggaaatagaaaacggcgagcttgtacgttgtgtactcggcaataaggttcgcatgtttagggcacactctcaaagtattttatatagttatgaagattctcatggatttgaaatcgttgaatcgctaaatttttga

SEQ ID NO: 978 - DNA, 1173 bp, Saccharomyces pastorianus
atgagcaatccggctggagaatcgaagaatagtgaagggaagaagaaatatagaggaaataggtatcacaacaataagaatagaggtaaaaacaagaatgaggactctaaaaagaatgaggattctaaaaagaatgagggcaaggtaaataacggtagtgttagcagcggcagtaaaaacaagagaaacaacaaaaagaggaacagagagcattataactacaaaaggaaacctaaatctggtaaatcgactgaaaatgaaggatacaaacttgtcgtcagattattacctccgaatctgacggcagacgacttctttgccattataggaaacaccaatagcgacagtgatgataaagaaggtattcaggataaatttaagtatagtgattggtgtttttttgaaggtcattattctagtaaagtattcaagaactcaacgtattcaaggtgcaattttctgtttgatggcttacaagatttggaaaagttcgcagatttcataaaaacttgtaaattcattgataacaaggacaatattacaaccccagacttgaaactatcgccatacgtgaaaaagttcacacaaacgtcgaagaaggactcggcacaagaggggaccattgaagaagatgaaatcttcaaaacatttatgaattctatgaagcagctcaacgaaaatgatgaatactcatttcaggactttagtgtcttgaagtccttggacaaagaattctcaaggagtctagagttggagaacaagatagcagagaggactgaaagggtattaacagaactagttggtgctggtgacaaggtcaaaagtaagaacaagaagaaaaaaaacaaaaatggtaaaaaaaaatatcaagacgaggaatcaagcaataaaattcccaagaagaagcggaatagaaacaaaaagaagcacgatgaccgtgagaaaagcagtgccaccaagactaagaatagcaacgtggtgataattgaggaggcgggtaaagaagtgttaaaacaaaggaagaagaagatgcttttgcaagagaagttaaagcaatctaattcttctcagcctcaatccccatccactcaagcgcagtcgtcgttcaaattcaaagaaaatacatcgatatcacgagtcaaaattctacatcgagatgataccgagaagtga

SEQ ID NO: 979 - DNA, 450 bp, Saccharomyces pastorianus
atgaagctggtcaactttttgaaaaaactgcgtaatgagcaagttaccatcgagttaaagaacggtaccacagtttggggaacactacaatcagtatcaccacaaatgaatgccatcctaacagacgtaaagttaacgctgccacaacctcggctaaataaattgaacagcaatgggattgcaatgtctagtttgtatttgagtgggggtcaacaagccacgacaggtacgacgggtgacaatatagcaagtctgcaatacatcaatattagaggtaataccataagacagataatcctgccggactccttgaacctggattcgctgctggttgaccaaatgcaactaaacgccttaagaagatcgggccaagttgccagtgaccctaataaaaagagaagacgtgactttagtgctccagtgaataaaagaccaagaagaggtctatga

SEQ ID NO: 980 - DNA, 729 bp, Saccharomyces pastorianus
atggccaccaaagaatttcaagtggagtcccacatctctttgaagcagttgaataaccagtcggtatctttgattattcctcggctgacaagagataagatccacaattcaatgtattacaaagtcaatctgagtaacgagtctttgaggggcaatacaatggtagagctactgaaagtcattatcggcaaatttggcgcattaaaggatcaggatggtcatatgaacatgtctgttctaggtggtgtagaatttaagtgcatcctgatgaaactggttgaaattagacccactttgcaacaattgaccttcttattaaacgtgaacgactcgaacacttttagttctaagtacattaccgctttgattctggtttatgcgcggttgcaatactattatttaaatgataaaaataacaatgatactaatgccgatgatttggtaaaattatttaaagtacaattatacaaatattcacagcagttttccaaactaaagagtttcccactacaagtggattgctttgctcattctaataacgaagaactctgtataatacgcgttgatgaattagtcgattggttggtcactcaagaccacatctggggtattcctttaggtaagtgtcagtggagtaaaatatacgactcagaagaagaaagtagctcaagtggaagtgattatgaagatgacagtgaaagtggcagtgacagcggtagcgaatcatag

SEQ ID NO: 981 - DNA, 474 bp, Saccharomyces pastorianus
atgtcgtacaaacaatactttgatggtttacctttaaaattaaagtcatttttccaaagatatccgccttcaatcaaatattcttcggtatccacatcaacaaaggccgttgatgccaaccccttcttgccaaataaacatccagtcacacaacggttacatgatcctaaatactcattaagaagaatgagcgatgtatataagctggcattgcgttatggagtgcaagactttttaccacctatcgataatactaagaaacttttcttcgaagacaaatacgataagaaaactttaatgaagggtgttctcttacctaaaggtcataaacatgaactcaaattgaatgagaagttgatgaagcgtgaagaggctttgaagaatgtggacaatctgattgcatccaagaagggttcgaaatacgcaaagaaattagaaaaaatgaaaacaacccaaagtataggctggttctaa

SEQ ID NO: 982 - DNA, 1008 bp, Saccharomyces pastorianus
atgtcaacccaatctggtattatcgcagaccaaggtttgctggattccttgaacgagaatctttccacggacggtgttgtcattgtcatagccaagatttcccctgattccacctcggtacatcaattagacgtaacccataatttggaccaattggttcatttggcttcgcaaaacaaggaacccctgtacatcttctataagccccagaaggttgccaaatactttttcgtgtcattcatccccgatggttctccggtgagatcaaggatgctttacgcctcgactaagaacacgctggcaaggcagatcggctcgaactctctatccacggagcagccgttgatcacggacgtacaagaactggcggacttgaaagagcttgatggtgatcgtactgttgctcaaaataaacctttgacggaagatgaaaaaatgcaaattgaaataaacaaacagcagacactcttgaggaaatccgtcaacaataactcggtcaaacttgtctcccaggacagcccttcacctttgtcactgactttcaaggtcgattccgagaggcctatagacgaaattttcagtaatgacggtaaaaacctgatcattttccaaatcgagcctacaaatgaaaccatccagatcgtgcaatcagagacgtgcccctctgtggatgcgttacaaatcgacttgcctgggcccagctatacgatatttaagcatgacagtttgaacttctttatctattcttgcccatcgggcagcaaagtcaaagatagaatgatgtatgcttccaacaagaacgggttcatcaactacttgaaaaacgaccaaaaaatctcgttcagcaaaatattggaaattggtgacttcgtcgaactagacaaatcgtcattgtccgccaaaagtgacgaagatgaccttgaccgtggttccactccagaccaatcgaacaacggcagcttgagattcgacaaaccaaggggcccaatgaggaaaagaagaacatag

SEQ ID NO: 983 - DNA, 552 bp, Saccharomyces pastorianus
atgtcccaatcaaaccctgtcttacgtggctttgccatcacaacagctatagctgctctaacagccaccggttatgctgtttactttgactaccaaagaagaaacagctcacaattcaggaaagtcttgaggcaaagagccaaagaacaggccaagatggaagaagaggccaagagccatgccaaggaggtcaaactgcaaaaagtcacggaattcttatctgtagaattggctaaggatcctatccctagtgatccctctgaaagagaggccacattcactaccaacgtggaaaatggtgaaagactgtccatgcaacaaggtaaagaactagaagccgcttctaaattttataaagcattgactgtatatcctcaacctgcggatttgttaggtatctatcaaagatccatccctgaagccatttacgaatacattatcttaatgattgccatcttgcctcctgctaacgtggcttctttcgttaaaggtgttgttggaagtaaagccgaatcagatgctgttgctgaagccaacgacattgacgattaa

SEQ ID NO: 984 - DNA, 1953 bp, Saccharomyces pastorianus
atgagcgaatctgaagccaaagcaggagtagctacaccaccaggtaaatccgaacaagctgctccagtagcagcagcaaccagcggtgaaaagaaactatctaataaggaattgaaagaaatgaaaaagcaggaaaaggctgcaaagagagcggcactgaaacaggctaatggtatgtccatcgagcagcaacaacaacaagcacaaatcaaaaaagagaaaaagcagttgcaacgtgaacaacaacagaagagagaacaaaagcaaaagaatgctaacaagaaaaagcaaagcgggcaaaacgtgaagaaaagtaccctttttggtcatttagaaaccactgaagaaagaagagccaccatcttggcggtgacaagtgcagtatcatctccaaggacttctaggatcaccgctgccgggttgatggtccccgtagtggccagcgcattatcaggatcaaacgtattgacagcttcgtctttgatgcctacgggctcaaatgctgcctctacaccagcaactacggcccccacatcagcgacaacgacaatttccgcttcttccacagccctctctgctgcttctacttcaacggcaacaatcactacaactgcggtacaacaagaaattgcctcatcaaacgcatctgatgttgccaagacattggcatccatttcattagaagcaggtgagtttaatgtcctccctggtatatcttcagtgattccagcggcattggaacagtcgtttgatagttccagtttggtatcatccgttaaggaactgttacttaacaaagatctcattcatccatcaattttattattgacttcccatttggcacactataaaatagtgggatccatcccacgttgcatagctatgctcgaagttttccaaattgttatcaaagactaccaaacaccaaagggaaccaccttgtcacgtaatttaacaagttatttgtcgcatcagatcgatcttttgaagaaagctagaccattaagtgtcactatgggtaatgctataagatggttgaaacaagaaatttcgttgatcgatccatctacacccgataaagcagctaagaaagatctttgcgaaaagattggacaattcgccaaggagaaaattgaattggctgatcaactaatcatagacaacgcctcgacacaaattgaagactctactactatcgtcacgtatggctcatcaaaagtcttgactgagttgctacttcataactctattggcttaaagaaaaacattaaaattattgttgttgactcgagaccattattcgagggccgaaaaatggcagagacattaagaaatgcaggcgtcaacgttatgtatgctctcattacaagtttagacacggttttcaacatggacgtggattatgtattcttgggagcacattctattttatccaatggatttttatactcaagagcgggtacagcaatgttggcaatgagtgctaagagaagaaatatacctgtattggtgtgctgtgaaagtttaaagttttcacaaagagtgcaattagatagtgtaacatttaacgaattggcggatccgaatgatttgattaatatagattatgaaaatccagtggaaagacgtggtaataaaggtgcgttactaaaccagttcgtgaaggagaggaaacttgaaaagaaaaaactagaaatggaaaataaaccaaagggtaataagattggcggcaagaaggggtctgaagaagaaaataaagatgttaatgatgagggagataacggtgaaaaaaacatcttggatggatggcaagaactaccttcattaaatattgtcaacatattgtatgatttgacgccacccgaatacatcaaaaaggtcatcactgaattcggtgctttgccaccttcatctgtgcctgttatcctaagagaatacaaaggttccgcatag

SEQ ID NO: 985 - DNA, 1011 bp, Saccharomyces pastorianus
atgcacagaacttactcgttaagaaacttcagagcccctacggcctctcaattgcaaaacccacctccaccaccatctaccaccaagggtagattcttcgggaagggtggtctagcctacagcttcagaagaagcgctgccggggcctttggcccggaattatccaggaagctatcccagttggtcaagattgaaaagaacgttttgagatccatggagctgactgccaatgaaagacgtgacgccgctaagcaattgtccatctgggggttggaaaacgacgatgacgtttccgacatcaccgacaagttgggtgttctgatctacgaagtcagtgaattggacgaccaattcatcgaccgttacgaccaatacagactaaccttgaagtctgtcagagatatcgaaggctctgtacaaccatctagagaccgtaaggataagatcaccgacaaaatcgcctatttgaagtacaaggatcctcaatcccctaagattgaagttttggaacaagaattggtccgtgccgaagccgaatccttagtcgctgaagcccaattatctaacatcacaagatccaagttgagagccgctttcaactaccagtttgattccatcatcgaacactccgaaaaaatcgctttgatcgctggttacggtaaagctttattggaactattggacgattctccagtcactccaggtgaaaccagacctgcctacgacggctacgaagcatcaaagcaaattatcatcgatgctgaaagtgcattaaacgaatggactctagattccgcccaagtcaagcccactctaagtttcaagcaggattatgaagacttcgaacctgaggaagatgaagaagaggaagatggccaaggcagatggtccgaagacgaacaagaagacggacagatcgaagagcctgaacaagaagacgacgacgtagttgaagaacacgaacatgccgatcatcaacacgaatctcttcccgagcacaccactgcttaa

SEQ ID NO: 986 - DNA, 1692 bp, Saccharomyces pastorianus
atgtcagagattactctaggtagataccttttcgaaagattgaagcaagtcaatgttaataccattttcgggctaccaggcgactttaacttgtctctgttggacaagatatacgaggtcgacggactaagatgggctggtaatgccaatgagctgaatgcagcctatgccgccgacgggtacgcccgtattaaggggctgtccgtgctgattacgacttttggtgttggtgagttatccgccttgaacggtattgcaggttcgtatgctgaacatgttggtgtgctgcatgttgtcggtgtgccctctgtctcagcacaagccaagcaattgctactgcaccataccttgggtaatggtgacttcactgttttccacagaatgtcgaccaacatctcggagaccacatcgatgattaccgacattgctacggctccctcagagatcgaccggctgatcagaactacgtttgtcacgcaaagacccagctatttgggactaccagccaatttggtggacttgaaggttcccgcttctcttctcaacaagccgattgacctgtcgttaaagcccaacgacccggaagccgaaaaggaagtcatcgacactgtgctggaactgatccagaattccaaggaccctattattttgtctgatgcctgtgcctctagacaccatgttaagaaggagacccaaaaattgattgacttgactcaattcccggcctttgtgacgcctttgggtaaaggttcaatcgacgaacaacaccccagatacggaggtgtttatgtgggcacgctgtccaagccagacgtgaagaaggccgtcgagtcggccgatctgatcctttccgttggtgccttgctgtccgatttcaacacaggttctttttcctattcctacaagacaaagaatgtggtcgagttccattccgactacatcaaggtaaagaacgcaactttcccgggcgttcagatgaagtttgccctgcaaaagttgctaagcgtcatacccggggtgatcaaaggctacaaggctgtccccgtgccaacaaagactccccccaacaaggaagtggctaccagcactcccttgaagcaggagtggctatggaacgagctgtccaagttcctgcaagagggcgacgttattatatccgagacaggcacgtccgcgttcggtataaaccagacaagcttcccgaaggacgcctacggcatttcacaagttttatggggctccatcgggttcactacaggcgcgaccctgggcgctgcgttcgccgcggaggagctcgaccccagcaggagagtcatcctgttcatcggtgacgggtcgctgcaattgactgtgcaagaaatatccaccatggtcagatgggggttgaagccgtaccttttcgtcctaaacaacgacgggtacaccattgagaagttgattcacgggcctcacgcggagtacaacgaaattcagacctgggaccacctcgccctgttgcccacgttcggcgccaagaaatacgaaaaccacaaggtcgccactacaggcgactgggacaagctgaccagagatccggagttccagaagaactccgtgatcagactgatcgaactaaagcttcccgtgtttgacgctccagagagtctgatcaagcaagcggaactgaccgcggccaccaacgccaagcagtaa

SEQ ID NO: 987 - DNA, 1722 bp, Saccharomyces pastorianus
atgctatctaaatcagagaaacacatcgaccttttggctgggaacatgagcaatctgagtttcgatggacctggaactcctagaagcgctggactatttaacgtcaaccaaaacaatacaaacaggaggacgaggcctgccggttttaatgattctccctctccgataaaatcttccctctttccgcacgaagacagttccaacatggacattgatgaagtgtctcaaagcgatatggatatcactaactctccaaagaaacttcctccgaagttttacgaaagagcgacttcaaataaaactcagagagttgtcagtgtttgtaaaatgtactttctggaatattattgtgacatgtttgactacgtaatcagtagaagacaacgtacaaaacaagtcttagaatatttacagcagcaaagccaactaccaactgctgaccaagcaaaactcaatgaggaatggtcttcatacttacaaaaggaacaccaagtcctgagaaaaagaagattgaaacctaaaaacagggattttgaagtgatcacgcaggttggtcaaggtggttatgggcaagtttatttggctagaaagaaagacacaaaagaagtgtgtgcgttgaagattttaaacaagaaattactgtttaagttgaacgagaccaaacacgttttaacggaaagagacattttgaccactacgagatcggagtggctggtgaagctgctgtacgcattccaagatctacaaagtctatatctagctatggagtttgtaccaggtggcgatttccgtacattattaataaacaccaggtgcttgaaaagtgggcatgccagattctatatcagcgaaatgttttgtgcggttaacgcattgcatgatttaggttatacacatagggatttgaagccagaaaattttctgattgacgccaaggggcacataaaactaacggattttggtttagctgctgggacgatttctaatgaaagaattgaaagtatgaaaataagattagaaaaaatcaaagacttggaatttccagcattcacagagaaatctatagaagacagaaggaaaatgtacaatcaactgagagagaaagaagtaaattatgcaaattcgatggttggatctccagattacatggctctagaagtcttagaaggaaagaagtacgactttaccgtggattattggtcattaggttgcatgctctttgaaagtttagttggatatacaccattcagcggatcatccactaacgagacgtatgataacttaagacgctggaaacagactttaagaaggccccgacaatcagatggaagagctgcattttccgatagaacatgggacttgataacaaggttaattgctgatccaataaatcgactaagatcctttgaacatgtcaaacgtatgccatattttgcagacatagatttcagtactttgaggtcaatgattccgcctttcactcctcaactagatagcgagactgatgcaggttattttgatgattttactagtgaagctgatatggctaaatatgctgatgtattcaaaagacaggacaaactaacggccatggtagatgactctgcagtatcatcgaaactagttggatttacctttaggcacagaaatgggaaacaaggttctagtggcgtcttatttaacgggtctgaacactcagacccattcgcaactttttattga

SEQ ID NO: 988 - DNA, 1518 bp, Saccharomyces pastorianus
atggcaagtgcgaaggttttggtaactcacataaatgaaagcgatgccgatgaggcaatcacgaaggttaagaaactaaataaaaaatccggtccttttgacctaatgattatattcggcaagtcatatggtgaactggttaaattaaacactgacggtttacctcaattgctattgatctcgtcaaacgataatgacgatgattcaaagtcaaagaaaatgagcgaagatgtaacattactgcataactttggtacctataaactggcaaacaatatcaccatttcttaccttgcctattctaatgacgtgctacaagaacaaaaggacactattctggataaattcagtaaacttgataatcaagtagatatcctcatcacacaagaatggggtctcccgatttccgagagaagtggaaagttatctggaaatgaggtgatcgatgagttagcaaataaggtgcacgctagatatcattttgcgttttctgatgaaaaaaacttttttgaattggaacctttcagctgggaaggtggccgtgtatcgaggtttctcaatattccaaaatatggatctggcaagaaatgggcctatgcattcaacatctcagtaggtgacgatgaagaagttgaaccttccaaccttataagtaatccctacgagagtgctagtttaaaccgcaagaagagaccattggaaatagaaacaggagaagtggttaatcaagaccgtaagatttctgccattggagagaagagtgaaattaagaaaatgagaacgattctaccaaccaattgccatttctgcttttcaaacccgaatcttgaagaccatatgataatttcaataggtaagctagtttacttaaccacagccaaggggcctctgagtgtacccaagggtgacatggatatgtcaggacattgcctcatcatcccaatcgaacatatcccgaagttgaactcaagcgagaagatagagctggcacagagcctgttagcttaccaatccagccttgtaaaaatgaattatgtaaaatttgatatgtctacggctgttttcgagatacagtctgaacgttctgttcatttccataagcaagttgttcctattccgaaatacctgattttgaagttccgtgctgctttagatagacaggttcattttaataacgaaaagttcactagaaatgccaaactcgagtttagatgctacgactctttttcctcagaagagtatctggatattgttaaccaccaaaccaataattacttgcaattcactgtctacgaaactcccgaatcaaatccaaaaatattcctggccagcttcaactccagcgaaacaatcgatttgcagtttggaagacgcgtattagccttcttactaaatttaccacgtagagttaagtggaattctccaacttgtctacaaaccaagcaacaagagtccacagaagcagaaaagttccaaaaggcatacaaggattacgacatttctctcccagaaagctaa

SEQ ID NO: 989 - DNA, 3435 bp, Saccharomyces pastorianus
atgtctgattactttagttccagacctttgcaaacgctcacaccgatggataataggccttccggcggtggtggcggcgatgatgcctcctccatccactcaaagagctcccagtatttgatggatatcttaccggattcgatgactctgaatgaaagtgtctcttctacagtagccaacaatcaagcaaaggagttcattttgcccgaatccgacgagaggtctccctatcacatcaatgtccctatacccaaggcccagtcggcttctacagaaacgaaaaagcctctgtccggtgatgcagacactgtcgatgggcagtttgtcaaggagtatcctactgacattcttgtggacagattttacaaatggaaaaaaatcctgaaaggtttgatcatctatttaagggaggtcgcttatgctcaagaacaatttgcaagaatcaactatcaactgaaggggtccgtcaagtttcccttcctaacggatatcgatgaaaccacaaacactattacagacccatttactgcagctcctagaacgtctaagaaatcgcagccatcacagaagaagacagtgttgactgaaaatgaacagttccaaatgcaaatgcaacaagaacagagagactacccatcccaaccatccgtagacgaaagcacgatgagcttggcgcctcacgagtacaagcctgttcaagctgctgaattaaacaacacgtctgctgcatccgggtttgttaaatttggttcaggctccattcaagacgtccaagttattttgaaaaagtaccatctttccttggctaaccagcagttcaaaatctctaaagaaatcacatccactgtgattcctaagttagaggagttaagaaaggatctgagatataagatcacagagatcaaagacatacacggtgatttcaaaacaaacatcgatgcacatgttcaactaacaagccagctgctgaaaaaatatattgcgtccgtgaaattcatgaacgccaatggtattggtaacgacaaagtcactgctacaaataagaagccacacaaattagaccctaaacatgatccgtatcttttgaaactacaactagatttgcaattgaagcgtcaagtagcagaggaaacttatttgcaagaagcgtttataaatttacaaacttcaggtttacaactagagaaaatcatatacactaaaattcagcaatccctactacgttattctgccttaatcgattccgaagctcgtcttatgattaaaaacatgtgccaggaattacaacatggcataatatcaaaacctcctgcatttgaatgggataacttcgtcacccaacacccttcgtgtttactcaattggaaatctaacgaccccataccacctccaagaaagttgtctgatgttgtttatcctcacatgaaatccccactagccaagtgtataagagcaggatacttcttgaaaaaatcagaagtattgcccacttatcaccaaggttatttcgtcttaacgtcgaattacattcacgagttccaaagtagtgatttttataacttatcatctacaagctcaacttctacaaaatcgtcaacttattcatcttcagcatcgattgctgacacttatgccggtgctacaggcaatactaaagttaacactcaccatcgccacagtagcgatgtgcatagtaataatgccgtcaacgctggtacaaccggtgtagctggtactcgctgcatccgcaaaaagagctatttggcgccaattatgagtgttccattaaacgattgtactctaaaagatgcatcgtctacgaaatttgtgcttgtaggaaagcctactcttaatgaaaatgccgatatcaggaaatcgagctccagtacacatgtatccggtgcctctcaaacctctttaccaaagtatggtcatgaaacagcgaaaatattttctaaggccccattccacaaatttttgaagggaggtaaacctaaaaataagaatacgaagtcaagtgagttagaccaattttatgcggcagcacaaaaagaatccaataagtatgtgacttggactttcaaaatagtatctgcagaacctactgaagaggacttgaaacatttcaaaagatgggtccaagatttgaaaaacttaactagtttcaatgatactaaggaaagaatcaagttcattgaagatcgtgtaatgaaatcacatcgattcaaagcaggatatatgtcgaaaaataatatgaacaacgtgttccatacgccttgcctaacagatagctcatttgcattgcaggatgccactacgtcctctctcaatccaaatgggaggtctggaaaaccccagtatattcatattcagaacaattcattggccgattttgatgtaaatgattttagatctagggttaacacacctgccattgatgattacggtaacttgattacagtagaaagaagatcagcaccatctccgcaccagtcccctgattatgcagctacgtcaggtaatacaactccatcttattcatcaggctcaaggcctcagagcgtgtataacggatacaatccagctgtatctataaccagtaatggaatgatgctacaacagtcggcaatgaacagtaataataaaccagcagctagcctgcgtcatcaaagaaatgtttcacaaacaagttctttaccaggcttttcatatacatctccatcgctaccggtaaactctccgggcagttctaattcggaatccagctcaggcggttattttgccatccctcttcatgggaacaacaataacaacaattacatgcaaagaaattctgaagactccagcccatcttataatgaagatcacatacgacaacagcaaccaatgcaatctttatcaaggacttcaagttccagtataatcgctacagggatgagaagtacatctgctgggaatccacctaccacaaacgtagcaattgtgcctaaggtaatggttaataaccaaaatgttaaaactgtccctgctgatcagtcagctacggcaccttcatcacctacgttgaactcttcctcaacaacaaccaatcgcgaatcaccatatcaaacccttaagaaaacaaacagtacaggaaatgttccatctttaagcacagaaaaaacacacgcgcaccctgctttttataaaaggggcaataacagtgctcaaaacttgaccactactggcacaacagcttctagagttcatcctgtcagaaaacataagaaaaatgtatccttcagttctttgaatagtttgatgttttcaaaaaagggcgctaattatggtggtaatctaatgaccaaccaatttatgagtggtgggatacaagaagatgatggtgattcaggtaataacgattctataaaactgaaccagtcaatctattcttaa

SEQ ID NO: 990 - DNA, 2844 bp, Saccharomyces pastorianus
atgtcattctttgattccttgcgtcaaaaggccccatttttagacaagctggccgacacttttactccaactttaaccagggatgagaaattcagattgaagtacaagctaccagctaatgagaacattttagatgatacaaatgctgaagttacattcgcaacccccaacggcaatggcaatgatcattcggatatgaccaataaagggagaaaaacagcctatgtattctctggaagattgtttttgacgcctcacttcctggtgtttcgggatgcattcgatcattcgtcatgcgtactgatcctgaatatctctactattaaacgagtggagagatcgccatccgaatcgtatgaatttgctcttttagtgaccttatactcgggagcaaaagtgttgatccaatttattggtatacgttataggtcagagcagttttgtaataaattgaaattgaatttgaaacagaacatccctaatgccaaagctttaacggcgttcctagaaacttcttattctgagtttttaattgctaagaatatactggggaaaaaggacatagctgtacctagggcaggtcttggtcaacattttaaatatccaggaaatcccactatggccaaggagaaggccaagttaagattgtggttcgattatttcagacaaaatggaagaaacttggctgttgttcaaactcctatgttcaggaaattgattagaatcggtgtaccaaaccgaatgagaggtgaaatttgggagttatgttcaggtgcaatgtatcttcgttatgctaatgttggggaatatgaaaaaattctaaatgataacgctggtaagacttcacaagctatcgatgaaattgaaaaggacttaaaaagatcattaccagaatattcagcataccaaactgaagaaggtattcaaaggttgaggaatgttttgacagcctattcatggaagaatcctgatgtaggatactgccaggcaatgaacatagttgttgcagggtttttaatcttcatgtctgaagaacaagcgttttggtgcttatgtaacctttgtgacatttacgttccagggtattattcaaagacgatgtacggcacgttgttggaccaacgggtgtttgaatcctttgttgaagaccgaatgccagttctctgggaatatattgtccaacatgatatccaaatatctgtcgtatccttaccttggtttttgtccctatttttcacctcaatgcctctagagtatgctgttaggataatggatatttttttcatgaatgggtccattacactatttcaagtggcattggctgttttgaaaataaacgcagacgacattttacaagctgatgatgacgggatgtttatcgccatcattaagcactattttcaaactctgggccaaagtgcacatccagattcaagcgatataaaatacaggcaaatcacgaaattccaagaattgctagtaacagcattcaaagagttcagtgtcatcacggaagaaatggcaatgcaagcaagacacagatatgaaaagggcatatttcggaatattgaaacttttatgaaaaggacgcaattgcgtcatatgccaaagacgttcaatctttccagtgacaatttgtccaatatctatgacatgttttaccaaagtatagaaacgtataagatcagtatgggaactggatcatccaatatgggtttcgaggtatttattcagttcttgagtaagttctgcgattcatgtagaccgtgtgaaaaagaaaacgatccagctttccgtgaacaaaagaggaattttttgcaaagattgtttgacaactgggattctgctcgtattggcgagttaaccttaaacgacgtggtaactggattggataagctattaactgttgatctcttacaagctataaactatttcttttctttgtatgatacggatggtgatggtgaactgcacagggaagaagttctgcagctttcagaggggctgctactgctcacagaaccgtggaagagtggtagatatgtggacctgttgactaaaaagtgcattgaggatgatattgccgaaaatattatcagggagaatggcgaggaaatagttactatgaaccagattgagttgcccacaggtgttactattgatgaagaaaaatataaagccgaacaagcagaaagatatttgaaagctgcaagcaattttctacagagatcatttgagtatgctaaggcagttgagcttgcggaggaggttaatttgatcgatctatccgacgatgaagacgaagaaagtcacgcagcaaaactgaaaagattggaaagcataagggcgaaccctgctctagaccccacgcatccaaaggtcatagatctggcaacatttagaatgatcattctggcagatgaaacttatgaactttttttctccaacacgttacgatcatccattcacgtcgatgaacacatcaatgtcaataacaaaaacaaagtccttagaagtatgtttgatggcatcttagctgacggcaaaagagttgctgaacaagttcgtcgccgggtcgattccgtggcaactaggaatagtatcacttcggcagaaagcacgccaactgacgcagcaagttcgacaactacaaaggaagagaagtacgacgatttggatgattttacatcggaccatcaatccgagcacgaggaactgctgcaaagctcctggtttgaagttgacgatgccaacgaaacgaatgctgtgcaagaaaggccttttgaaccgttatcagcaaatccatcggacaagaagtctagccttattgaattcgaagcatag

SEQ ID NO: 991 - DNA, 1041 bp, Saccharomyces pastorianus
atgctaggtgtaagctctttcctgctaggtcttcgacccacaacaaaagtgttttttcgtagcaacatttcgctaatcccatcgagaactttagcatcatataccggtaggccacagagcacggcgaaactgataaacccttccatactggtgagccggagtgtggcttttcagcagcctctagcaaagaggtttttctttcaaacgtcgactctgaaatccaggtggaagcccattttcaatgaagaaactaccaatcgatatgtgcgtttaaacaggttccaacagtaccaacagcagagaaataccggcaactcgctgggctctatgactgtcctgggtttttcgttgatggcagggatctattttgtttcgccatatttgtttgagtatgtgccacccttctcgtatttcaaggaccatccaaagaatttggtatacgcattgttagggatcaatcttgctgtattcgggttgtggcaatcgcctaaatgttggaggttcctccagaagtacatgttactgcagaaggatcatatgacaagcaagctttccataattgggagtgcattttctcatcaagagttttggcacctgggtatgaatatgctggcattgtggtcatttggtgtttcactctcgtcaatgctgggtgcatccaatttcttctctttatacatgaacagtgccattgcggggtccttgttttcgttatggtacccgaagcttgcacgcttggctattgcagcgcctagcttgggtgccagtggcgccctatttggggtattgggatgcttttcatatttgttccctcatgctaaaatactgttatttgtcttccctgttccaggcggcgcctgggtagcatttttagcatcagtggcatggaatgcagctggttgcgctttcagatggggatcgtttgattatgcagcacatctaggaggctccatgatgggtgttttgtatggatggtatattagtaaagctgtcgagaggcaaaggcaacatcgtctacagagcaccggtaggtggttttag

SEQ ID NO: 992 - DNA, 552 bp, Saccharomyces pastorianus
atgttcagcacacggtggatatgcagaatacagatagctggcggaataaaccgcctgggaagttaccggttagcatccaccggaggagctaagattggtaagaaatttgagactatggatcaaataaaggcttatctatcagaacctgtgtggtctgttcatgaatacttgggaacgaacgtagaggagaatacccttagattgccacctgtagagcttgtgaagaaactgctgcgattatcaggcttgcccctagaaggagcggacattgaagccattcaaatgcaactcgccaagcagttatcattcgtcaacagactgcataatatacctgttgaagatagaacaagtgtggaagggtatgacgctcgactgatgccgaggcaaacaacaaaattgaactataggatgctactagacgctgttaaacaccagaagcaagatgcggatataggcgaggttagcggatcttggacggctacggggcttgctgcagaatccaagaatgggtattttgttgtcagagaaggactacttaaaaaccgaaagtga

SEQ ID NO: 993 - DNA, 1794 bp, Saccharomyces pastorianus
atgagaatcaaaaagaagaacaccagaggtaacgctagaaactttatcaccagatctcaagctgtgagaaaattgcaagtttctcttgctgatttcagaagattatgtattttcaaaggtatctacccaagagaaccaagaaacaaaaagaaggcaaacaagggttccaccgctccaacaactttctactatgctaaggatattcaatacctgatgcatgagcccgtcttggctaaatttagagagcacaaaacttttgcaaggaaattaacaagagccttaggtagaggtgaagtttcttctgctaaaagattagaagaaaacagagacacctacactctagatcatattatcaaggaacgttacccaagtttcccagacgctctgagggatattgatgatgctttgaatatgttattccttttctctaatttgccctccacgaatcaagtttcatcgaatattgtcagcgatgctcaaaaactttgtaatcaatggttggcatatgtcgctaaagaacgtttggttcgtaaagttttcgtatcgatcaagggtgtctactatcaagctaatatcaaaggtgaagaagttagatggttagttccattcaagttcccagaaaatattccaagcgatgtcgactttagaattatgttgaccttcttagaattttattcaactttattgcatttcgttctgtacaaactatacaccgatagtgggttgatttatccaccaaaattggatcttgaaaaggataaaattataagtggtttgtcatcatacatcctcgaatctagacaagaagacaatttgctacaacatgaaccagccgaaattaaagaagacgcacaagttgaaactttggatgcatcgaccttaaagtctgctttaaatgccgataaagcaaaacttgaagaaacaagcaaagaagaacaagagcaagaacaagaacaagaacaaaatgaggaaacagaactagacacattcgaagacaataacaagaataagggtgacattttaatacaaccaacgaagtatgattccccagttgctgctttatactccgattttgttttctatattggcagagaagtcccaatcgatattcttgaatttttaattctatcatgtggtggtaatgtcatcagtgaagccgctttagatcaaattgagggcaaaaaagatattgacatgtctaagattacccatcaaattgttgacagaccagtattgaaaaataaggttgctggtagaacatatattcagccgcaatgggtctttgattgtatcaataagggtgagttggttcctgccaacaagtatcttccaggtgaaacacttccacctcatttgagtccatggggtgatgctatcggttatgatccaactgctcctgtggaagaaggcgaagaaagcgaaagtgagagtgaagctgaagttgaagaggaagaccaacaagtcgttgttgaaggtgaagaagaagaagaagaagacgaagagttacaagctcaaaaggagttggaattggaagcacaaggtgtcaaatattcagaagctcctgaagccagcaagggtgccaataagccaaagaacaagaagagaaaggtcgacgaagaagaagaagaaaagaagttgaagatgattatgatgagtaacaaacaaaagaaactttacaaaaagatgaaatattccaactccaaaaaggaggaacaaactgaaagtttgaaaaagaaaaagaagcaaattgccaagcaaaaggctaaattgggtaaacttaactccaaaaaataa

SEQ ID NO: 994 - DNA, 924 bp, Saccharomyces pastorianus
atggtccagcaactgagtctatttggatctattaatgatgatggctatgatttattaatatcaacgctaacaacaatatcaggtaatccaccacttttatataacagtttatgcactatttggaaaccaaatccgtcttacgacgtcgaaaatgtaaattccaggaatcagttggttgaaccgaacagaataaagctttctaaagaattgccctttgcttacttgattgatgaaacaatggctgataagccattgaattttaaaattttaaagtcctttactaatgatgaaatttcgctggactattctatgacaaagaacattctacacgacgaagttccacagaccaacagtaacaacagtactaccgtgggcaaaaaggacggtgaaaatgtaaaaagcgatgtaaaagaaggcgaaaacaaggatgatgaagcagatgtagacatggacgcaacttccaccgtttccaacaagtcatgttcttcttggtcattacagatttcagatattccagctgcaggtaataacagaagtgtatcgatgcagacaatagctgaaacgattatactatcttcggctggtgaaaactcatcaataacttcactcatgaacgaattagggtatgtatttgagttccagtatctcacaattggtgtaaaattctttatgaagcatggtttaatattagaattacaaaagatttggcaaatagaagaaaatgggaattcacagataactaacggaggattcttaataaaggcttatattaacgttagtagaggtactgatattgaccgtataaactatacagagactgtactaatgagtgtaaaaaaagaactacaaggatacatcgacttaagtgtaccagatagacaatcgatggactccagggtagcacatggaaataatgtaatatga

SEQ ID NO: 995 - DNA, 234 bp, Saccharomyces pastorianus
atggccgtcgatgtacctcgtactgtaatcaataaacttatgctgtttaccgtggcaatggttgtactacctgtacttacgtttttcattattcaacagtacacaccaaacaccctagtcagtggaggtttagctgctgcaatggccaatgtcgttctcatcgtttacatcgttgtagccttctgtgaagatactggcgattataaggttgaaagcaacaaaaaagaagattga

SEQ ID NO: 996 - DNA, 798 bp, Saccharomyces pastorianus
atggcattcggtcaactgtacggctttttcgttttcactttatcgtggtttctttccaagactgccgaggcagcctcatccaaggaaagcttctcctttatttcgctaaacaaagagactaatttgaacattttcagctctgtctcttcaacagcggatgtgatatcaactgttgatagtgctattgccatcttcgagttcgaagactacccattaatggataaggtgatattcgacgaaagtattcaagagtacccatttttcgataggtttttttctaatgaggtcgctttagtcgtcgctgatgaattgcctatgaacattcctcaaaccttatctactattttagagcagtttacagtgaatgatttagctcaaagtgcttccgatttattgtacgaccacttcttagaagacaaaagcattgtgttgttcaaatttccttctagcgattacgatttgtacaaattggacgaattcatcgaatcttgcttattgtttttggaagacaaatctagtgacgatctgactgtcgttatcaattcggttggtaccattgacactgatgactataactttgctgccaaagacatcttgagccacgatgacaacaacgaagctcaagatggcgacagtgatattttaagctctatttggaccgagggacttcttatgtgcctaattgtttctgcattgttggtgtttattttgatcattgcgctctcttggatatctaatttagatattacctatggtgctctggaaaaatcttcaaacccaataaagaaaaataattaa

SEQ ID NO: 997 - DNA, 1425 bp, Saccharomyces pastorianus
atgtcaacatcccttttagtggagaatagccggactattaatgcaaatgatgagaacagtataaatgatactcaacgtatcgtgcaaaagagaactgttccaagaaccattctaggtaatgtcacaaacaatgcaaatattctgcaagagatctctatgaataaaaaaatcggagtaaagagcttttcaaaactaagctctttcttacctttgaaggaagaagttttgaagcacaacgattttaactcttcttttagtgataccgtacaggaaaggaaacaaggttttttaaagaataaagaaaatattcccgaatatggatattccgatcaacaacagcaacaacatcctaacgatgagtcaattcgtgtagactcaactgcactaagctctaatatattggaatactctgaaaataaatcaatttctacccaaatggaatggcagaataagatcataaaaaggaattttgaagattcgaaaaaaaaacggccaacatcgactctggttgagcaaaatcaacaaaagaagtttaaattgtatgagcttactacagaagaagatattctcgaggaatacgagtgggatgatttagatgaagaagattatggtgatccgctgatggtaagcgaagaagttgatgatatttttgaatatttgcatcacttggaaatacttacgttgccaaataagccaaatcttttcaaacataggaacatcaaacagaacagagatattctagtgaactggatagtcaagatccataataagttcggtcttcttccggaaacattatatctggccataaatataatggataggtttctttgtgaagagatagttcaactgaacaaattacagttagtggggacatcatgtttgttcattgcctctaaatatgaggaaatttactctccaagtataaagcattttgcatatgaaacagatggggcctgctctgtggacgagatcaaagaaggtgaaaagtttatattagaaaaactaaacttccaaattagcttcgctaatccgatgaatttcttaaggagaatatcgaaagcggatgactatgatattcaatcaagaacactagccaaattcttgatggaaatttctctagtagatttcaagttcattggaatattaccgtctttatgcgcctcggcagcaatgtttctttctaggaaaatgttgggtaagggcatctgggatggcaacttgattcactatagtggtggttatacaaaagaaaaactgtatccagtttgccaattgttgatggattatcttgtagggcctaccattcacgacgagttcttgaaaaaatatcaatcgagaagatttttgaaagcatccataatatctattgaatgggctttgaaagtaaggaagaatggttatgatataatgactttgcatgagtga

SEQ ID NO: 998 - DNA, 1203 bp, Saccharomyces pastorianus
atgacggcttcatcccttgaagataacttactgctcgaatgctacagcgaccctgaattaagaaggtggacacacttggctaatgcgagagtttggaagggccttctcacactggaccagtatgtcgaaagagagcaagtgttggggtcttcggagatttctcagaaagacaaatcagacgagacaatatcaagattcccaaaaagttatcaatggcttgggcaaaagtactttgttttgaaggatacatctttgcccgacaacgggaagtttagtcaagttgtttccagttgcgaaacattgaacagaatcgggtattgtattcacccagggtcgaacggaaagattgaaccagctttaattgtatgcattggaggtgttttcacctttgaaaaccaccgcggcaaaggctatgctaagagcatgattaccaaactgaacgaattctatgataatatacgtaatgaagctgggggtgtattggaattgaaaaacttacttatcaatctttatagcgaagtgggagattattattccccattagggtacaaaagtatgcatgttccactgcaccaccttaccaaattaaacgaaattactgaatactattgccaaggagggtctgatgcaaacggcaagtatttgggatttgatgattacgaagacttagtgaaattacacgaaggacagttcaataaaagtctaatgaaattacataagaataatccagagaagttcattttcactattgcaccagatatagacatattcaagtggttccagtatcgtgaccttttcatcatgaaaagatcgggaagggaatctcaggaaaagctgtccttcggatttgcattgagtgataacagccacatcatatggcatcacaattggaatggcaattctttgattatcgtcagaatctacatacctgaagaaaccattcagagaaaagaagcgaaacttaaacagttgctgagccaagccataaaagaaacacaagatcgagggatgcatgcgctagaattctgggatagtgaaattcctgtcaaacagtatccacaattattccaattgctgaccgaactggaagacgattctaaactcttttcggataatggctccatcagtgctgtcagacctcctaagggttataccgccgacaaggttatttgggataataataccaaattctgttggttttaa

SEQ ID NO: 999 - DNA, 1155 bp, Saccharomyces pastorianus
atgtctttattaagggctagatgcaccagccgttttctatcgaacacatcactgcttccctgtagacacacgaatgggagaccactatatcacttactcacaaggcaccagcaacatagaggcataataacgtcgactatagactggaaaccaatcaaaactggtaagagtccaaacgatgattccaaaaggaaaggatcatttggaaagaagatcgtgttggggttaatgattgcaatgccggtaatatcattctatctaggaacttggcaaatgaggaggttaaaatggaagacaaagctaattgcagcgtgtgaaagtaagctgacctatgacccgataccgcttcctaaaacttttactcctgagatgtgcgaagactgggaataccgtaaagttattctttccggacatttcctccacagtgaagagatgtttgttggtccaagaaagaaaaatggagagaagggttatctcttattcacgccatttatcttggacgatactggcgacaaattgcttatagaaagaggatggatcagtgaagaaaaagtagctcctgagtcaagaaacttgcatcatttatcgttgcctcaaggggatcatttgaaattggtctgcttagtaaggccaccaaaggcaagaggctcattacaatgggcaaaaaaggacccaaattctagattgtggcaagtgccggacatttacgatatggcaaaaacgtccgggtgtaaacctatccaattccaagccttgtacgacatgaaggatcatccgatacgcgacgaaaactcaaagaacgcagctttatcaaatcaatcaacttttagcttctggaaattctggaaacgtgaacctactgatatcaagactgaaaagaaaaatctttccgaaggcaagccaaatccggaggcagctgaccaaacaatcgagttcaatgaatggcagttcataaaagcgggtgttcccataggtaggaagcccacgattgatttgaaaaacaatcatctacagtatttagtaacatggtacggcctttcccttctgagcacgatccttttagccgtagctcttgcgaaggctaaaaagggcggagttgtgtctcaagaccaactgatcaaggacaaactaaagcacacgaggaagtacatgtaa

SEQ ID NO: 1000 - DNA, 1032 bp, Saccharomyces pastorianus
atgagcgaagataaagccaaattagcaactgccaggtcggctacagaataccggctatctatcggtagcgccccgacttcgagaaggtcttccataggtgaatcctcatccgtggcaaaatttactggtcaagaagggctaacgggatcaactggagagtgcagtgaaaacgccatacagcaggttctgttgccgaagatcagagaattgaccgattccattatcactttagattcaaattttacgcacttgaactttattcacgagagtttggctgacctgaatgaatcactaggttcgttgttgtatggtatcatgagcaattcatggtgcgtagagttttcacaggcgcctcatgatatccaagaggatctgatcgctatcaaacagttggaatcgttagaagatgagaaaaaaaacttattagaggaaatttccaacatagaacgtggggcttcgaaaacaaatgctgatgtgccaagagaaaataaactggataaagattcccagaagaaacagttcagccaaccgctgttcccttcctcgcaagtaagaaagtataggccatacgacaacaaagataaaagaaggtctactaaggccgccaacaacttgtcaacagacaatgaagaggattatgatgacgatactagcagcgaggcgtcctttgttctaaacccgacaaacatagggacatccaaatcctctcaagggcacgtaagtaaaaatgcgcgttccaataacaataacaatagtaagctaaggaggaaatcaatcctacacacaataagaaatagcattgcctctggagctgatttgccgggcatcgaaaacgataacgtcatcaatttaggcgatttgcataatcgaatatcgctcggaagtggtgccgctaggatagtcaatggtcccatggcaaaaaagaggcattccatgttcactgaaaatgcagaaaggacttccacagaaaacagacactcaatcgcaaaaaaacctgagaaaaagctgagcgcaagaccgcctttcaggtaa

SEQ ID NO: 1001 - DNA, 1632 bp, Saccharomyces pastorianus
atgtttggtttcggcggtggtaatagcggatttggaaataagccagctggttcagccgggttttcttttgggcaaaataacaatacggccagtcaaccttcaggttctgggtttggtttcggaggtggccagcaaaataatacgactaccggtgcgaatacaaccggagggtttggagctaatcaaactacgaatacttttggagctaatcaacaaaataatgctgggggtggcctttttggtaataagcctgctcttggtggcttaggaagcaccaatactagcgtttcaggaactacagctgctgggacaggtttatttggtcagcaaccagcctccggtggacctctcagtggtggtctatttggaaataagccagctcccacaaccggaggcctttttggtaatacaacacagaataataatactacaggcggggggttatttaataacaaattagggactaccgggtcacttatggataataataatacccaaaacacttctactatgaatggtagtggactctttggcgctaaacctcaaaacagtgcgccggctactggtggtttgtttgggaataagccacagggttccgtagcaggtggtggattatttggaagcaactcccagaataacaatacccttagtggaagtggtcttttcggtcaacctcagcagccccaaacgaatactacccctggatacggaaatacagtctccacacaaccatcgtttgcttggtctaaaccccccgatcaaactaacttacagcaacagcaacagcaacaacaatttcaggtaccattacaacaaacacaggcaattgtccagcagcagcagcagctttctaattacccccaacaaattcaagagcaagtactgaaatgtaaggaatcatgggaccctaacacgacgaaaacaaaattgagagcgtttgtatataacaaagtgaatgaaacagaagccattctatataccaaaccagcacaagtacttcaggaagaatgggaccaagcaatggagagtaaaccctcttcccaaacgattccaatacaaatatacgggtttggaggtttaaatcaacgtaatcaagtacaaactgagaatgttgcacaagctagaattatcctaaatcaaattctagaaaaatcaacacaattgcaacaaaagcatgaattggacactgcatccagggttttgaaggcacaatcaaggaatgtagaaattgagaaaagaattttgaaactaggcacacaattggcgattttaaagaacagaggattgccactgggaatagcagaagaaaaaatgtggtcacaattccagactttattacaacgcagtgaggaccctgcgggcttaggtaagactaatgaactttgggcacgtttggctgtcttaaaagaacgcgccaagaacatttctagccaattagatggtaaactaatggtcttcaatgaggatgccaaaagccaagacaatatgtcacaaggcaccggtgaagaatctaacgatcgtattgataaaatagcggaaattctaacgaaccagcagcgtggtataacgtacttgaacgaagttttggagaaggacactgcaatggtaaaagaatatgcgaataagacctaa

SEQ ID NO: 1002 - DNA, 1209 bp, Saccharomyces pastorianus
atgtgcgacggttcaacatctacaaaaggtctaccatacaagctggccgaagagagcagagtaaaaactctcataccgaatgatttggtggcatcgcggagtaactgcataaagacattgaacagctcttcgcccaaagtagactccatctcctgtatagacatctggctgaattacgccaatggcttgctgagttacaggtacgaggccggtaatgttgatcctcttgtagaagaggaaatctctcaggtcttgatcaacgtggccacattttatgaagatatcggcatcgaaaccttgcacagagcgtatgaatcttcacaaccatcgaacaacctatgggtcacgagcgggacttatttgaaaagaggattaggcttggtctgctttcttaaggctatttcccaaacaaatgcggttgctgaccccaagaatatgcaggtgctcaacatttccaaccagctgtctctggagttccaattgttgcaacaactgggaattgtcattttggcattatccaaattgagatcaaaagtcagcaaggatgctgttgtggatctcgaaccccacgaacttaaagaactaggcacgtccagtgtcttctacgccaagctttgtattgggtcctataacactgcattgcaatgccaggatggccgtatagtggacttcctcttcttaaagtatttacagagtttgatctatcttttcctgtcaattaaccagtacaatatggacgaatgtgggatcgccattggaatgcttcaagaatcggtcaaaaaactattgaatatagtccctaactcgcagctcaaagaactggacatcctatcttccacagatatcacaaagaagagggatattttgaaaaaggcttttaaaaggaagatacataccactactttaaagacgagtcacatatttgagaagaaagcatcctctacatacaaaaacggcatgatgcccttattaaatctttcgttgaatgattttataatccccctaacaatactattaagatacaggtaccaaagaaccaacgataatttttcatataaaccggtagagaatgacattgagaaattgaacaagctcttgcccaggggcaagtcgtcggatatagaaggtatcccatggacgtttcaaaatggtcatttaacatttgaaaactcaaacgacgctagcaatgagaacgaaaactacttctga

SEQ ID NO: 1003 - DNA, 1719 bp, Saccharomyces pastorianus
atgtgtggtatctttgcagccttcaagcatgaagacgttcatgatttcaaaccaaaagctttacagctatcaaagagaatcagacaccgtggcccagattggtccggtaacgccatcatgaactccaccatatttgttcatgaaagattggccattgtcggtttagactctggtgcccaaccaatcacttcttctgacggcgattacatgcttggtgttaatggtgaaatctacaaccatatccaactaagagagaaatgttccgactacaagttccagactttcagtgattgtgaacctatcattccactgtacttggaacatgatatcgatgctccaaaatacttggatggtatgtttgccttctgcctatacgattccaagaaagaccgtgttatcgctgcaagagatcctatcggtgtcgtcactttatacatggggcgttgttccaagtctccaacgactgtttacttcgcttctgaactaaagtgtttaaccgatgtttgcgacagtatcattgcattccctccaggtcatgtttatgattccgagaccgacaagatcactcgttacttcactccagactggttggatgaaaaacgtatcccatccaccccagtggattaccacgccattagacacagcttagaaaaggccgttagaaagagactaatggctgaagttccatacggtgttctattatccggtggtctggactcttctttgattgctgccattgccgctcgtgaaactgaaacggctaatgacgaggccaacgaagaagctgacgttgaaaacaaaaagcttgccggtatcgatgaccaaggccatttgcacacatccggttggtctcgtttacattcgtttgccgttggtttaccaaacgcacccgatttacaagctgccaggaaagtcgccaagtttattggttctattcatcacgaacacaccttcacattgcaagaaggtttagacgctttggacgatgtcatttaccatttggaaacttacgatgttaccaccattagagcttccaccccaatgttcttactgtccagaaagatcaaggctcaaggtgttaagatggttctttctggtgaaggttcagacgagatctttggtggttatctatattttgcccaagctccttctgccgccgagttccataccgaatccgtacaacgtgttaagaacttacatttggccgattgtttgagagccaacaaatctactttagcctggggtctagaggcccgtgttccattcttagacaaggactttttgcaactgtgtatgaacattgatccaaaagataaaatgatcaattctaaagagggccggatcgaaaagtacattttgagaaaggctttcgataccacagatgaaccagacgtcaaaccatacttaccagaagagattttatggagacaaaaggagcaattttccgacggtgtgggctactcgtggatcgacggtctaagagacacagctgaaagagttatttcagacgctatgttcgccaatccaaaagctagctggggtgacgacatcccaactactaaggaggcttactggtacagattgaaattcgatgcctggtttcctcaaaagaccgccgctgataccgtcatgagatggataccaaaggccgattggggatgtgccgaagatccttctggtagatacgccaaaattcatgaaaagcacgttaatgcttaa

SEQ ID NO: 1004 - DNA, 3111 bp, Saccharomyces pastorianus
atggggagaaatatcagaaggcgcaggagcaattcctcactttcagaggccatatcagtatcgctgggaataaactatcaagactcatcaaaaaacaagattcatagagctagtgttagcacaatgtcacctccattatgccgttcttatatgagtggattttttacaggtgcaagctcgcctatgaattacaatatgtctgactcaaagctacccttctcgaacaagcaacaccccaaagtgattcacggatcagaaaaattgcatagacaaacagcccaactgtccaatgaattttgctcttcttcagttgaggaaggctctccgactattaaggactatatggacattataaatagcgatgacagaaaagatgatcaatctatgcgcactatagaagagaatattgatgaagaatacgctgatgaatactcaagattattactcagtccagcatcctcaaatgcggatgacgaacgaaatcgtgcgcttcaagacagtccaatatcagaactagaggatggtctcgggggcggataccagtccgtccatccctcgcataatatgcgtttaggcccaagaagtgcgtggcagtggtttacgtcatttccttccaaatgcgcacattacctacctgcggcagtattaggtctgcttttgaacatcttagatgcgttgtcctatggtatgatcatatttccaattacagaaccggtattttctcatttggggcccaccggtatttctatgttttatatctccacaataatatcacaaagtgtgtattctgggggctggtcgagttttccttccggagttggaagtgaaatgatcgaaattaccccattttatcacacaatggctctaggtataaaagaggcgctagtgggtagtgatgatgaaatcataaccaccacaatcttctgttatgtgatcagctctatgcttacaggtatcgttttctatgtactggggaaattacgactaggcaaaatagttggatttttccctcgacacattttaataggctgtatcggaggtgttggttatttcttgataattaccggtattgaagtcactacaagagtggctaaattcgagtactcgtggcctttcttgtcgggactgttcacaaattatgacacgttggcaaagtggttactgcctgtcttgctgacaatagttttaatcggtacgcaacggtgtttcaagaactcattagtcctgccaactttttacattttgacattggttttattccattttattgttgcaatcattcctacattatctttagatactctaagagagtcaggatggattttcccaatcgctagttctgatagtaaatggtacgatcattacaaattattcaatattcataaagttcactgggcgttggttttccaacaaataccaacaatgatggctttgaccttttttggtattttacatgtccccatcaatgtgcccgccttggccatgtcactacaaatggataaatacgatgttgataaagaactgattgcgcatggttattcaaactttttcagtgggctgctaggttcagttcaaaactacctggtgtacactaatagtgttttatttattagagccggagcagactcgtcatttgctggcttccttttggtagccttgaccgtctgtattatggttattggacctgtgataatatcattcataccaatctgtatagtcggctctctgatttttttgctgggttatgagttattggtagaagcactagttaatacctggaataaactgaataggtttgaatacctgactgttgtaattattgtctttacaatgggtatattcgactttgttctaggtatcattgttggtattttgattgcatgcttttcgttcttggttgatagcacaaaattgcaaactattaacggcgaatataatgggaatgtcgctaagagtacggtttatcgtgattatgttcaaaccaaatttctagaaggcattggtgaacagatatatgttctaaaattgcaaaacgttttgtttttcgggactatcatatcaattgaagaaaaaattgaaagactgctagaaataagcaataaagactcaacaaaacggagaataaagtatttaattttggattttaagaacatcaacgctgacaatattgactattctgcagcagaaggtttcaatagaattaaaaggttcacggaaaccaaaagaatcaagctgatcatatcctccatcaaagaaagggatcatatatacaacgccttcaataacgtgggactattaaacgatgtggaattatttgccgatttaaacagtgctttggaatggtgtgagaatgaatttctcttccaatataagcaattaagagaaaaggcaaagaagcgactagaagaaagaaagcagaataatgttgtgtccgcaataatggcagccactcaaaacaaaaagatcgatagatctagaaataatttgaataaaggtaatagagaacaagttagaaacttgatgtccctaccaaccaacacccctcgtaatcatcaaatgctttccgtggctcagaacgtctttgcaaatgatgaacaggcagtgaagaatctcaagaaggaatataaaaacgacgaaccaattttacctatattgctatttgcactaaagcaatatcgacctgatatcgtatccgaagttcagaagataagagaaaaagaaatcaagttctgggctcaactatgtccctatttcagtagacgcagactagcaagtcaatcacatttaatacatgcagacaatgtatttttcttgatagaaacaggtatgttaaaggcaatgtatgaactaccacaaggtacattgtacgagatcatgtctaatggtacatgttttgggaaaatcatcgccccaggaaacactatgcctaaagaacagaaactcatcattgaaacggaaacagattccatattatgggttatagattctagctctttgaataaaatgaaagaagaaaaccttgcattgtacgtggaggttgcgttaatgataatgtgcatcaaggacactaggttcaaggaattactaggctacacccttgttagcgcatga

SEQ ID NO: 1005 - DNA, 693 bp, Saccharomyces pastorianus
atggccattccatctgttagtgtcaccaccgataatgaatacgaggacatatcatccttctcttctattgactcttacaagcctgagccctttactgggttcaaagattcggaagctccagagcagcctcttttgaagaatgacaccattgttggaaagggacaattggagaatgatgacagtgtaggcgatcagcaccgtcactctgatgtgcactctcatcacagttccagtactttgaaaaggccaacttctaactcgatagaaaagatggttacacacaatgcgttagaagggaattcagaaacagtagattctttgaaaaaagaagggttaaacctggacaagaagggtactccagacatcacagccccagtaacaaattcggcgcacgatgctgcatttccagaggagtatcgattagagactgagacggggctggttaagttgaagacacttgaaactttaagaagagaagactctcgtgtttccggagcaaaaaaggagcagggccacgaccacactgacgcacattctacacgctccaaagctactgcgtattctcaaggttcttccctagaatccgataagttgaacatagcagtggaaaagaataagaaaagaattgaaaagtaccaaaaacacaagggagaaaaaggaattaaaggcttcttccacagaatctttgattga

SEQ ID NO: 1006 - DNA, 942 bp, Saccharomyces pastorianus
atgtgcatactaatggcaacgagagcgcaccccgattatgagctcatattaatatcaaatagagatgaattcttggaaagaaaaacacacgccacatgctggcacaacaatgatttcatcctttcaccctacgatgtggccaagacatcggtggaaaaacaaatttttggcacctggtcgggcataaataaagaagggaagctagctacgatcctcaatctgaagcaggacgatcagcgagatcccacgaaatccaaatctcgcggcatgttaccattttcctttttaacgagtcgtaaagcaagttttcaagattgggacgattataacaatttcgaaaagcattatgacggtttaagggctacaggtgactttaacttcttctatggtgatgttattgagaaacggtataaagttattgattccttaggaaatactttcactgtattaggctccgcctgcagacgagatcctgattcttacatagtaatttctaatggtaagtttcacaatagttccagtatatcagagcaagcctgggagaaagtaaagattgggcgtgatagtttggagacattaattcaagaaaatattgaatcagatgaggaaacgttggtatcaagttgttttcaactcgcttcaaagtgttctcttccagataccacttcaaagccggatcttttacagatgcttgtggacccaaacgtaacaatgaacaccatatatgtgccgcctttacggaggcccccaggcgatgatttgggcgcgtctatacccgatggcgactactacggaacacgatctcaaatagtgctgcttgtaagtaagaactcatctaaggttacctttattgagagaatactttatagctcagatgaagacgtgagtcactactcagcatctgctccaaaggaagagaaaagatttgaatttgaattgtaa

SEQ ID NO: 1007 - DNA, 636 bp, Saccharomyces pastorianus
atggatctggaaaatttgggtaaaaagttaaaggagttgaaaagaagaagggtggacgcatctctaaagacaaggaagttggcggatagagagatccaggaagccagtgcaaatcgaaaaccaagagtctatagcatggaagatgcaaacgatgaggaattagaaggagaaacaaaaagtgatgataaagacaaagctttccactacactgttcaagaatataatgcatgggaacagaagcagaagcaaaggaagagtggaaagactcaagggactggaagttcatatgaccaactcgcgaaattgagttatgaaaaaaccctaagaaatctcactacacagaatcataagcatgaaaactctgttaacgaaaaggacaataaagattctatgggacagggtaggattgaaaagatacagaaaaacacaataactggtaagataaggattgtagatgacgataaattagtaaataaactggcctctactttggagtctgaatcgaagaagagatatgaggtaagaaagcgccaaatggaaaatgttaaggcaccaactggtgtcgaaagttttataaatgataaaaataaacaatttaatgaaaaattgggtagggaatcaaggggttcggagtaa

SEQ ID NO: 1008 - DNA, 2562 bp, Saccharomyces pastorianus
  modified_base (319)..(319): a, c, g, t, unknown, or other
atgctattcaataccaaccgtcaggaagacgaccccttcacgcaattgatcaatcagtcatccgcgaatgcgcaaaaccagcaagcacaacagcaggaaaagccccaccagttcttgcagaatgttgtctctaatgagcctaaaggcaaggaagactgggtctcgccattcagacaacgtgccttaagcggcaaccagaacaacaggttgtatgtgcacgatgcaaagaacagaaaatttcccactgttagtgccacttctacctattcaaagaaacagcctcaagatctgggctacaaaaacatcccaaatgacgttnaaagagctaaggacattaaatttccaacttatttaaccaagaacgaagaaagacaatatcagctgttaacagaattggaattgaaagagaaacatttgaagtatttgaagaaatgtcaaaaaattacagacttaacgggggatggaaatgatgacacctccagtaccacatcttcctcttcgtcagtatcttcttcagaagacgaggatactgcttctgctatcgtacctgcagacaatgaaactacgactacggctactactacgactacggctgcctccgcagatagtgccgatgaagccacttctatagaagaagaacagaatgaaaacgcaagcgaggttacgcccactgaaaagacaaccactgacaacgaaaaggaaattccggaaccggagactgtcaaaggtgaacagaacttggcagaacctgctgtggcagaacctgctgtggcagaacctgctgtgacagaacctgctgtgacagaacctgctgtgacagaacctgctgtgatagaacctgctgtgacagaacctgctgtgacagaaaccacagctgccattgcccaaagtgatgtaccggaattagccgttacagccgaaagtgataatgctccagaatcagcagctgtagccgcaagcgatgatgtctcagaagtagcagtcgccccaatagaagagccaaaggtggaaacatctgtcgtaaagagggatatcgttaccgaggaaggaaagggagaactagcagacgctgaagcagaaactgaacaatcatcagaagatgagcacggcggggaaacgtctactcctgaaacctcagaagcagaatctgatggggacaatacaccgattgacccaagcaaagctccaaaagtcccatttcaggaccgtccgcaaaaggaaagaaccggcttttttgccctatggaaaagtcctacttcttcttctgctaagaagggtactgctacggctcctttgaatccagtggccactccagaaaaccctgaattaattgtaaagacgaaagaacatgactatttatcaaaggctgtttatgataaaattaattatgatgaaaaggtccaccaagcatggctggttgatttaagagccaaggaaaaggccaaatatgatgccaaaaataatgaatacaaggaaaaattacaagatttacaaaacaaaattgacgaaatcgaaaattcaatgaaacaattgagagaagaaacctctaaaaagattgaagtcaacaaaaacagattggttaaacaaatcattgacattaacaccgagcataacaataaaaaactaatgatatttaaagatacggaaaatatgaaaacacaaaaaatagaagaaaagaatgaagttttaagcaggcaaaccaatgtcaaatctgaaatcgatgagttaaatagtgaaaaaattaacgttcaaaaggagttcaatgattggactacaaatctgagtaatttatctcaacaactggatgctcaaattttcaagatcaatcaaattaatttgaagcaaagcaaagctcaaaacgaaatcgataatttggagaaggaaaagaacgatttaattactcaaactgaggaaaataaaaagttgcatgaaaagaatcaagaagtcttggaaagtgtggaaaacaaggaatacttaccacaaatcaatgatatcgacgctcaaatttccaccctattgaaccaaatgaccataattaggcaggaaaacgccaatgaaaggactcatttatcggcaatcaccaaaaaacttgaagatgaacgccgtgctcatgaagaacaattgaagttggaggctgaagaaagaaaacgtaaagaagagaacctgttggaaaagcaacgtcaagagttagaagaacaggctcaccaggctcaactagaacatgaagagcagatcacgcaggtcaaaaaaacctacaatgatcaattaaccgagttacaagacaaattagcagctgaagaagaagaattggaagcagttaaaagagaaagaacaaggctgcaaggtgaaaaagccatcgaagaacaaacccgtcaaaaaaatgctgatgacgctctgaaacaaacgattttggataagcaacacaaacaagctgaaggcttacatgcggccgaaaatcatgttaaaacaccatccaatcacttacaagagagcaagcacgccattccaaagaatgactcgatgtatgaatatcatactgaagaagatgttatgtatgcctga

SEQ ID NO: 1009 - DNA, 864 bp, Saccharomyces pastorianus
atgtctaatccaagcaggttcatcgacatcatcaccaaggtggcgttacccattggtattgttgccagtgggcttcaatactccatgtatgatgtgaaaggtggttctcgtggtgttatctttgacagaatcaatggtgttaagcaacaggttgtgggtgaaggtacccattttctggtgccttggctacaaaaggcgattatatacgatgtgagaacaaaaccaaagagtattgccacgaacactggtactagagatttacaaatggtgtccttgacgttaagagtcttgcacagaccagaggttttacaactgccttccatatatcaaaatttgggccttgattatgatgagagagtgttaccatcaattggtaacgaagtgttaaagtctatagtagcacagtttgatgcagccgagttgattactcaaagagagattatttctcaaaagatcagaaaggagctctctacgagagccaacgaatttggtatcaagttggaagatgtctcaattacccatatgacgtttggccccgaatttactaaagccgttgaacaaaagcaaattgcacaacaagatgctgaaagggcaaagttcatcgttgaaaaggcggagcaagaaagacaagcctcagttattagagcagaaggtgaagcagaaagtgctgaatacatttcaaaagctttggctaaagtgggtgatggtttgttattgattagaagattagaagcctccaaggacattgcccaaactctggccaattccagtagtgttatctatttaccaagtcaacacgccggtagtagtaacagcgaatcttcaggatctcccaactccttgcttttaaatattggtcgttaa

SEQ ID NO: 1010 - DNA, 777 bp, Saccharomyces pastorianus
atgggttccagaagatacgattccaggacaacaattttttcccctgagggacgtctataccaagttgaatatgctctagagtccatttcacatgccggtaccgcaattgggatcatggcatctgacgggattgttcttgctgcggagcgtaaagtcacaagtactttgttggagcaagacacttccacggaaaaactatacaagcttaatgataaaattgctgtcgctgttgctgggttaactgcagatgctgaaattctgataaatacagctagagttcacgctcaaaactacctaaaaagctacaacgaagacatacctgtggagattttagtaagaagattgagtgatataaaacaaggttacacgcaacatggtggattaagaccattcggtgtatcatttatctatgctggccatgatgatagatacggttaccaactgtatacttccaatccatcgggtaactatacaggctggaaggctatcagtgttggtgctaacacttcagcagcacaaacactacttcaaatggattacaaggatgatatgaaggtggatgatgcaattgacttggctttgaaaacgttatccaaaactaccgacagtagcgcgttgacatacgacaggttagagtttgccactattagaaagggcgtcaatgatggagaagtgtatcagaagatttttaagcctcaagaaataaaggatctactggtgaagaccggcatcaccaagaaggatgaggatgaagaagcagacgaagaaatgaaataa

SEQ ID NO: 1011 - DNA, 774 bp, Saccharomyces pastorianus
atgtctgcatcactaataaatcgttcattgaagagtataaggaatgaattggactttttaaaggagtccgaagttatatcagacgacatcttcgatttgatcaatagtaagctacctgaaaaatgggacggaaactcggggacattccacaacgcatccgtagaagagtgtgccgaagccttatatgattttgaagctcaacaagaaggcgaccttcctttgaaagcaggtgataaaattcaaattttagagaagatctcccctaattggtatagaggcaaagcgaacaatagggtgggtatatttcctgcaaactatgtaaaacctgcatttgcaagatcagcttcacctgatactgagggaagtagcttaagctctaaaatatctcgtcctagtgcgccgcctccatcttatggaccagtagtctcatcatactcttcacagcaagccccagcatcttacgctcctccaatgggttacgtccaagcaccacctcctcaacaacagcaagctcctttaccctttcctccatcttttactaattactaccaacagccacaacaacagtatgcaccacctccacaagcaccagtgcaaccaccagtgcaaccaccagtgcaaccacagcagccacagcagccacagcagccacaacaacaccaaagtagcggggctagtagtgcattcaaaagttttggtagcaagttaggaaatgctgctatatttggcgctggttctactatcggtagtgatatcgttaatagcattttttaa

SEQ ID NO: 1012 - DNA, 2325 bp, Saccharomyces pastorianus
atgtctgttcgaaaccttaccaataatcgtaattccaacagtaggaatagtattgcagaaagtgaaaattccttctattcctcgaacggtcaatcaagggaaagctcgtcagtggaccccacagacgatcgccatgttagtggaagcggtaacccttttcttggaagtgaagagttcgatgaagactatatcccgcccagtgaggatgagcagaacaaagcacgtgaatattccacttcttcatctgtgaactacaataatgacccgaacagcgatacctctctgcttgctagtgaaaaacattctcctgtaaggaatgatcgaagaatgtctgactataaaggttattacgccaagaataatttaacgtccgctaataacttcaacaatcacaacagcaatgacaataacaatagcaacaataataatatcataagcagtagtaacgaaaatagctttgcatcacatttacaactgccggacagacacttgccgtctcatccatcctccaataacatgagtacgttttccaataatagccttatcaagtccccaccaccttttgataggtacccattagtaggcacgaggcatactccaatggcacaatctcaatcacaaaaccttatcaatgaaaagaaaagagcgaatatgactggctcatcttcttctgctcatgactcttcgttatcttccactaatttattcttgggtgaacaagatttttcaccctttggtggttatccagcatcattttttccgttgactttagatgagaaagaagatgacgactatattcacaatccaaatgatgaggaagaagcaagactagataaaagacgatttattgaagattttaaacatatggacagaagatccttcctcggtcttttaggtatcctattcttgtttatggctgctgtagtcgtattcattgttttacctgccattacattttctggggttgtgtaccacgaccatcatcatccagcgaatacgaacaatacctcatcttcaaatagcacgtcaaagttgttgacagagtaccaatatcctaaacttgctgccatcagaacaactctggttgatccagatacacccgatagtgccagcaaaagagaggccaaagacggatccaaatgggagttagtcttttccgatgaatttaatgctgatggtagaacattttacgatggtgatgatcaattttggacagctcctgacattcactacgatgccactaaggatcttgaatggtattcaccagatgccgttacaacttccaacggtactttgacactgagaatggatgcattcaaaaatcacggcctttactacagatctggtatggtgcaaagttggaataaaatgtgtttcactgaaggcgctttggaaatttctgccaatctacccaactatggtcgtatttcagggctgtggcctggtatgtggaccatgggaaatttgggtagaccaggttatttggccagcactcagggcgtttggccttattcttatgaagcatgtgatggtggtataacaccgaatcaaagttctcctgatggtatttcttttctgccgggtcagaagctaagtgtctgtacttgtgatgatgaagatcaccccaatcaaggtgttggtaggggagcaccagaaatcgatattttagaaggtgaagctgacacgattttaggtgttggtgtggcatctcaatctttgcaaatcgctccgtttgatatttggtatatgccggattatgatttcattgaggtctacaatttcacaacaacaacgatgaacacatatgctggtggtccctttcaacaagccgtctctgcgatttctactttaaatgttagctggtacgaattcggagaggaggccggctatttccaaaaatacgctattgaatatctcaatgatgacgatgatggttatattcgttggtttgtcggagaaaatccaaccttcactctttattcaacctctttacatcctaatggtaatattgactggagaagaattagcaaagaaccaatgtcggccgttatgaatctgggtatctctaataattgggcctatattgattggcaatacttatttttcccggttacaatgtcaatagactacgtcagattgtatcagcctaaaggctctaactcgattacttgcgatccagaagactatccaacatatgattacatacaggatcatttagctgcttattataaccccaatttgacaacttgggagcaggctggatatactttcccgaagaatatcttgacgggagattgtaaaagttcgaaattttcattgtcgtga

SEQ ID NO: 1013 - DNA, 2127 bp, Saccharomyces pastorianus
atggttttgaagtctacatctgccaacgatgtatcagtgtatcaagtctccggtacaaacgtttcgagatcattacctgactggattgctaaaaagcgtaagagacaattgaaaaatgatttagaatatcaaaacagagtggaattaatccaagattttgaatttagcgaagcttctaataaaatcaaggtaagtatggatggacaatattgtatggctactggtacatacaaaccccaaattcacgtttatgacttcgccaatttatcgctaaaatttgatagacatacagatgccgaaaatgtcgatttcaccatcctttctgatgattggaccaaaagtgcacatttacagaatgacagaagtattcaatttcaaaacaaaggtgggctacattataccacaagaattcctaaatttggaagaagtttagtctacaacaatgtgaattgtgaactatatgttggtgccagcggtaacgaactatacagattgaatttagaaaaaggtagatttttgaatcccttcaaactagataccgagggtgtcaaccatgtttctatcaatcaagtgaacgggttattggcggcaggaacagaaaagaatgtggtagaattttgggatccaaggtcacgttctcgtgtttccaaactgtacttagaaaacagtattgataataaaccatttcaagttactacaaccagtttccgtaatgatgggttgaattttgcttgtggtacatcaaacggttattcgtacctctacgatctacgtacatccgagccctccatgataaaggaccaaggttatggctttgatattaaaaaaatcatttggttggacgatgttggcacggagaataagattgtaacatgtgacaggagaatcgccaagatatgggatagactcgacggcaaagcatatgcctctatggagccaagtgttgatatcaatgatattgaacatgttccaggtacaggtatgtttttcacagctaatgaaagtattccaatgcacacatattatataccaagtttgggaccatctccacgttggtgctcattcttggattctatcacagaagaattggaagaaaaaccaagcgacacagtttactccaattacaggttcattacaagagatgatgtcaagaagttgaacttaacacatttggtggggtccagtgtattaagagcatacatgcatggtttctttatcaacactgaactttacgataaggtttcattaattgctaatccagatgcatacaaagatgaaagggaaagagaaattagacgtagaattgaaaaagaaagagaatccagaattagaagctcaggtgctgttcaaaaacctaaagtcaaagtcaacaagacattggttgataaattatctcaaaaacgtggtgataaagtcgccggtaaggttcttacggatgatcgtttcaaagaaatttttgaggacgagcagtttcaagttgatgaagatgattatgatttcaagcaattgaacccagtaaaatctatcaaagaaacagaagaaggtgctgctaaacgtatcagagccttgactgctgccgaagaatctgatgaggaaagaatcgctatgaaggacagcaggggtcactatgactacgaagatgaggaatctgacgaagatgaagaatctgatgatgaagaaaagaagaatgtggataaggaagaattgagtgaaaaggatttgagaaagatagaaaagcaaagagcactaatcgtacgtagaaagaaagaaaaggaacaaagtgaacgatttatgaatgaaatgaaagcaggtccttccgtgggaacgcaagagggcgaaggtgctcatgttacattcggtgaacaagtcggagaattacacgaagaggaagatgggaagaagtctaaggaatctatcttacatcgtaatcatcgtggtgaagcagaacttacgtttgttccccaaagaaagagcaaaaaggatagacacagtaaaaccaaacgtcctgaaaattcatcggacgaagaaaatgttgatgaggacggtaataagaaggacaacggtagatcaagagctagatttgaaaatagaagaagggctagtaaaaacgtgttccgtggcatgtaa

SEQ ID NO: 1014 - DNA, 639 bp, Saccharomyces pastorianus
atgagcaccgcattcaacgattactgcactgtttgtgatcgtcttattccttcatctccacagaaaacaaacaatagcaataagaaaatccaaagggacaatgaaaccaagaacaattcgcagtcggataaactgtattgctccgaagattgtaagctcaaggactcaaaccctttaaatgagaagctattgtctcacctacataagaagataaaggcttctcattcgcaagatctcacccctccgttttcatattccaaaaatataactgcatcaaaccttttcgagccggccacttcattatcttcttctccatcgtcatcaactattccctttgacgaattggataagttagattctttgctcatttccccattgctgctgccccaagatggtgtcgcaaacgctaaaaaggaattccattccactcacgtcaacggctacgacgatactaatgaacactatttgaacctaaccgactgtctcaaactcgactccggctaccaattgcattcaaaggcacacttgggctacgaaaatgatttaccaaggtcaaacgataccaatgacaatagtttgatctcggatcaaatcattgaaaacaactacaacctatggtttagactatcttctagttag

SEQ ID NO: 1015 - DNA, 870 bp, Saccharomyces pastorianus
atgatggtgcctagaaataatccgctactagttttcaataggctattccttcgatgccggggtgtgagttcaccaatgcagagaaacttatgtcagataccacacaggaacctcagtttttcccgtacaccattaggagagaaccctttactacgatctgcgaccaatatttcgttggtgcggaacaaaaggttctacagcggtggggggaagaataacgagtttaaggaagatgaaactaaaagtgaagaaagaaagaaagatgaaccgcgcggtatcaaagggttgatggcaaaatacggttattctgcattgatcgtatatatcctgttaacatgtattgatttgcccctatgtttcttaggagtccattcactaggtgaggaaaaaatcaagatatatctgaatagaggtaagcagctaattgggatggacgggtcagatgaaagcaaagtgatcgaagaagtgaggaagaagcaagcccgccgcgaagccatccaggcgaaaaacgccaatgatgtagaggacgcgtcgaagaagacgctcaatgaaagatggcaagagatgaaggacagcacgctgttagcagaactgctgatcgcgtacggtgtacacaagagtttaatcatcgtaagagtgcccctgacggcactgctaacaccatccttcgttagattcttgcagaagtttggcatcgacctaatgaagaagcagaagaaagcattccaaatgatggcctcggaagctaaattaaggtacaaggggaacaaccctagcgatttcataaagaacgagagcacaagcgcactggaaattacgaggcgcaaaccgaaaactaagggccagaaatggttcaatggcctaatgtaa

SEQ ID NO: 1016 - DNA, 468 bp, Saccharomyces pastorianus
atgaaggttgaaatcgattccttttcaggtaacagaatctacccaggtagaggtactttgtttgtccgtggtgactccaagatcttcagattccaaaactccaaatctgcttctttgttcaagcaaagaaagaacccaagaagaattgcttggactgtcttgttcagaaagcaccacaagaaaggtatcactgaagaagttgccaagaagagatctagaaagaccgtcaaggcccaaagaccaatcactggtgcttctttggacttgatcaaggaaagaagagctttgaagccagaagttagaaaggctaacagagacgaaaaattgaaggctgacaaggaaaagaagaaggctgacaaggctgccagaaaggctgaaaaggctaagtctgttggtactcaaggttccaaattctccaagcaacaagccaagggtgccttccaaaaggtcgctgccacttcccgttaa

SEQ ID NO: 1017 - DNA, 819 bp, Saccharomyces pastorianus
atgagagactacaaattggtggtattaggtgcaggtggtgttggtaaatcctgtttgactgtacaatttgtacaaggagtttatttggatacgtatgatccaacaatcgaagattcctacaggaagaacatcgagatcgataataaagttttcgatctggaaatcctagacacagcagggattgcgcaattcacagcgatgcgagaactgtatataaaatcaggaatgggtttcctcttggtgtattcagtaacggaccgacaatctttagaagaactgatggaattaagagaacaagttttgagaatcaaagattccgaccgtgttccaatggtcctaataggtaataaagccgatctaaacaatgaaagggtaataagcgtagaagagggaattgaagtaagcagtaaatggggcagagtcccattttatgaaaccagcgctttattgagaagtaatgtcgacgaagtgtttgtggatctggtgagacaaatcattcggaatgaaatggaaagtgttgccattaaagacgcaagaaatcaaagccaacagtttgatatgaaccagtcttcatcgtctaggcttcctagctctgcaaaaaaagatacaaagcaatcaaaaaataaacaatcatccagagatttatataataagtcatcacatggccaagccaagacaaaaaaatctacatcagttaatgaaaagcgtaaaccatcacacccagcttctaaacccggggttaccaacagaacagattctaactcatctttacagcaaaaaatgaagaaaaagaagaactcatcatgcagtattttgtaa

SEQ ID NO: 1018 - DNA, 1524 bp, Saccharomyces pastorianus
atgactaaatctgaacagcaaactgattcgagacatgacgttatcgacttggtcggtaacaccccattgattgcactaagaaaattgccaaaggccctaggcatcagaccacaaatctatgctaagcttgaattatacaacccaggtggttccatcaaggacagaatcgctaagtcgatggttgaagaagcagaagcttccggcagaattcatccttccagatctactctgatcgaacctacctctggtaacaccggtattggtctggctttggtcggtgcaatcaagggttacagaactatcatcaccttgcctgaaaagatgtccaacgaaaaagtttctgttttgaaggcccttggcgctgaaatcatcagaactccaactgccgctgcctgggactctccagaatcccatatcggtgttgctaagaaattggagaaggaaattccaggcgctgttatcctagaccaatataacaacaagatgaacccagaggctcattacttcggtacaggtcgtgaaattcaaagacaactacaagacttaaaccttttcgacaatctacgtgctgtcgttgccggtgccggtactggtggtaccatcactggtattgctaaatacttgaaagaacaagacgagaaaattcaaatcgtgggtgctgatccactcggatccattttggctgtacctgaaaatctaaataagactgacgtcactgattataaagtcgaaggtattggttacgatttcattcccgatgtcttgaatagagatttgattgacgtctggtataagaccgacgataagccatctttcaaatacgccagacaattaatttctaacgaaggtgtcttggtgggtggttcctccggttccgctttcgctgcggtcatcaattactgtgaagaccatcctgaattaactgaagacgacgtcattgtcgccattttcccagattccgttagatcgtatctaaccaagtttgttgacgacgagtggttaaagaagaacgatttgtgggatgatgaaatcttgacccgtttcgatacatctaagctggaaacttctaccaacacatacgccgatgtcttcggtgacgctactgtaaaagatctacatttgaaacctgtcgtttccgtcaaggagactgccaaggtggccgatgtcatcaagattttgaaagacaatggctttgaccaattgcctgtattggccgaagacggcaagttgtccggtttagttactctatctgagttgcttaagaaactatctatcaacaacgctgctagcgacaacactataaagggtaagtacttggacttcaagaaattaaacaatttcaacgatgtttcctcttacaacgacaacaaatctggtaagaagaagttcatcagctttcatgaaaactctaagttgggtgacttgaaccgtttctttgaaaaaaactcctctgctgttatcactgacggcttgaagccaatccatattgttactaagatggatctactaagttacttagcataa

SEQ ID NO: 1019 - DNA, 1284 bp, Saccharomyces pastorianus
atgacggatcccagaagaagaacaggtcgtcacttcttgacaccagaaaatttatcgtctacgatacagatcacaagcttacccccagaatggaaccaagatataattacatcggtcgtggcaggttctggtccaattatagatataaaacctaagaatgatccgagaactggtaaacttaccggtgtgctgttcgactatctgactagtaaagactgtaaacgtgcttgggaaactttaaatagaattgaaaattttcccgtaaagatagaacaaataattccttcaaactataaagagcatcttaaagaagcagcaagtaataataataatatcaataatattaatagtcaaaagcaagtgttacagcttaatagagactcttatccctttgaagcgggattagaattgccattcgaaatggtgacagaggtccctattcctaggcgaccaccaccaccgcaagctttgaacaataccaattccgcttcaaacaacacaaatattcaatttcctgatatattaagtaaagcatccaaacacttgccaactttccaagatggctcaattactgctccagataaaatttcgcaaaatttaagtaaaattccgccattacaacttattgaaatcatatcaaatttgaaaatcctatctaatcaagagaatatccagaaatcgcaattggaatccttcttgaacaccaacaacgatatcaccatatctgtgacacaagccctattggaaatggggttcatagattacagcgtggtaacaaaagtgttgaagtctcaaactagtgaggttccatcgatgctttcaagtaacaatacaagcaattcaaacacccctatgggcggaatcagaaacaatactccgctgcacgtttcgtccaatgacgtcaataaccacgccaacaatatgccagtgaacatgggtatatcaatgcccatggcaacacctccatttattcctccccctttacaacagcagccgtttggctttatgccaccaggaccgttcatgcctccaactcaaggctctgtgcccatgaaccaaccctcgttggttcagcaacaaagtataaacactgcagaagcgccatccggagcaagcaaggatagttccaatggaaccatcaatattgcgaaactgcagctgctacccgaaaaccaacaagacatgatcaaacaagttcttactttgacgcctgtccagatccaaagtttaccaagtgaccagcaacttatggtggaaaactttagaaaggaatatatactctaa

SEQ ID NO: 1020 - DNA, 1158 bp, Saccharomyces pastorianus
atggctaagactactaaagtaaaaggtaacaagaaggaagctaaggcttccaagcagaccaaggaagaaaaggctgccgcagtctcttcctcttccgcttcatcctcctcatcttcatcttcagaatctgaatccgattcatcttcatcctcttctgacagtgaaagtgaaactgaaaccaagaaggaaaccaaggatgcctcctcttctgaatcttcttccgacgaagaagaaagtaagaaagaagaatctaaagaatcttccagctctgattcctcttctgacgaagaagaagaatctaacgacaagaagcgtaaatctgtagacgctgaagaagaagaagaagaagaatccaacaagaagcaaaagaacgaagaatctcaagaacctgccactatcttcgtcggtagactatcatggtccatcgatgatgaatggttaaagaaggaattcgaacccgtcggtggtgtcatcagcgctagagttatctacgaaagaggtaccgacagatctcgtggttacggttacgttgacttcgaaaaccaatcttatgctgaaaaggccattaaagaaatgcaaggtaaagaaatcgatggtagaccaattaactgtgacatttccacaagtaagccagccggtaacaacaacaacaacgatcgtgccaagaagttcggtgacactccatctgaaccatctgacactttattcttgggtaacttgtccttcaatgctgacagagatactattttcgaaatgttcgctaagcacggtgaagttgtttccgttcgtattccaacacatccagaaaccgaacagccaaagggtttcggttacgttcaatactccagcttggacgacgccaagaaggctctagatgctttgcaaggtgaatacattgacaacagaccagtcagactagactactcttctccaagaccaaacaacgatggtggccgtggtggtagccgtggtttcggtggtcgtggtggtggccgtggtggtaaccgtggtttcggtggctcccgtggcggctcccgtggtggtgctcgtggtggccgtggtggtttcagaccaagtggttccggtgccaacactgctccattaggcagatcaagaaacactgcttctttcgctggttcaaagaaaacatttgattaa

SEQ ID NO: 1021 - DNA, 795 bp, Saccharomyces pastorianus
atgatcgtcactcaaaaaacagtaaatatgaacagagaaccaaaattcaagaaggctgtggccaaaccatcaagagatagacaaacctctgttaccagagccattaggccagtcatggcacgtgatgtgcacagattatcgacgtcatcgtcatccacctcctcctcttcagcatcagggcaaaggaggctttcgagggaagagataataaacgagatggaaaaagaacaagacgctatagtggttagactgcttcgggaaattgaggctttaaaagaggaaaattctagattgaaaaatcaactacaccacccattgccagcaagaagatcatcgccctctttggagagcgaatcggctgttttcgacgatgatgactgcagttacggctacacgttcgacactccaaccctcaagttttcagaggttgcctccaaacgcaccgtgcttcctctaactcccaaggattccatgacacacattgcccaccgccctggaagatcaagccggaatgcttctatgtccagcatgacaaacatctcagacacaatcttccccatagaaactaaaaccaatccaacgcccatatccaagaggaacctttctgccgatctctctcaccatacccacctcccacgctcacttagtggcggcctttctcccagcgactggactgaaacgggcactttgcttcatgatagaagaaggcgttcttccaattacagtatcgatggctcgaactctttgaaggctgatctcatggcgaaaaggtttcaaacagggtcgttgaaataa

SEQ ID NO: 1022 - DNA, 2886 bp, Saccharomyces pastorianus
atgacagacgagactgttcaaccgacacaatccgctccaaggcaggattctgctgcgccaaacgtatcaggcgatgatcagcagcaacagcgtggctataataactacaaccaaggtagtaattacaaccaaaagaagccttacaatagcagcagacctcaccagcaaagaggtggtaagtttggcccaaatagatataatagccgtggcaactatagtggcactggtagttatagaggtgggcacatgggtgccaacgggtccaacagttccaacggttccaacggttccaacgcgccatggaccggctactacaataactaccctgcctattatcaaccacagcaaatgggagccgcaaatgctattcctgtcaacgctgttccagccgatgagaattcctctcctgtcccaaccaagattgagatcactaccaagtctggtgaacatttggatttaaaggagcaatataaagctaaactgcagtctaaggaaggatctaccacacctgcacaatcagattctaaaagtgaaaaatcagaagaaacctctgattccactaccactgctactcctactccttccaccactgattctaaagccagtcctgaagaaactatctctgaagctgaaaagacgagaagaaacttcattgaacaagtcagacttcgtaaggctgctttagaaaagaagagaaaggaacagctcgaaggtgccagtaccagcagtaatgttccaaccggaaccacagctgaaaaggttgaagaaaaggcaccaaccacatccaaggaagctgaagaaactaagcctgccgaagagaaacctgccgaaccagaagctaaggaagacaccccagtcgaaggtaagcaagaagaacaaggtcaaaaagaggaagagtctgctccaaagttattgacttttgccgaacgtttgaagttgaagaagcaacagaaggaacaagaagaaaaggatgaagaaaaggaaaacaaagaagaaccagtacaggaagaaagcgagttccctacaaatccttctactgaacacaatacaaaagaaagtgtagtcaccgaaggtgaagagtcaaaggttgaagaatctgccgaaatctctgaggcacctgccgctagctcagccaaccctgcagaggccgatgacgcagcagcagaagcagaagccgatgaagcagaagccgatggcactgaagccaatggtgaaaccgaagtcgctgctgctgaagccgatgacggcacaaataccgtttctcacatactgaacgtattgaaagacgccaaacctattgaagatgtcttttctttcaactatccagagggtattgaaggtccagatatcaagtataaaaaggaacatgtcaaatacacatatggcccaacttttttgcttcaattcaaggagaagctgaacgttaaggcagacgccgaatgggttcaaagcacttcctccaaaattgtcattccaccaggaatgggaagaggaagtaaaccgagagaccctagtagattcggcaacaactctagccgtggcaacgaattcagaaacaactccgtgagaaatatggacgacagagccaattcaagggcttcatcaaagagaaggtcaaagagaacgactgacgacagaagatctaatagatcgtacacatcaagaagagaccgtgaaagaggttcttacagaaatgaagataggagagaagatgacaaaccaaaggaagatgttgctccattggtcccaagtgctaatagatggattccaaaatcaaaggttaagaagactgaaaagaaattggctcctgatggagagaccgaattattagacaaggatgaagttgaaagaaagatgaagtctctactgaataaacttacattagaaatgttcgacaccatttcatctgaaattttagctattgctaacatatctgtatgggaaacaaatggtgaaaccctaaaggctgtgatagaacaaattttcttaaaggcttgtgacgaaccccattggtcttctatgtatgctcagttatgtggtaaggttgttaaagaattaaatccagacatttcagacgaaactaatgaaggcaagaccggtccaaaattggtcttacattacttggttgctagatgtcatgcagaattcgacaagggttggaccgataaattaccaacaaaggaagatggtactccattagaacccgagatgatgtctgaagaatattatgccactgcctccgcgaagagaagaggtttaggtttagttcgtttcatcggtttcttgtaccgtttgaacttattaaccggtaagatgatgttcgaatgtttccgtagattgatgaaggatttgactgactctccatccgaagaaaccctagagtcagttgttgaattgttgaatactgttggtgaacaattcgaaacggatagtttcagaacaggccaagccacattggaaggttcccaattactcgatagtttattcggtatattagacaatataatcgaaactgctgagatttctagtagaatcaaatttaaattgattgacattaaggaattgagacacgacaaaaactggaatagcgacaagaaagacaatggtccaaagactatccaacaaattcatgaagaagaagagagacaacgtcaactaaagagcaactcaagatcgaattcgagacgtacgaataattctagcaatagacattcttacagaagagacgcccctcctgcattaaaggatagctttattacaaccagaacatattctcaaagaaacactcaaagggctccacctccaaaagaagaaccctctgcaccaacttccactgccacaaatatgtttagtgcattaatgggcgaaagtgatgacgaagaataa

SEQ ID NO: 1023 - DNA, 1215 bp, Saccharomyces pastorianus
atgacaactttaaaaatgattgaagtgtatacgcaaaatggactacgaaaagtacgaccctactataacacgagatcagcgtttgtaaagggacgctggttggggaggcctttgatagacgtccttgctagtgaatttaagctgcgttcaagggattatcatcttgggcagatacagaaaggcacatataggctgattcgagatggcgagccgttgatagccagtcagcttatatccacagttattaagaatcatgatattttagaaacaacaactcataagcatgagccgccagtaaaacaatggtgtagccaggcagctgaatctgatgattcggccaggacgatagcgggattcaaaactgtttttgaagatgagaacatcttggtcatcgataaacccaatggtatacctgtgcaccccactggccagtttttccagaatacaataactgaagtactaaaatctcacggtgtagatgcttttccatgctaccgactggacaagatcacatcaggtttgttgatactggctaagaatagcctgagcgcaggagaaattcagaagaatattcgcgcaaggaatatggataaatactacttggcaagagttaaagggaaatttgcccattccgactcggtactgaacggcgaatttgcaatgaatactctttttgacgacattgctaatactacgatagagaagtcgcccatatattccatcgatccaaagagacaattcccggtcggtttatcggcgtcgaaggatgctattaccaaattctacccgataaggtacattccccacgccgatgaaagtgttgtagcttgcaagccaatcactggaaggacgcaccaaatccggatccatttagccaggcttggtcatcccatagtcaacgataatgtatattgttcacagattaccaagtatcctgaaaggctaaattttatcattcaagttctcaaatgggaggatcatccgggactggataccgacaaattgagagtgagttttcaaaaaattattgaagaaacgaaaagtaattgtcagactatgaaatcatcgtgttcagaatgcgatgtcatcgaattaaaagacccattgctgtcagacttagaattatggctgcacgcttggaagtatgaggacgctgaaggcaagttcaagtttgaaacagaactaccaaactgggcgcaaataatcaatagttag

SEQ ID NO: 1024 - DNA, 279 bp, Saccharomyces pastorianus
atggggaaacgcttttcggaatccgctgctaagaaagcagctggtatggcaaggaaaagagaccaagctcgtattaagcagagagaagaaattgaaaagctagaagcagaggaggcttctaagtgggagcaaggctcgaaaaaagaaaactctagaaaacaagaagaagaacagaaaaagcaagaaaaattaagggccaagaaagagcgtgaagcgttactagctgcagaggaagaagaattgggcaagggtggcaagggcaagagaaagaccaagtaa

SEQ ID NO: 1025 - DNA, 3432 bp, Saccharomyces pastorianus
atgaggatcatcaaaagtagaaaacgaggcaaaaataagaaaccatcgttgatcttaaaaattcatgtcattcaagcggagaatatagacgctatcaagactttcaattgtaaccccgtatgctttgttaccaccaacacattttatagtcagaagactagcaagctgaagaactcaaatacacactggaaccaaacgttaaagatcaagcttccgagaagtccgaaatctgagtggctgaggattatagtatatgacgctttgccaacgggtaccgctccaacgacccctaacagatcaaggacgactacagcgaatacttccacaaccacgctgtcgaattctggacaaaattcccactctcactcatccagaaatttagccctaacgtccaaaagtaaccaaacttccacatccatcaattcagcatcgaccacaaccgcgactgtcgcttccaattccgcttcatctctatctacatcaaactccggctcgacacacaagactaagacgagtagctacttgtacctaggtgaggcaaaaatctcattgcttgatctatttaaaagaagggatactacaacgagctataagttttcgatcgaacctcaatggtaccatctgtacgatatgaaaagaggaaatcagcagaatcaatcgagctctgattgtttcgtgggtgatattttgcttgggtttaagttggaatgtaatttgaaaaaaattccaacatttcaggcttttaatagctggaggaatgaattaaatgattattggggcaaaatggatagaaataaagcccgtatgagatcttctagttctttaccgcctccactagaagacacaccgagtaatagttcaggctttagcgaacaagagatatcacgtaagaaagcatacagtgatgacgaactagtccatgaagaagaagatgaagaagaagaggccgatgctgaagatgatattgatgacgaggattttatagaagatgaaaacagtagcgacaatatatctatagaaaggacatatgatatagataacgatactgtatacgattcaatgtccgaagttgcctcgctaaatgatgaaggactagaaattttgaacgatttcgaagatgtggataatcctagcatggcagatactagcgtgcatgacatcgaagaggagacatgtatgagtttatcttcgatgataacggcgctagatgaatatgacgtcgtagaaccagaagatgttaggcgattcccagtagtatcggaaaatgagataacatcgatggatgatgatgaatctgaaaaccaacgggggagtgatgaagaattcgacatatataatgaagacaaaaacgaggatacagattctcggtccaacgaatacgttggaagtcgacttttacatttacaaagaggaaaacgtaacagatcctatgcgagttacttacacagaagagcgaaaagtaacttcttcatatccaaaaaagagcacgccaccggggttgtatttatgcatatagaagctatcaagaatttgcccgctttaagaaatagattatctaagaccaattatgagatggatccatttgttgtcatttcatttggtaggagagtatttaaaacgtcctggagaaagcatactttgaacccggagttcaatgaatatgctgccttcgaagtattccctcacgaaacgaattttgctttcaatattaaagttgttgacaaggactcattttcgtttaatgatgacgttgcaaaatgcgaacttgcctggtttgatatgttgcaacaacaacaacatcaaaacgaatggataccttatgaaatacccttggatcttacagtggaaccgccacacgcgcccaaacaagcaacgttatactcgcacttcaaatatgtttcctatacttctttgaaaaacaacttttggaaagaagccgttaacacatcaatcactttagaaaggctcgatatcgttcaagtgatgctttatctcgaacgtcttggttcatttgcgatgactgattcttttgaactattccagcattttgataaactagtttgggcgggagagaccatcactagatctcaattggttgaagggttacaaacatggaggaaatccaccaattttaggcgtatttggacatgccctaggtgctttcgttcatgcaaacctaccagaaatgctagacgatccaaattagttctggaaaatgacttgataacacatttcgctatatgcacattttcaaaaaaacacaaaactttgaaaccttcatacgtttcctctgcatttgcttccaaaagatggttttcaaaaattctaataaaattaacctatggtaagtatgctctaggatctaacaacgcaaatattctggtacaagaccgtgacacggggataatcatagaggagaaaataagcgcacatgtcaagttagggatgagaatcatctacaatggcaagagtccagagtccaagaaatttagatccctattgaagacattgtccgttaggcaaggaaaaaaatttgacagcactgcatctgctaaacaaatcgaacctttcgttaaatttcactctctggatctttcgcaatgccgagatagggacttcaagacattcaatgaatttttttatagaaaattgaaaccaggaagtcggtcacctgaaagcaccaacaaagaaatattcttctcaccggctgattcaaggtgtactgtattctcaactatacaggaatcaaaagaaatatggataaagggcagaaaattttccatcaacaaattagccaatggctatagtcccgaaatatttaacgatagtaagtgcagcatcggtatatttagactggcgccacaagattatcataggtttcattcaccatgtaatggtaaaattgggaaacctatatatgtggatggtgaatattatactgtaaacccaatggctgttcgcagcgagttggatgtctttggtgagaacataagagttgtcattcccattgattctcctgagtttggcaaactgttgtatataccaattggtgccatgatggttggatcgatattattgacgtgcaaagaaaacgatgtagttgaaagtgggcaagaactaggatacttcaaattcggtggatccactattgtaattgttatcccacaggacaacttcatgtttgactcagatcttgttaaaaattcttcggagcgtattgaaacgctagttaaagttgggatgagtattggacatacatcgagtgtaaatgagttaaagagaattcgtatcaaagtagatgatccaaagaaaatagaacgaattaaaagaacgatcagtgtaagcgacgaaaacgctagagccgctgggaatgtcacatgggaatatcatacgttgcaggaaatgatgaacaaaagtttggctgagctttga

SEQ ID NO: 1026 - DNA, 1107 bp, Saccharomyces pastorianus
atgggtgttattgacaaaatcaaggctatcgaggaagaaatggccagaacccaaaagaataaggccacagaacatcatctgggtcttttgaagggtaaactggctagatatagacagcagctgctggcagatgaggctggcagtggtggcggtggcggctctggatttgaagtggccaagtcaggtgacgctagagttgtcttgataggctatccttctgttggtaaatcgtccctattgggtaaaatcaccactactaaatcagaaattgctcattacgcgttcacaactttgacctctgttccaggtgtgttgaaatatcaaggtgctgaaatccaaatcgtggatcttccaggtattatttatggtgcttcgcaaggtaaaggccgtggtagacaagttgtagccactgcaagaaccgccgatctagtgttaatggttttggatgccacaaagagtgaacaccagcggacatctttggagaaagaattggaaaacgtggggatcagattaaataaggagaaaccaaacatctactataaaaaaaaggaaactggtggtgtcaaagttacattcacctctcctccaaagaataatttaacggatcaagcaatcaaaatgatcttaagagactatcgtatccataacgcagaagttctcgtaagggacgacgagtgtactattgatgatttcattgatgtcatcaacgaacaacatagaaattatgtcaaatgtctttacgtttataataaaatcgatgcggtatcattagaggaagtagacaaattggccagagaaccgaacaccgttgttatgtcatgtgaaatggatttaggattacaagatgtcgttgaagaaatttggtaccagttgaatttgagccgggtctatacaaagaaaagaggtattagaccagtgttcaatgatcccctagtagtgaggacggattcgaccattggtgatctatgccatggtatccacagagacttcaaggataagttcaaatatgcattggtttggggctcatccgccaagcattctcctcaaaaatgtgggttgaatcacaaaattgatgatgaggatgtagtttctttatttgcgaaatga

SEQ ID NO: 1027 - DNA, 1491 bp, Saccharomyces pastorianus
atgtctgctataaacgttgcgcctgagttaattaatgctgacaacacagtcacgtacgatgccattgtcatcggtgctggtgttatcggtccttgtgttgctactggtttagcaagaaagggtaagaaagtccttatcgttgagcgtgattgggctatgccagacagaatcgttggtgaattgatgcagcctggtggtgtcagggccttgagaagtttgggtatggtacaatccatcaacaacattgaggcatacccagttaccggttacactgttttctatgacggtgaacaggtcgacattccatatccttacaaggccgatattgctaaggttgaaaaattaaaggatttagtcaaagacggtaacgacaaggttttggaggacagcactattcacatcaaggattacgaagatgatgaaagggaaagaggtgttgctttcgttcatggtagattcttgaacaacttaagaagcattactgctcaagaaccaaacgtcactagagtgcaaggtaactgtattgacattttgaaagacgaaaagaacgaggttgtcggtgcaaagattgacattgatggccgtggtaaagtggagttcaaggctcacttgacctttgtttgtgatggtatcttttcccgtttcagaaaggaattgcatccagaccatgtcccaactgtcggttcctccttcgtcggtatgtccctattcaacgctaagaaccctgctcccatgcacggtcacgttatcctcggtagcgaacacatgccaatcttggtttatcaaattagcccagaggaaacaagaattctttgtgcttacaactctccaaaggtcccagccgatatcaagagctggatgattaaggatgttcagcctttcattccaaagagtctacgtccttcctttgacgaagccgtcagccaaggtaaatttagagccatgccaaactcctacttgccagccagacaaaacgatgtcacaggtatgtgtgttatcggtgatgcccttaacatgagacacccattgaccggtggtggtatgactgttggtttgcatgacgttgtcttgttgatcaagaagattggtgaactagacttcagtgaccgtgaaaaggttttggatgaattactagactaccatttcgaaagaaagagttacgactctgttatcaacgttttatcagtcgctttgtactcgttgtttgccgctgatagcgataacttgaaggctcttcaaaagggttgtttcaaatacttccaaagaggtggagactgtgtcaacaagccggttgaatttttgtctggtgtcttaccaaaacctttgttgttaaccagaatcttcttcgccgttgccttctataccatttacttgaacatggaagaacgcggtttcttagggttgccaatggccttattggaagatatcatgatcttaatcacagctattagggtattcactccattcttgtttggtgaattgattggttaa

SEQ ID NO: 1028 - DNA, 2169 bp, Saccharomyces pastorianus
atgaagggaaacttcaggaaaagagacagctctacaaactcaagaaagggtggtaatcctgacaataactacaccaatggaggcggttcaagtaaccaaaataatggctcaatgttctatgagaatgctgaaactaccaaaaatttcaatgaccgccaagattatttactagtcaatagtattggctccaatgtcaccgtgactgtcacttctggtgtgaagtacgacggtttgttagtctcctgtaatttggagtcctccaacggtgttgatgtggtcttgagattccccaaagttgttgatgcaggagtaagtaactctgtagatgacttggccagaactttgggagaaacccttttgattcacggcgaagatgtcgctgagttggaattaaagaacatcgatttgtctcttgatgagaaatgggaaaattccaaaattcaagaggcaacacccgctagagattctgaaaaggaaaaggttaatagcgaattgaatgaaaacggtaagttcagaactgatgttgacatctctcgctctggtaaagaaattaaggagcgtaaattagaaaaatggacacctgaagaaggaaccgaacgtttcgacatcaataagggacaaaccttggaagacgattcaactgcgtgggatcaattcgctgtcaacgaaaaaaaatttggtgtcaagtcgacttttgatgagcatttgtatacgacaaagattaataaggaagatcctaattttgggaaaagattgcaagaggcagaaagaattgccaaggaaattgaatctcaagggccctcaggtaatattcatatcgcagaagacagaggtattaatatcgacgattctggcttagacgaagaagacttatattcaggtgttgatagaaggggcgatgagttgttggctgctttgaaaagtaactcaaaacctaatgcaaacaaggcgagcagatatgttccaccaactttgaggcaacaacctcataatatggatcctgcaattatctcttcaagtaattctaccaacaacgaaactgttgctgctactactgttaccactcctgcagaagcagaagcaacaaaggaaaaagtctctcaaaagtccctcaagagcaagaaaggtttaagtagcaaagaagctcaaatcgaagaattaaagaaattttccgagaaattcaaggttccttacgatataccaaaggatatgccggaagttttgaaaaggtcaaactcgacattgaaatccaattcttcgcttccaccaaaaccaattagcaaaacgccttccgctaagactgtttcgccaactgctcaggtcattgcgggaaaatctgaatctagaaggagtacaagcaacatgtctcaaggtcaatcatctgcggctcacaccaccagatcgagcacttcgtccagaagacgtaaccatggttcatttttcggagcaaagaatccacataccaacgatgccaaaagagcagccttcgggaaaagtttcaacatgttcatcaaatccaaagaagcgcacgatgaaaaacaaagacaacgtaacgcatctgaaagcatggaaccatttttcattgaaaagccttacttcactgcgccaacttggttgaatacgattgaagaatcatacaagatttttttcccagacgagaatacagccatacaagaagcccaaaccaggttccagcaacgccaaatgaattccatgggtcatggcgggcctggaatgaatccaaacataggcatgaacatgggcgggatgatgggcttccccatgggaggtccaaacgcttcaccaaccccgatgatgaatggtttcgccgcaggatccatgggaatgtacatgccattccagcctcaaccaatgttttaccacccatcaatgccgcaaatgatgcctgttatgggaaacaatggagctgaagatggaggagggaacatatcacctcatatgccctcaggtttcatggcaggtggtccgggagcacctatgggtgcatttgggtatcccggtgggatgccatttcaaggaatgatgggatcaggtccatctgggatgccggcaagtggttcggcaattcacagtcatggtcatggtagaaattatcaccaaagcaaccaccatggtcatcgtaacaatagtactagtggccataaatag

SEQ ID NO: 1029 - DNA, 318 bp, Saccharomyces pastorianus
atgggtctatcttctatcttcggtggcggagcaccatctcaacaaaaggacgcagcttcaagtgctaagacttcatcaaacccaatagccattgaactaaagaaccagatcgctcaagagctggccgtggccaatgccactgaactggtgaacaaaatctctgaaaactgctttgaaaaatgcttaacctctccatacacttctagaaatgacccatgcattgaccagtgcttagccaaatatatgagaagttggaacgtcatatcgaaagcttatatttctagaattcaaaacgcctctgcttctggtgaaatctag

SEQ ID NO: 1030 - DNA, 5853 bp, Saccharomyces pastorianus
atgtcgttcaccgataacggtttgggatcgttgaaagctcatatcaggagaactctacgatcgattcacaacctcccctattttaggttcacgagaggccctactgaaagggctgatatgagcagagccctaaaggaatttatctatagatatttgtattttatcatttccaatgatggtgaaaacttatcaactttatttactgctcatcccaagcaaaagtcaagtaatcaggaacttgctgttttccccgaaagtttagaagatgccctcgacgttgacaagataacatctcaagggacctttcccttttacaagatagacgaatctaaaataggtgatgtccacaaacatactggcaggaactgtgggagaaaatttaagattggagaacctctgtatagatgccatgaatgtggctgtgatgacacttgtgtgctttgcatccattgtttcaatccaaaggaccatataaatcatcatgtttgtaccgatatctgttctgaatttactagcggaatttgtgactgtggggatgaggaagcttggaattcttcgctccattgtaaagctgaagaacaaggaaacgatacatcggaagacccaagtaattttgacagtacaaagcaaaaagatgtatggaatgatccagaatgtattgccctagtagaactagttctttccgaagtattcgactatttcattgacgtttttaatcaaaatattgaacctctgcccacaattcaaaaggacatcaccatcaaactaagagaaatgactcaacaaggtaagatgtatgaaagagctcagtttttaaatgatttgaaatatgagaatgattatatgttcgatggaaccacaacggcaaagacaagcccttcgaatagccctgaagcatccccatcgctcgcaaaaattgatcctgaaaactacaccgtaataatctacaacgacgaataccataactattctcaagccacaacggcattgaggcaaggtgtacctgataatgtccatatcgacttgttaacctccagaattgatggagaaggtcgtgcaatgttaaaatgttcgcaagacttatcgtctgtattaggcggatttttcgctgtgcaaacaaacgggttgagtgctactttaacatcatggtcagaataccttcatcaggaagcctgtaagtacatcattctttggatcacacactgcttaaatataccaaacccttcctttcaaattacttttagaaacatgatgggcaagtcgctctgttcggaatatttaaatgctacggaatcccgtgatatgacacccgtggtagagaaatatttcagtacaaaatttgataaggatgacccatatagatatatcgatttatctgtccttgccgagggcaaccaaattcctttgggtcaccataaagttttacctgaatcaagtacccattctctttccacactaataaatgacgtagaaaatctaacatcaaaggaatactctaacacaagattacagcatattttgtattttgataataggtattggaaaagactaagaaaagatattcaaaatgtaattatacctacgttagcgtcatcaactttatacaagccaattttttgtcaacaagtggtagaaatattcaatcatatcacaagatcagtggcatatatggatagagaacctcaactaacagccataagagaatgtgtagttcagctttttacatgccccacgaacaccaggaatatctttgaaaaccaaagtttcctagatattctctggtcaatcatcgatatcttcaaggaattttgcaaagtagaggccggtgttttgatttggcaaagagttcagaaaagtaacctgacaaagagttatagtctatcattcaaacagggtttgtatacagtggaaactttattaagtaaagtaaatgatcctaatattacaataagaccgaaggtatttatatcactgctgactcttggtaagctcttcaacggggcttggaagatcaaacgcaaggaaggtgaacatgttcttcatgaagatcaaaactttatctcttacttggaatacactacttctatttatagtattatccaaactgccgaaaaagtccttgaaaaatcacatgattcccttgatttaaatctagttttgaatgctattagaatagtcagctcgtttttgggtaataggtcgttgacttataaattaatatatgattcacatgagattatcaagtttagcgttagccatgagagagttgcatttatgaatccgatacaaacaatgctttcattccttattgaaaaagtttccttaaaagatgcatacgaatctttagagaattgtccagatttcttgaaaatcgcagatttctctttaagatccgttgttttatgctctcaaattgacgttgggttctgggtcagaaatggtatgtctgttttacatcaagcatcatattataaaaataatcctgagttgggctcctattccagagatatacatttgaaccagttggctattatctgggagcgcgatgatcttccaagagtgatatataacattctcgatagatgggagttactggactggttcatgggtgaggctgagtatcagcacacggtgtacgaagacaagatttcgttcatgattcaacaatttattgcctttatttatcaaattttgactgaaagacaatatttcaagaccttttctttattgagagataggaggatggacatgattaaaaactcaatcatgtacaacctttacatgaagcctctttcatattcgaaattactaaaatcagttcctgattatttaaccgatgacactactgaatttgatgaagcacttgaagaagtttccgtgtttgttgaacctaagggcctggctgacaacggtgttttcaaattgaaagcagccctgtatgcaaaaattgatccattaaagttgctaaatttagaaaacgaatttgaaagcagtgccaccatcattaagacacatttggctaaaaacaaagacgaggtatctaaggttgtactaatacctcaggtttctacaaaattattagacaaaggtgctatgaatttgggtgagttcacaagaaatacggtatttgccaaagtgatttataaattactacaagtatgcctggatatggaggatagcacttttcttaatgaattactgcatttggtccatggtatattcaaagatgacgaactgataaacggcaaggactctataccggaagcttatttggcaaaacccatatgcaacttattattaagtattgcgaatgctaaatcggatatattctccgagagtattgtccgtaaagctgactacttgttggagaagatgataatgaaaaaaccagatgaaatattcgaatcactgatagcaagttttggtaaccaatatatcgataattataaagacaaaaaactaagtcaaggcgttaacttgcaggagactgaaaaggaacgtaagagaagaatggccaaaaaacaccaagcgagacttttggcgaaattcaacaaccaacaaagcaagtttatgaaagagcatgaatctgaatttgacgagcaagataacgatgttgatatggacggcgaaaaagtatatgaatcagaagatttcacctgcgcactttgtcaagattctagttctaccgatttctttgtaatacctgcataccacgaccatactccaatatttagacctggtaatatttttaatcctagggagtttatggccaaatgggacggattttacaatgatgatgacaaacaggcttatattgatgacgaagtcttggagtctttgaaagaaaatggcacccgtggatctaggaaagtgttcgtatcttgcaatcaccatatccatcataactgtttcaaaagatatgtccaaaaaaagaggttttcatcgaacgcatttatatgtcccttgtgccagaccttttcgaactgtactttgcctatttgtccaacttcaagggcaaatactggtttatcccttgacatgttcctgaagtcggaattatctttagacatactttccagattattcaaaccttttactgaagataactatcgtaccataaactccatattttcattgatggtatcgcaatgccaaggttttgataaagtggtaagaaaacatgtcaattttacccataaggacgtttccttggtattaagtgttcattgggcaaatacaatttcaatgctggaagttgcttctaggttagaaaagccacacaatatttcgtttttcagaagcagagagcagaaatacaagactttgaaaaacattctaatttgcatcatgttatttacttttgtcatcggaaaaccaagtatggagtttgaaccatatccagtagaatctgacataatatgtaaccaaaaccagctcttccaatacatcgttcgcaaatctctattctctccagcttctttacgggaaacgattaccgaggcattgactgttttctgtaagcaatttttggatgattttgttcaaggactttctgatgcagaacaagtggataaactgtatactgaagcaaaaaaattaggagatgtttataatgtagacgaaagtatcctcatcacgttaatgagcataaccgttgtaaaaacggaagggttagaatccaggtcaatttatgatttagcctacacttcattgttgaagagcttacttcctacaataagacgatgcttggttatggtcaaagttttgcacgaactggtgaaggattctgaaaatgagacaatggttatcgatggctttgatgttgaggaagaactcgaatttgaaggtctccctgggtttgttgataaagcattgaaactgattactgataaagaatcatttgttgatctctttaaaacgaaacaagcaatcgttccatcacatccatatttggagagaattccctatgagtactgtggtattgtaaagttgatagatctatcaaaatttttgaatacttacgttacgcagtccaaggaaatcaagctgcgcgaagaacggtcccaacatatgaagaatgccgataataggttggatttcaagatatgtttaacatgtggtgtcaaagtgcatttaagagcagaccgtcatgaaatgaccaagcatttaaacaagaattgcttcaagtcgttcggcgcctttcttatgcctaattcaagcgaagtttgtctgcatctgacgcagcctccttccaatatttttgtatctgctccatatctaaattcgcacggtgaggttggtagaaatgcgatgagaaggggtgatttaacgaccctaaacttgaaaagatatgagcacttaaacagattgtggatcaataacgaaattccgggatatatcagtagagtaatgggtgacgaattccgagtgaccatactttctaacggatttttattcgcatttaatagagaaccaagaccaagaagagtgcctccaacagatgaagatgatgaggacatggaagaaggggaagaaggatttttcaccgaagaaaatgatgatatggatgtagacgacgaaactggtcaggcggccaacttattcggcgttggagcagaaggtattggtgatggtggagtacgtaattttttccaatttttcgagaactttagaaacacacttcaacctcagggaaatgatgatgaggacgcacctcaaaacccgccaccaatattacaatttttagggccccagtttgatggagcgactatcataaggaacacgaatcaaagaaatcttgatgaagatgactcttctgagaacgatgattctgatgaacgagagatatggtaa

SEQ ID NO: 1031 - DNA, 1185 bp, Saccharomyces pastorianus
atgtcttcttccgctactgttgaacctaatgaggcgtttgaacttattaccaagaacttgcaagaagtcttgaacccacaaatcatcaaagatgtgcttgaagtacaaaagagacatttgaaattgtactggggtacagcacccaccggtagaccccactgtggctacttcgttcctatgaccaaactagctgacttcttgaaggccggttgtgaggtcaccgtgctcttagctgatttgcacgccttcttggataacatgaaggcacctttggaagtcgtcaattacagagccaaatactacgaattcaccatcaaagctatcttgagaagcatcaacgttccaatcgaaaaactaaagtttgtcgtgggttcttcctaccagttgacagcagactataccatggacatattcagattgtccaacattgtctcacaaaacgatgcgaagagagctggtgctgatgtcgtcaagcaggtcgctaacccactgttaagcgggttgatctatcccttgatgcaagcattagatgaacatttccttgacgtagactgtcagttcggtggtgtcgaccaaagaaaaatttttgtcttggctgaggaaaacttgccaagtctgggctacaagaagagggcacatctaatgaatcccatggttccgggactgactcaaggtggtaagatgtctgcatctgatccaaattccaagattgacttattagaagaaccaaaacaagtcaagaagaagatcaatagtgcattttgtagccctggtaacatcgaagacaacgggttgttgtcctttgtagaatacgtcattgcaccaattcaggaattgaagtttggcgcaaaccactttgaatttttcattgatagaccagaaaaattcggtggcccaataaccttcaaagccttgaaagacttaaaattggctttcaaagaagagaaactgtccccacctgatctgaagacaggggttgctgatgccatcaatgagctactggcaccaatcagagaggagttcgccactaacaaagaattccaagaagcctccgagaagggctatccagtcgcagcaccacaaaagaccaagaaggccaagaaaccaaagaacaagggttccaagtacccaggaggcgccaagactgatgaggttgctgccaaattagaagaaaccaagttgtaa

SEQ ID NO: 1032 - DNA, 2196 bp, Saccharomyces pastorianus
atgtctagacggaatccaccacccggtagaaatgggggaggtccgactgatgcatctccattcattaaaagagacagaatgagaagaaatttcttgaggatgagaatgggtcaaaatgggagcagctctagttctcctgggctgccaaatgggaatggcagcagagggtcccttgtcaagaaggatgatcccgagtatgccgaagaaagagaaaagatgcttttgcagattggtgtcgaggccgatactggtagaagcaatgtcaaagtaaaagacgaaagttcaagcgaatataacgaattccccttgagagccattccgaaggaagatttggaaaacatgaggacacatcttttgaagtttcaaagtaaaaaaaagataaaccccgtgacagacttccatttgcctgttagattgcatagaaaggatacaagaaacttacaatttcaactaacaagagcagaaattgttcaaagacaaagggaaatttctgaatataaaaagaaggcagaacaagaaagaggcacccctaactttggtaacaacaatatgaacaaaccggctatgggcccattcaataatgcatccaaggatggttctcaaacgcctgctattgactcagctactaaagacgtgccagacggtatgaattcttctaccactgctgctgcccctactacccctgctcttgctacccctgcttccactatcgaaagtaatgatgtgtcaaacacaccaagcaccgccgttggtggtatagacaatagtaccgcaggagttaatccggttgatggaaaacttttagtgacaaaactggaggacgcaggcccagctgacgacccaactaaagtggggatggtcaagtatgacgggaaagaagtggctaatggaccggaattcgaagaaggtaccatggatccgttggcagatgtggctccagacgggggtggtagagccaaaagaggtaacttaagaaggaaaacacgtcaattgaaagttctcgatgagaatgccaagaaactaaggttcgaggagttttatccatgggtcatggaagatttcgatgggtacaatacatgggtaggttcttatgaagctggtaattcagactcttacgtgctattaagtgtagaggatgatggtagctttactatgatccctgcagataaggtgtataagtttactgcaagaaataaatacgctaccttgactattgatgaagcagaaaaaaggatggataagaaaagtggtgaagtgccacgttggttgatgaagcatttggataatataggtacaactactacaagatatgatagaacaagaagaaagcttaaagcggttgctgaccaacaaaatatggacgaagatgatcgtgatgataattccgaagtggagttggattacgatgaagagtttgccgatgatgaagaggcaccaattatagacggcaacgagcaggaaaacaaggaatcagaacaaaggatcaagaaggaaatgttacaagcgaacgcaatgggtcttcgtgatgaagaagccccatcggataacgaagaagacgaactgttcggggaaaagaaaattgatgaagacggtgaaaggactaagaaggcattacaaaagacagaattggcagcattgtattcttcagacgaggatgagattaacccatacctgtctgaatcggatttggaaaataaagaaaatgaatcgccagttaaaaaagaagaagattcagatagtttatccaaatccaagaagtcatcacctaagaaacagcaaaagaaagcaacgaacgtgcataaagatcctaatttaagagtaaagagtattaaaaactgtgttattattttaaagggggacaaaaaagtactgaaaaacttcccagaaggagaatggaatcctcaagttgcaaatggtacaactatcaatagtagcgagccaaccatggcatcgtcacccatcaaaacagaggttggagcggaatctgtagcagtagaaactccagtgcctctcataacagagcaagatattgttgacgctattggtgatggaaaggtaaacgttaaagcgtttggtaagtccattagaagaaaataccctggtgctgagaacaagaagctaatgtttgccatagtcaaaaaattatgtagaaaagtggacaatgaccgcgagcatatggaattaaaaaaagagtaa

SEQ ID NO: 1033 - DNA, 1203 bp, Saccharomyces pastorianus
atggcgtcccaactagatgaactagtggaatttttacattccccacaacctgccgtgagacaaattgctattgataatttggttggattcagtgcgggcccaacttcaaagattttcaagaatgataacttcagacctattaaggatatcataaagatgattatggaccctgagcatggtacccgtattattattcagcaaggtgttactatcttggtaaacttgtctgaggatagcttggtgagaaatattatattaaataacgataaacagttcctaaagtttttagcttggagaattgttgatttgactaatcctaacgctgatatcatgtgcattttattgagcaatttagcaaaggatgatgatatacttgccattttgaatattagaagaaattctagtggtgaagaaatcgatgatggcttgaagctaacagctttggatacaagcatattcaagagtctgaaagctatggactgtttgatggactgttttgttaaaggtaatgatagaaaattgacaaagttcgctaacttcaactatttagcctatttctttgctgatatttccagatttagattgggtaggatgtatttcattgaagaacaagaatatgatcttgttgtccccatttccaaactgctagtctttactgaaaagtatgatgcaaagattagaagagaaggtgtcgcttctacaataaaaaattctttatttgactcagaaactcatgaaagactactcaaagataaaaatataaatctgttgccgtacattttgttgcctattgctagtgcgaaggattccgaaatcgatgaagaagacatgtttaatttgcctgatgaattacaattattgccagaagacaagcaaagagatcccattcctgccatcatatgctgccacttagaaagtattcttctactgtgtacaacaaatgccgccagagagtatttaagaagcaagtccgtttacccgcttgtaagagagttgcacaaaaatgtagaagatgaggatattggtgaattgtgttatagaattgttaatatgctaatgagaggtgagcctgatgccggtgtcgtagaagaaatgccatcaaaaaatgctgaagatgttgaagacgaaaacgatgaaaatgaagatgaagatcaggatgaagatgaagatgaagacgacgatgaaattgttgaagtggcttag

SEQ ID NO: 1034 - DNA, 1812 bp, Saccharomyces pastorianus
atgcccaagaacccattaaagaaggaatattggacaggtgtggtcgatggattcaagccaagtacttcaacaggctccgaaaatgagaaggactcaagtgcgttcgtaacagaacaaaactccaaaactgattcagcatttccattaagccctaaagactcggctggcgtaaatcaaactacaaacgatgtcacatcatcggaacgcttccgtggtggtgatgacgtacaacaagaagatatcaacaacaccaacttaagcaaagagctatctgtgagacatcttttgaccttagccgtcggtggtgccataggtacaggtttattcgtgaacacaggtgctgctttatccacaggtggcccggccagtttagttattgattgggttattattagtacatgtcttttcactgtgataaactctcttggtgaattgtctgctgcttttccggttgtcggtgggttcaatgtttacagtatgaggtttgttgaaccttcgtttgcgtttgccgttaacttgaattatctggctcaatggttggttctattgccattggaactggtggctgcctctattactattagatactggaatgacaaaatcaactcagatgcctgggttgctatcttttatgctgcaattgccatggctaatatgttggatgttaagtcatttggtgaaactgaattcgtattatcgatgatcaagattttagctattattgggtttaccatcttaggtatcgttctatcctgtggtggtggacctcatggaggctatattggtggcaaatactggaatgacccgggtgcatttgtagggcacgactcagggaccaaattcaagggtttgtgttctgtttttgtcactgctgcattctcttactccggtattgaaatgacagccgtttctgctgccgaaagtaaaaaccctagagaaactataccaaaggcagcaaagagaacattttggttgattactatctcatatgtgactattttgactttgattggttgtttggttccatccaatgatcctagattactaaatggttctagttcggtggatgctgcatcctcccctctggtcattgcgattgaaaatgggcgtattaaagggttaccatcattgatgaacgccattattttaatcgctgtcgtttctgtggccaatagtgctgtctatgcgtgttcaaggtgtatggtggccatggcccatatcggtaatttaccaaaatttttgagacgtgttgataagagaggtagacctatcaatgctattgtgttaactttgtttttcggtttgctttcgtttgtggctgcaagcgataaacaagctgaggtctttacctggctgagtgctttatcaggactatcaacaattttctgttggatggccattaatctctctcacattagattccgtcaagccatgaaatttcaaaaaagatccttggacgaattaccattcatttctcaaaccggtgtttggggatctatatacggtttcgtcgttttgttcctagttttgatagcgtctttctggacttctatgttcccaatcggcggttcaggcgctagcgcagaatctttctttgaaggctacttatcgtttccaattttgattgtctgctactttggacataaaatatacactcgtgactggagattattcgtgaaattagaagacatggatctcgacactggtagaaaacaggtggatttaaatcttcgtagggaagaaatgaagattgagcaagaaacattagcaaagcgctcttttatgacaagatttttgagcgtctggtgttga

SEQ ID NO: 1035 - DNA, 999 bp, Saccharomyces pastorianus
atggttagagttgctattaacggtttcggtagaatcggtagattggtcatgagaattgctttgcaaagaaagaacgtcgaagttgttgctttgaacgatcctttcatcaccaacgactacgctgcttacatgttcaagtacgactctactcacggtagatacgctggtgaagtctcccacgatgacaaacacatcatcgtcgatggccaaaagattgctactttccaagaaagagacccagctaacttgccatggggttctctaaagattgacatcgccattgactccactggtgttttcaaggaattggacactgctcaaaagcacattgacgctggtgccaagaaggttgtcatcactgctccatcttccaccgccccaatgttcgttatgggtgttaacgaagacaaatacacttctgacttgaagattgtctccaacgcttcctgtaccactaactgtttggctccattggccaaggttatcaacgatgctttcggtattgaagaaggtttgatgaccactgtccactccatgaccgccactcaaaagactgtcgatggtccatcccacaaggactggagaggtggtagaaccgcttccggtaacatcatcccatcctccaccggtgccgccaaggctgtcggtaaggtcttgcctgaattacaaggtaagttgaccggtatggctttcagagtcccaaccgtcgatgtctccgttgttgacttgactgttaagttgaacaaggaaaccacctacgatgaaatcaagaaggttgtcaaggctgcctctgaaggtaagatgaagggtgttttgggttacactgaagacgctgttgtctcctctgacttcttgggtgacgctaactcttccatcttcgatgctgccgctggtatccaattgtctccaaagttcgtcaagttggtctcctggtacgataacgaatacggttactctaccagagttgtcgacttggttgaacacgttgccagagcttaa

SEQ ID NO: 1036 - DNA, 1239 bp, Saccharomyces pastorianus
atgctaagcgcaatatccagagtctccactttgaagccatgtacgagatatttagccagatgcaattaccacgcatccgctagactgtttgcagcaaagccgttttgcatgcccgcaatgtcccccactatggaaaagggcggaattgtgtcttggagatataaagtcggtgaaccattcaatgcgggcgatgtgatactagaggttgaaactgataaatctcaaatcgatgtagaggcactggacgacggtaagttcgccaaaatcataagagatgaaggctccaaagatattaatgttggtgaacctattgcctatatcgccgatgtggatgacgatctagttaccataacactgccccaggacaaagctgatacgaaaaaaccaaaacaatccactagtaaaatgccaaccccagaaaaaaaagaggcaggaaaccaacagcgcaatgaacctacgaaaaaagaaacgaagagaactaacgatagccaggccagtcccgaacagaccttcctaccatcagtatcattactactcgcagaaaatggtatatccaaacaaaaggccttgaaggaaattattccatccggattcggcggtagattgttgaaaggtgatgtgctagcatatctagggaaaataccacaagattcagtcaccaagataacagaattcatcaaaaagagtgaacgtctcgatttatcgaacatcaaacctatacaactcaagccccaggaaaatgaacaagcccaaaagaaagttcctagcaaacaggaaatcccacccttacaattcgaagagcagttggtgttccatgctccagtttctgttccctttgaaaaactgcgtgagtcacttaacactttcatgaaggaggcttaccagtttactcatgaagagccactaacagacgcaaattctaaatattttgatcctgtcttcgaggatcttgtcacgttgaacccaagagaaccaagatttgaattttcctacggtttcattcagatccccaaggcgaacaacacgcaggatgcttacggacaagaggatatattcgatctcctaacaggcgcagatgccaacgtctcatcagagaaatccgtcgaaaaggactccttttccggaaagaacgaatacttgctaaccttaaatgttaatgtcaataacaagaaatttaatgacgccgaggccaaggcagaaagattccttgactacgtaagagaactggaatcattttag

SEQ ID NO: 1037 - DNA, 741 bp, Saccharomyces pastorianus
atgtcaagattagaaatatattcaccagaagggctacgtctagacggacgtcgatggaatgaactgcgtcgtttcgaaacttccatcaacactcatccgcatgctgctgatggctcttcctacttagaacaaggtaacaacaaaatcatcactctcgtgaagggtccaaaggaaccaaggttgaagtctcaaatggatacttcgaaggccctgttaaacgtttccgtaaacattacaaaattctccaaattcgaaaggagcaaatccagtcataaaaacgaaaggcgtgtccttgagattcaaacttcgttagtaagaatcttcgaaaaaaacgtaatgttgaacatttaccccagaacagttatcgatatcgaaatccacgtccttgagcaggatggtggtatcatgggcacactgatcaatggtatcacgctcgctctgatagacgctggtatatcgatgtacgattacataagtggtatctccgtcgggctgtatgacaccaccccactactagatatcaattcgctagaagaaaacgctatgagtgcagtgacactaggtgtcgtggggaagtcggaaaaactatctctattattgatagaagataaaatccccttggacagactagagaacgtcctagccatcggtattgcgggtgctcatagagtaagagacctgatggatgaagagttaagaaaacatgcccaaaaaagagtcactaatgcctctgccaggtaa

SEQ ID NO: 1038 - DNA, 786 bp, Saccharomyces pastorianus
atgtctggaaagcagcaattacgtatattagtcccagtgaaaagagtggttgattatcaaattaaaccacgagtaaataaggctttgaccggaattgagactaatggtattaaattcagtatcaacccttttgatgatattgcagtcgaggaagctatcagaatcaaggagaagaacaagaacttagtggaatctacgcatgctgtttctatcggccccactaaggcccaagatatcctaagaaattgtctcgcaaagggtatagacacctgtagtctaattgattccatggataaagaaaacatagagcctttagcaattgccaaaatcttgaaagtcatcgttgaaaaaagaggtttcaacttggtattgatgggtaagcaagcaattgacgatgactgtaacaataccggtcaaatgttggcaggtttattgaattggccgcaggcaacaaatgcagccaaagtggaatttctggacaatggtagagtccaagtaacaagagaaatcgatgacggtgaagaggtcatcgaagcccccttgccaatggtcataaccacggatttaagattaaataccccacgttatgtgggactgcccaaattaatgaaggctaaaaagaaacctattgagaaattggacataataaaggattttcccggtatcaatattgaaccgcaattaaacactatatccattgaagaaccaaagactaagccacctggtgtgaaattgaactctgtagatgaattgatcgaaaagctaaaagaagccaaagtcatataa

SEQ ID NO: 1039 - DNA, 930 bp, Saccharomyces pastorianus
atgtcgaagtttgtcgttacctgtatagcccatggtgaaaagctcccacaagaagccattgatcagatcgccaaagagattgtcaagagctcgccacaggaaataacaatcaacagcaccaaaaaactatcgacaagagccaccgatttgtttgccgagattacagggtccattgtacaaaaagatttcaagaataaattggccagcgtaattgaaggtcatgacgatgttgatgtgattgtttctgctgacaatgaatatcgtcaagccaaagagctatttgtgttcgacatggactcaacactaatctaccaagaggtcattgaattaattgctgcgtatgccggtgttgaagagcaagtgcacgaaatcacagaaagagccatgaacaatgaactagatttcaaagagtccttgagagagagggttaaattattgaagggtcttcaaattgacacattatatgacgaaattaaacagaaactggaaatcaccaagggtgtacccgaactttgtaaattcttacacgacaaaggctgtaaacttgctgttttgagcggtgggtttatacaattcgctagttttatcaaagatcaacttaatttggatttttgcaaggcaaacttattggaagtagatactgaaggcaagctaactggtaagacactgggtgctactgtagatgggcaatgcaagagcgaaacacttttacaactgtgtgccgagttcaaagtcccggtcgagtcaagttgcatggtgggtgatggtggtaatgacctaccagccatgggtaccgctgggttcgggattgcatggaacgcaaaaccaaaagtacaaaaagctgcaccttgtaagttgaacaccaagtccatgaccgacatcctatatattcttggttacacggatgacgaaatacatggcagacaatag

SEQ ID NO: 1040 - DNA, 1404 bp, Saccharomyces pastorianus
atgaagcagaaactatctggcttagaggaatactttctttatagaagtaaattgaatttgcactcgtgcttttacgttggcatcaagctcaacgagctacctcagaagcaccagctgatatctgctcttaaatatgctgtgattgaacatgaacgtttgagttgcaacgtgttttgcgagaaatcagacaatgaggtttacttgaaaagtattaccgaaccgtttctatttgacgatatagcggaataccaccacgattgggatcaactgaaacaaaacgaaattaattgcatattccaaacgtataactttacctataacgtggctacacctttatggaaaattctgatcattccaagtcaaaatgaaatgctactggtgacagaccatgttctcatggatgggatatctgctgtccatgtttgggaaacgttcatggagggattgcgagaagaagcgtcaatcgaggatgacgaaacaatttattcacccctgtttagctcatcgactgacttgatttcagcttcgccgtttgaaaactggcccataccttggagttggcgtataatacgccaactggccagtagcctgtactatttgtcccctaaaaccattgtaacaaacaataagaatctaatccagttcgccaactattcgtttccggaaagtttcctggaatacgagccaactggagatactgacctatataaagtgaggaacactaaccatcaatgggaatttcgattgttaccggcacatctcaaaaacgtgttaagtgagtgcaaggcccataacgtttccttaacgtcctttttgggtgccttggtgtgtttaagtttcgaaaaaacagctagggaagtttataagggaacgtatttgaagatggatttaccaatgaacacaagaaaaatctgtagaaaaaccttacaatttttatcagatgaagaactcgttataggaaacttcgttgcgcccatcgaatacaagcataagctgcaccaggaccttggattgtgggataccgcttctgaaattcaagaagcagtaaaatacagttctaaggacaaagttatagatacaatgaataacgtcaagttgttagaggttgtctctcctcaacagttcataaaagataaaataaatttgaacagtgggccttcttctacttttgaaataacaaatttagggctccaagcattcaaggatgcgtgcaacaccgagctgccgtttcatgtcgtagacgctatattcaacgagccacaaggtatgtctgatattttcacattaagtgtgatttccactcctgctggtgggctgcattgttgtgtaagttacccaaacacgcttgtcgaagaattgaagcctaattggcaatatataaaagaacacctacatctatactaa

SEQ ID NO: 1041 - DNA, 333 bp, Saccharomyces pastorianus
atgagcgtgcccaaagctagactgctaaaggtagccgaattatccgcgaaaatatttgaccagaattttaatcccaccggtattagaacaggttccaagattctaaatgaacgattaaaaggcccttcgattgcaagctactacggaaacccagatatactaaagtttagacatctgaagacactatatcctgacattgaattcgttaaccttgacgaacagtaccgattatctatggtagaagccaggaaacgtcgtggtaaaggtactccaaagaagatgaagaaagaagcagctgcagctgcaaaggggaagggcaaaaagaaaaaatag

SEQ ID NO: 1042 - DNA, 1830 bp, Saccharomyces pastorianus
atgccgaattatatcttctggccatacgagtcattttttgagaagtctggtgccgaaggggcacaggtagccttggcaatctcttttcaagagactcattttgtcgtcttgggtgtttgtagctcccagcacctggaaaaggtaatcatacgtccaccgtattatatattagctacgagggaatttggggagaacgactgggactacaaagtttccgaaccctgcaatgttcactttaggatacccaggttgaagtatatgcaattttattcttctgaccctatatcactcatcataccagaaaaggcagtcgatcttcaaagcagtgtgggagaaaccttaaattttaccaaatttgaggagcacccaaggtacaagagtgacaacaagaagctaagggaaactttaaatataatcaacctttttcctacatacagtaaatcattgagtgacctttatccatttgttcaaacatcacaggaaaatttgcgagacactatatttagtgatgttgcgacctggtactcctctacttatgtttatcggctatccacgaatatctgcgtttatatgacactaatagtttgctccattgctagttttgtgtcttcatttttgaattatccgcacttccaattagtaaattactcagcatttgtgcagcaaatagatcttcgatgccaacagatttgctactttcctgtgcagtatgagcgtattaacatgaaggataccatacgcaaagttgaacctatcataaagcaagagaatattgatgccgaattgccgaattcaagtatgccttgtaagtattatcccgattatattttattttacaataccatttggcttattattaacgacatctcctttggcctaatattaggagctatacttacagagaatcggaattttttggtgtcaacatcccatagattattaaagtttttcttatatgattcactgaaaacgataaccgtattgctagcaagcaatccctttggtatcaaattgaatgcagaactggcaaactttttgagtgaattgttcctttgggtcatagaattttcttatagcgctttcataaaagttctcattgatccagaaaccttgtcaaacttgctcacggtgatgatatacttgatgtttctcgttggttgctcctttggcgtttcgttagcaattgatttttttgcgatcctaagttttccaatttatgtgttttatcgtatcagcagtaaactgtaccactgccagctaaatatcatgggcagtcttttcaacttattttgcggtaagaagaaaaacattttacgaaacagagttgatcataactatttccaattggatcaactgttattgggaacgttgctgtttattattctggtgttcttaactcctacagttatggcattctacatgtcatacacggttttgagaatgctaacaataactattgaaatatctttagaggctattattgcgctcatcaaccatttccctttgtttgcattattactgagaataaaggaccctaaacgcctaccgggtggtatttccatagaactccaaaccacaacctcaagcatgcctactacgttggaacttaaaaacaatccgattaaatttaaaagcatgttcaagccgtatagcctattgttggcgcaaatgacaacgaattatttttcatttgtcactgtacggcaaattgttcgaggagagtctataatggtcaacaggaataagttatatcacgttctatattctgcattgccaagtaagccattaggtgcaagggctttatataaaaggctgatcacacaagcatag

SEQ ID NO: 1043 - DNA, 3255 bp, Saccharomyces pastorianus
atggaaggaattttgaatttttctaacgaattagacattactttactggatcaggtggtcacctccttctaccagggttctggtgttcagcagaaacaagctcaggagattctgaccaaatttcaagacaatcctgatgcttggcaaaaagctgatcaaattcttcaattctcgacaaatccgcaatcgaaatttattgccctatccatccttgataaattgattactagaaaatggaagttattgccgaatgatcatagaattggtatcagaaactttgttgttggtatgattatttctatgtgccaggatgacgaagcgttcaaaacacaaaagaacctcattaataagtctgatttaactttagtgcaaatcctgaaacaggaatggcctcaaaattggccggagtttattccagaactgattggtagttcaagctcttctgttaacgtttgcgaaaacaacatgatcattttgaaattgttatcagaagaagtcttcgatttctctgcagaacaaatgactcaagctaaagctttacacttgaaaaactcaatgtcaaaggaattcgagcagattttcaaattatgctttcaagtcttagaacaaggttcttctacttctttaatagtagctaccttggagtctttattgagatatttgcattggattccttaccgttacatttacgagacgaacattttagaactattgagtaccaaatttatgacttcttctgatacaagagccatcacattgaaatgtttaactgaagtgtcaaacttaaaaatcccacaagataatgatttgataaaaagacaaactgtacttttctttcaaaacactttacaacaaattgccacaaatgtcatgcctgttacagctgatttgaaggccacctatgcaacggccaatggtaatgatcagtccttcctacaagatctggcaatgtttttaaccacttttctggcacgcaatagagttctattggaaagcgatgaatctctaagggaacttttattaaacgcacatcaatacttgatccaattatctaaaatcgaagaaagagagctgtttaagacgactttggactactggcacaatttagtagcagatttgttttatgaagttcaacgtttacctgcaaccgaaatgagtccattgatacaattatcagtcggttcacaagccatatcgactggatctggtgctttgaaccctgaatacatgaagagattccccttaaaaaagcacatttatgaagaaatttgttcacagttgagattggttatcattgaaaacatggtgagaccagaggaagttttagttgtcgagaatgatgaaggggaaattgttagagaattcgtcaaagaatcagataccatccaattatacaaatccgaaagagaagtccttgtatatttaacccacttaaatgttattgatactgaagaaatcatgatcaataaattggcaagacaaattgatggttcagaatggtcatggcataatatcaacaccttgtcttgggctattggttccatctctggtacaatgagcgaagacactgaaaaaagatttgtggttactgttataaaagatttattggatttgaccgtgaagaaaagaggtaaagataacaaagctgttgttgcatcggacatcatgtacgtggtgggtcaatacccaagatttttgaaagctcactggaatttcctaagaacagttattttaaagctttttgaattcatgcatgaaacccacgagggtgttcaagatatggcatgtgatacattcatcaagattgttcagaaatgtaagtatcattttgttattcaacaaccccgtgaatctgaaccattcatccaaacaataattagcgatattcaaaagacaactgctgatctgcagccgcaacaggttcatactttttacaaagcttgtggtatcatcatctccgaagaacgaaacgtggcggaaagaaacaggctattaagtgatttgatgcagctgccaaatatggcttgggacactatagtagaacaatccactgcaaacccagcattactattagattcggaaaccgtcaaaattatcgcaaatattataaagacgaacgtcgctgtttgctcttcaatgggtgcagatttttaccctcaattaggccacatttattacaacatgcttcaattatacagagctgtttcctcaatgatttcttctcaagtggctagcgatggcttgattgccacaaagacaccaaaggttcgtggtctgagaacgattaagaaagaaattttgaaacttgttgaaacttacatatctaaggccagaaatttggatgatgtcgtaaaagtgttagtagaaccactgttgaatgccgttttagaagactatatgaataatgttccagatgcaagagatgctgaagtactaaactgtatgaccacagtggtagaaaaagtaggtcacatgattccacaaggtgtcattttgattttacaaagtgtttttgaatgtactttggatatgatcaacaaagactttacagaataccctgagcatcgtgtagaattttacaagttactaaaagtcatcaacgagaaatcctttactgcatttttagaactacctcccgccgcattcaaattatttgttgatgctatttgttgggcattcaagcataacaacagagatgttgaagttaacggtttgcaaattgcattggacttggtcaaaaatattgaaagaatgggtgccgtcccatttgctaatgaattctacaagaattatttcttcgtttttgtcagcgaaacattttttgtgttaacggattctgatcacaagtccgggttttccaagcaatcgttgttattaatgaagttaatttcattagtttacgacaacaagatatctgtaccactttatcaagaaaatgaagcaccacaaggtacttcaaatcaaatttacttaaaccaatatttggctaacatgctaaatagcgcattccctcacttaacatccgaacaaattacaagtttcttatctgcattgactaaacaatacaaagacttagtggttttcaagggtacattaagagacttcttagtacaaatcaaagaagtaggaggtgaccccacggattacttgtttgctgaagataaagaaaatgccttattggaacagaatagaatagaaagagaaaaggctgccaagatcggtgggttactaaaaccttctgaacttgacgactag

SEQ ID NO: 1044 - DNA, 1578 bp, Saccharomyces pastorianus
atggatgcgaaggaaaatattgctaacgataacaatgatgtactggacgaagaaccagctattcagttaattgctccaggaatagcgagaaacctaacacaggaagtcattaccggtatcttttgtaatgtggttttttatccactacttttactatacttcgttctcactttccgttacgtgacatcgaagatagtaccttatgaatttatagatgagaaatttcacattggtcaaacgttgacttatctaaaaggtaattgggctcaatgggaccctaagataaccacacctcctggtctgtacattttaggcttcataaaccatcactgcataaaaccaattttccaatcatggagcacgttaaccatattacgattagttaatttatttggtggggcgatagttttccccatcgtagtactcagaccaatatttcttttcaacgcattagggttctggcccgtttctttgatgtgtttcccactagtgacaacgtattattacttgtattacactgatgtttggtctacaattttaatactacaatctcttaactgtgtgttgacgttaccttttggacctgtaaaaagcatatggctgagtgctttttttgctggcataagttgtctcttcagacaaacaaatataatatggacgggcttcataatggtccttgctgtggagcgtcccgctattttacaaaaacaattcaatacacacacttttaataactacttaaagttatttattcatggaattgacgatttctcacacctagtgctaccttacatgataaattttgtcctgttcatcatttatctggtttggaacagatcgattacattaggtgataaatctagtcattcagctggtttacacttggtgcaattattttattgcttcacatttatcaccgttttcagtttacccatatggatctctcgtaattttatgaagctatacaagataagaataaaagggaagccaattaaaacattttttgagtgtatttgcatcatgctaattattagatacttcacaaaggttcacccatttttattagcagataatagacactacacattctatcttttcagaaggctgattggcagtaaaagtagattaatcaagtattttttaatgacaccaatctaccatttttctacttttgcataccttgaaataatgagacctaaccagctcaccttccacccgatcaccccacttcccatcaaggaagcgatacatttgcccatacaattgacacatgtgtcatggaccgctttgatattatgtaccatggtcactattattccatctcccttattcgaacctcgttattatatcttaccatatttcttttggagaatatttattacatgcagctgtgaaccgttaataaaagacttgcaacccgccaaagaaaatgagattccaattactgtaagtagtacgaagagattgtttatggaacttttatggtttatgctattcaacattgcgactttagttatattttccaagttttcattcccttgggctacagaaccctaccttcaaagaatcatatggtaa

SEQ ID NO: 1045 - DNA, 1563 bp, Saccharomyces pastorianus
atggatatgtttaaaagaaaagtcaaagaatgggtgtattctctcagcactgacgaccactatgcagagtataaccccgaccaatcccccactttcaacatgggcaaacgtctggacaataacaatgggcaagccaatccctcccaaatgcatctgaatagcgtggatgaagaaatgagcatgggattccaaaacggtacgacatccaatgacgatataaatattgatgaatttacttccgcggtctctaatgacggtgtttccgaagctctcttggcttggagacacatcgaattttggactagtgaacacaatccagacttaaatgcaactttgagtgacccttgcacccaaaatgatatcactcatgctgaggaagacttggaagttagctttcccagttcggtgaaggcctccttcagaattcacgacgggcaagaagatttggagtcgatgaccggtacttcaggcttgttttatggactcgaattaatgactttagatcaggttgtagccatgactcaagcttggagaaacgtcgcaaagaatttgaacaaaagatcccaacaaggcttgtcacacgtcaaatccacaggttcctcttcatccatggaaagaccactcagtaacaagttcaagttaccaaacatcccagatcaaaaatctattccaccaaatgctgtacaaccggtatatgctcatccagcttggattccattaatatcggataatgctggtaaccatatcggtgtagacttggcacccagtcccaacggtaaatatgctcaagtcataacatttggtagagactttgataccaaattcgttgttgccggaaattggggagagttcttactattatttgctaacgatttggaagccggtaattggtatttggtagatgacaacgatgactactttagcggtgatggtgagttggtctttagagataagaaatccaatgggcccatacaagactattttgaggttttgaaaagaagagcttgggttaaataccaagacaacttgaagttacagcaacagaaacctcaacctgaaccacctcttcaacagcaaaaatacatgcctggcgcgcaaaataaaccggaggcgccagtggcaaatgagcaaccttctacttttggtgacgaatctataaaagatgaagatattgatagtgtaaacgcaaaatctatccaaaatggcgaaattccaaagcatgccacgagcgcacctaatgaaactttaagctccgctgaagtggcagctgaggccatagaaacagagaaaatcagccaagtagagcaagaaaccaaggccgaacaaaagaacgacgaagaacaagaacaagaacaagaacaagaagcagaagcagaagaagcaaaggtagaagaaagcgaaaatgttgaagatgaagatgtcgctgaaccaaaaaaagatgataacgacaataacgatataggtgaattaaccgccaaagagggagaagaggaaaagaaagaagatgatgatgatggtaaagttcgtaaagtaagagaagaatttgaaaacatagccctatga

SEQ ID NO: 1046 - DNA, 687 bp, Saccharomyces pastorianus
atgtctggacaccctttgcaccaagcgtgcatggaaaatgactttgtcaaagtacaagaactgcttcattgcaaaccttcgttgctgctagagaaggacctggatggcaggatcccgctacactggtcggtttccttccaagcacacgaaatcactagttttttgatttctaaaatggaagatgtgaatctggatgattatccagacgaatctggatggacgccattccatattgcctgctcagtcggaaatttagacgtggtgaaatctctatacgatagacctatcaaaccggatttgaataaggtcaccaaccaaggcgtcacatgcctacatttggcagttggtaaaaaatggtttgaagtgtccaaattcttaattgataatggcgcctccgtgagaatcaaagacaagttcaatcaaatcccactacacagagccgcatccgtgggctctttaagattgattgagttgctatgtgatgtgggcaaaagccttgtgaattgggccgataagcaaggttggactccaatattccacgctttagctgaggggaatggtgacgctgccgtattgttagtagaaaagtataacgccgagtacgatcttgtggataataaaggcgttaaggcagaagatgttgccctcaatgaacaagttaaaaagtttttcctaaataatgtataa

SEQ ID NO: 1047 - DNA, 702 bp, Saccharomyces pastorianus
atgacaaagaacttttaccgcgagttagacccagtggaagagaagattgttccgccagaaaacgctacagtaatttcctcagacgctaaagaggccactattaatgaaaaggaagccaagcaaggcgttctttcgcaaagagttatgaggtttattggagaaaatgaacttgtagacggtatttcagtacgtgatccagcgtacatgaaaaaatttttcaatgaaagaagactaaagttgtctgccaaatgggataaagcagcaacgaaaatagatgaggttgtcgggaagtattacgctcgtgaaaagagttttacgtcgactattgcaagcttacatactgacccagaagaacgtctaataccaggcttatcgtccactttagttgcctttatgacaggatctgtcttaacgagaagaagaacatggctacttcgtgctaccatgccccttatattgggctcatgttgctttgcgtatgtaatgccaagcacattcaataatgtcatgggtcttgctcatgatttagagaagaactcctttcctaaatttgttcaaaaacaagatcgtgcatggggaaaaatcaaaagattcagtaacacatctgcccagtattaccacgatgcaaagaagtggctgaacaaagatgtagaaaaaacaggggacgcaatcaaagactggactggggtgaatatcaaataa

SEQ ID NO: 1048 - DNA, 2364 bp, Saccharomyces pastorianus
atggcgattgcaaaggaattcactaagcacatctcgtttgatgatctagcaccttctctaattgatgatcaagcaactattataaagaatgacagccaccatgttggcttgaacaatcattttttgcatatacctcctcagttcaatccgatctacaaaaatagtttggatggcagccaaggttttgacgaacttgttgtcaatgacaatcaagattcacttgaagaggaaggacgttctcgacaatcccgaatggaaagtccgacacctaccgttcctctgttttcaacccagatgttttctcctgtagcgcatgatccttccaaaagctatctaaggtcacccagtgatggaagaagcagaagtgagtctccaatgtttcggtcgaaaagaggaacctcagtgagactgccccctcctccaaaagtgtctgtgctaagaaagactcaaaaggctgctgatgaacaggggcctattgaggatattgacatcggagacatagatttcgatcaggaaagaaggatgaacagaacgactgaaaaaaatacgcaacaaaattcagggtcaaggaggggctatactcaagctgcgtttgccaatcttaacgaagtagaagatagaatagaaacaaagtctatggtcgatttatctgaaggaaatgcagatacttccaagaaaagatctaaatcttttgctgggatgacagatgaagaattaaccaagttggaagaattttacataagtaaagggaggtcgaacaaaactaaaatagatcagtttgattttggtgaacaactcccggtctatttggacacaaccgcatcaaaaacagattccaattcagaagatatgacagatcctttggctgcaatttacccatcaaggcctacaattgttcataatgcaatctcaatgaccattgatcacccagattatgaaagttatgtatccaagagaaaacaaaagctaagctgtaaagagaaagaagatgacatcgatttaagagtcgtttcatgctatatatcaggtaggaggtatacatggtcatcagtagattggtatgttgagaacctggcaagagatggtgatcatttggtaattttcacgacaatccctgagtttgaagccaaaattgatagtttagcctataaggaaaaaagaaaacatcgcttagaaagaatggccagcgatacaagtgaaaacatgactacggcatcacatagtcttgcgagtgctgattcatcggttccgctatctaccggaataagaatcgaagctattcacgatgaggcaaagaagacctgtagcaaaattttagattactattccaagagattggcagccaaaattgttaggattagtattgagatggtgaaagaggattcaacaagatcggccataattcttgcgacttccttacatagaccgagtttacaagttattagcacagttagtgccaatattcaaattaaattcagaaacgggaaagttaaattgccattctttttaatgagacattttgcaatgccagtgtttgtagttccatttgaatttatcaaaccggaactcttgattaagcccaaaacagggcaaaacgaaaacgaaaagaaggaagaaatagttgacgatttgaagacaaaggtgaaaaaagaggagagattgcagtggctcagtgggttggtcaacagaactttagaaaacccgttcgctgaccatgacaaggcggtgaattcagatgatgaagataacgacagtgacgagtcagttgcctccataaatgaatatttcccaatttcaccagaaaaaaaggaagaaatggagtttttcgataaaatgggatatataaggccaaaaccttccaggcaaatattattggatgataacaccctcatgaaatacgatagttcgggcagaaaattaactcccgttgagtcaagaagttccaagcgtagttccaagcgtagttcaaggatacaatttagtaacaacggtatttataaagtaaaatctatggttgatgacgtttatgatcataatacagcctctacaccccacaccaaaagtgttttaaaatgggataatgaagacccaaaaccaagatttacctcacatccaatgaggaaaacaaaatcagctggcctatcaccaagaacgtcaactacatcatcttcttcagggcagcggaaggttcaccaccatcatcaccatcatgtttcaaggacaaaaaccgcagagagcagcaaatcaggtgggaacagcaaaaaagggagtttttcgtcttcaacgaatgaacatcaatccaaaaagtctgaaaagaagaaaactagtaaaatcggctcgatcttcaaaaaggtctttggctga

SEQ ID NO: 1049 - DNA, 438 bp, Saccharomyces pastorianus
atgtcagcatcagcctttaattctgccttcagaagatttttaaacagtgagacgggacctaagaccgtccacttttgggcgcccactttgaaatgggggttggtctttgcagggctaaacgatataaagagacccgtggagaaggtctcaggagtacagaatctgtccttattggccacggcgctgatttggactcgttggtcgtttgtcattaagcccaagaactacctgctcgcctctgtgaacttcttcctgggttgcactgctgggtaccatctaacgaggattgccaattttaggatacggaacggggacacgtacaaacaagccctacactatataataaagggggagacacctgcggctgtcgcggcaaagtccgcatctgcctcggtgaatacaggtgttatcagcgctaatccgcctataacacactga

SEQ ID NO: 1050 - DNA, 726 bp, Saccharomyces pastorianus
atggcgatagctttatggtactgtccaccacaggggtcagtggcttacgagacgctgcaaatgctcatattttcatttcaaacacttttcccaaactcgccggtctttgagcctcacataacagtgacgtctcacttggtatgtaacaatagagacgatgtcaacaagatccttacttcctgtgcggccgctattcaatcggtaaggtcccaccagaagaccgcgaagaaaggacacaaggcacaagcctcccatgctgctgctgcagcgcccctagtttcattcaacgggtgtagtgtaggcaaagggtatttcaagaaaattgtacttgagtgtaaccagaataatgtactttatgggatagcgcagatcatgagggagatgtacgttgaaatagatactgagacacgaagtagccgtgccgctacgtgggtacacgaagaatttcagccacacgtctcgctgctatattctgatattcgtccagtgagccaggcatcgttgcgggtagttcaacagagaatcgaagacgccttggacgtgcaattggtgacaagagagaaaagtaagggttctggaaacactgacgggtccaacgaggtgcagataagatgggacttcgacatctcttcgtcgctgtcctggaacatcccaggtacattcaaaatcgtgaactgcgtgggacctgttgaagagtgggtggtactcggacgcgtggatgtctag

SEQ ID NO: 1051 - DNA, 768 bp, Saccharomyces pastorianus
atggtgaaattacagagatttgcggaaagcaacgctttggtacatgagtttggaaagtatatccttgagaagcaggactcggcgttagcgggtaactcacacgcagtgttcaatatcgccattagcggcggctctatgaacaaagtgctatacgaaggcctggtgaacgacaaagacactttcccgcatataaaatggccacaatggagaatctttttctgcgatgaaagactagtcccctttgaagaccccctgagcaactacggccagttcaagaagaccgttctggaccccctggtgcacaaaggcgaccaattgaatttgggccccaccgtgtacaccatcaaccagtccttgatcggcggtggcgagacggccaacaagaagatcgccgaggagtacgcgtctttgctgccggcctctttcgacctggtcctactgggatgtggcgacgacggacacacatgctctttgttccccggagaagaattcaactacctcgtggaagaaatgacccgcaaagtagtctggtgctacaattcgccgaaaccgcccagcaacaggatcactatcaccctgcccgtgatcgcggacgccaagaacgtttgcttcctcgccagggggagttccaagaaggacatcatgcatgatgttctgatcattaagaacagcgagctccccagtgtcttggtcaatgaaatgatcggaaccagagttacatggttcttagacgacgccgccggcgcactaatcccgcaagactgctag

SEQ ID NO: 1052 - DNA, 1395 bp, Saccharomyces pastorianus
atgcagcctaagactttcgttcaccagctccattcaattctcttggaaccggaggtaaaccaatggatatattggtctccgacggatagcatggttttctttctgaaaccgtatgaccctaacttcagcacacatgttttgaagcgatattttaagcatggcaacgtgaacagttttgttcgtcaattgcacatgtacgggttccataagctatcgcatccttcccctgaccaaacttccaccaataacggcaacactaaagaacttgttgaatggaaattcactcacccatctggatttttctttaaagaagccaatgctggtgtcttgaataaaattcaaaggaaaagcaccggtgtgggcaaggatggtaaacgaaaaaatattctattgcccatatctgtcagttatgtcgacgcgtcaagattgaatgtcctctctcagcaacctgctcgtggcgcctcaacggaacccacgagcatgtttatgagcaatggcgcacaccactactcattgtctcaaggcccaccgcaagtgtacttacaacaacagcagcaacaacagcaactaaataatggaccctacgttatgtcttcactgcctcctcagcaaccaacggtcaatataatgcgaaggcaaagtatctccgcaagaatgatgaattcttacgactatcccaaccaatttccctcacaggatgacgtgctgcggcctcaacagcagcagcaacaattggtttcttcgcaatcgctatcgggtcctccaatgaaaaaatctcgaacgttatcttcgacagatgacctgaaggctactactaccttgccaatcgtcaattacccaatgccgtttcatccaggttctttcacgcaacagcttcctatggccccatcatattcatcttattcttcaccaatccctcctacaatgaactctgtttgtaactctgtttccaattctggttgtaactctgcttctgactctcctagtttggcagtgtgtaacaataatgtaacattacagaaaaaaaatgacctaagtgaaagacagtctttggacaaccatatacaaacattgaagaactctttatctacaattactgatttggtaaaaaggcatacaagcgatttaccgcaacaagaccttaatatacagacgaacgaggccctgaataaagatcttcgaacaagcttgtctcttttacagaattctaaggaagaaatattacagttggaaagtaaatggacgtcgatgcaatctttcaggacgataccattgcccttacaagaaactacaaacacctcttcatccttaacaccactgacttccaccatcacccctaaaagtatgccaataatgacgaaaagcgaagctgcaaataaatctgcctcttactga

SEQ ID NO: 1053 - DNA, 1320 bp, Saccharomyces pastorianus
atggttgcaaaacatcaggttgaaaggtatcaatcagatgaggctacgacggatccggaagtcaaacgggtaaaattagaaaatgactacgaagacacaaaaccagaagaggatggacccaatggaaaagaagccacagacaaagtgaataacggaaattttgggaaggaaacagaaagaattggaggatctgaagtcattacagatgtggaaaaggggattgtcaaattcgaattcgatggtgttgaatacacatttaaagaaagacccagtgtggtcgaggaaaatgaagggaaaatcgaatttagggtggtaaataatgataattccaaagaaaacatgatggttcttacaggcttaaaaaacatttttcagaagcaattaccaaagatgcccaaagaatatattgccaggttggtttatgaccggagtcatctttcaatggctgtcattaggaaaccattgactgttgtaggtggtataacgtatcggccctttgataagagggaatttgcggaaattgtgttttgtgccattagttccacagaacaagttcgaggttatggtgcgcatttaatgaaccacttaaaggactacgtcagaaatacctctaatataagatatttcttgacatacgcggataattatgcgatcggttatttcaagaagcaaggcttcacaaaagagatcaccttagacaaaagtgtatggatggggtatattaaagattacgaaggcggtacattgatgcaatgctctatgttaccgagaatacgatatctagatgcaggtaagatcctgctactccaggaagcggcactacgaaggaaaataaggacgatttctaaatctcacattgtaaggcccgggctagaccaattcagagacttaagcaatatcaaaccaattgacccgatgactattcctggtttaaaagaagctggttggacccccgaaatggacgccttggcgcaacgtccgaaacgtggtcctcacgatgcagcgatacagaatatcctcacggaatcacaaaaccatgcggcggcctggcctttcttacaaccagttaataaagaagaggtgcctgactactatgattttatcaaagaaccaatggacttgagcacgatggaaataaaattagaaaacaataaataccaaaagatggaagacttcatatatgatgccaggctggtatttaataattgtcgactgtacaatggtgaaaacacatcttactacaagtatgctaataggttggagaaattcttcaacaacaaagttaaggaaatacccgaatattctcatctgattgattaa

SEQ ID NO: 1054 - DNA, 783 bp, Saccharomyces pastorianus
atgtttttaactagaagtgaatatgatcgtggtgtaagcacattttctccagagggtagattgttccaagttgaatactctttggaggctatcaaattaggatctacagcaattggtattgccacgaaagaaggtgttgtacttggtgttgagaagcgtgccacctctccactattagaatcagactccatcgaaaaaattgtggagatcgatcgccatatcggttgtgcaatgagtgggctcacagcagatgctcgttctatgatcgagcatgcgcgtaccgctgcagtaacacacaatttgtattatgatgaagacatcaatgtcgaatccttaacacagtcagtttgtgatcttgctctaaggttcggtgaaggtgcctctggagaggaaagactgatgtcgagaccattcggggttgccttattgatcgctggtcatgatgcggatgctggctatcagcttttccacgcagaaccatctggaaccttttaccgttacaacgctaaggccatcggttctggttctgaaggtgcccaagcggaacttttaaacgagtggcattcttctttaactttgaaagaagctgagcttcttgttctaaaaatcctaaagcaagtcatggaagaaaaactagatgaaaacaatgcgcaattgagttgtataacaaaggaagacggattcaaaatatatgatgactcaaagactgctgaattgataaaggaattgaaggaaaaagaggccgcggaaagtccagaagaagcggatgttgaaatgtcataa

SEQ ID NO: 1055 - DNA, 1314 bp, Saccharomyces pastorianus
atggctgtctctaaagtttacgctagatccgtctacgactcccgtggtaacccaaccgtcgaagtcgaattaaccaccgaaaagggtgttttcagatccattgttccatctggtgcctccaccggtgtccacgaagctttggaaatgagagatgaagacaaatccaagtggatgggtaagggtgttatgaacgctgtcaacaacgtcaacaacgtcattgctgctgctttcgtcaaggccaacctagatgttaaggaccaaaaggccgtcgatgacttcttgttgtctttggatggtaccgccaacaagtccaagttgggtgctaacgctatcttgggtgtctccatggccgctgctagagccgctgctgctgaaaagaacgtcccattgtaccaacatttggctgacttgtctaagtccaagacctctccatacgttttgccagttccattcttgaacgttttgaacggtggttcccacgctggtggtgctttggctttgcaagaattcatgattgctccaactggtgctaagaccttcgctgaagccatgagaattggttccgaagtttaccacaacttgaagtctttgaccaagaagagatatggtgcttctgccggtaacgtcggtgacgaaggtggtgttgctccaaacattcaaaccgctgaagaagctttggacttgattgttgacgctatcaaggctgctggtcacgacggtaaggtcaagatcggtttggactgtgcttcctctgaattcttcaaggacggtaagtacgacttggacttcaagaatccaaactctgacaaatccaagtggttgactggtcctcaattggctgacttgtaccactccttgatgaagagatacccaattgtctccatcgaagatccatttgctgaagatgactgggaagcttggtctcacttcttcaagaccgctggtattcaaattgttgctgatgacttgactgtcaccaacccaaagagaattgctaccgctatcgaaaagaaggctgccgacgctttgttgttgaaggtcaaccaaatcggtaccttgtctgaatccatcaaggctgctcaagactctttcgctgccggctggggtgttatggtttcccacagatctggtgaaactgaagacactttcattgctgacttggttgtcggtttgagaactggtcaaatcaagactggtgctccagctagatccgaaagattggctaagttgaaccaattgttgagaatcgaagaagaattaggtagcaacgctgtcttcgccggtgccaacttccaccacggtgacaagttgtaa

SEQ ID NO: 1056 - DNA, 1098 bp, Saccharomyces pastorianus
atgagtgatcacaattcaagtagcctaaccttaaaagaacgaatgttaagtgctggtgctggatcagtacttacctctttgattttgacaccgatggacgtcgtgagaatacgattgcaacagcaacagatgattcctgattgttcatgtgatggggctcccgaggtaactggtactgttgagcgaggatcgaaactaaagactttaacgaatgtcggcggacagaacctgaataatggaaagatattttgggagagtgcatgctttcaggaattgaactgcaagaactcaccattaaagttcaacggcactttggaagcattcgcgaaaatcgccaacgtagaaggtataacaagtttgtggaggggtatctctttaactttattgatggctattccagcgaatatggtatactatagcggttacgaatacataagggatatttctcctatagcgacgacgtatccgacattgaaccctctcttttgtggggccattgcaagggtttttgcagcaactagtatagcgcccttagagttggcgaaaaccaaattacaaagtatacctagatcttcgaagtccacgaagtcttggatgatggtcaaagatttagtaagtgaaacgagagaagaaatgaaaatggtgggtccgtctagagctcttttcaaaggtttagagataactttgtggcgagacgttccatttagcgcaatatactggggttcgtacgaactttgtaaggagaacttatggctagatgctaaccagtattcacggaaagatagcaactggattcatttcgtaaacagttttgccagtggttgcgtaagcggaatgatagctgctatttgcacccatcccttcgatgttggtaaaacaagatggcaaatatctatgatgaataatagtgattcgaacagagttcatagatccaaaaatatgttcaagtttctagataccatacggcgtagagaaggtttcgctgctctctacacaggcttggctgccagagtgattaagatagcgccaagttgcgctattatgatatctagttacgagatctccaaaaatatatttggtaataaattgcatcaataa

SEQ ID NO: 1057 - DNA, 1605 bp, Saccharomyces pastorianus
atgaccaacgaattcgcaatgaagtcgcctaaggatttggtagacgatgtgctttttatatcagccaccaacgatgattcagaagaaaaacccacgacaatcaccttccaggaagatgaggcgcatgatgctgacttgcacaatcgtaaccacgacaagaagtcggacctagccctcgaaagagaaataatggccaccaccacagatgatgatgggatcccatctccttcccacccaatggaaaagcaagttttgcgcaagatggacatatacttaattccgctcatgggactgctatactttctttccaacttggataaatcgaacattggtaacgcagaagtcgcagggctttcgaaggatattaatcttgtcgggacacagtacaacacatgtgtcactgtattttttggtacttatgtgcttttcgaccctataggtaccaatcttctaaaaattatgggtccgccattaatgatgagtatctgtttgacctgttttggtgctatttcactcgggaccgcttgggtcaagaactacgctcaactgatcgtggtcagactgctgctcggtgcctttgaaggtatgatttatcccgctatcaacatgtatctttcagtttgttatagaagagaacaatacgccctgaggtttgccttcgtcttcagtgcagcctgtttgtcttcatcttttggtggactgatcgcttatggttgttccaagatcagtggggctctaaaagactggcaatacatttacattgtggaaggttgcatctctttggggtttgtgcctttctatgccttcggcttgagtaaaaatttggaggattcatggtttttcaacaaagaagaaagagaatacattactgaaagatacaagaccatgaacacttttaatccagatgaaaaattcgaatggttccaagtttgggaagccgttaaagatatcaagacttgggccagtgctgtggctttattcggtatcgatttaaccacttttggtctaacggttttcttaccaatcattattaccagcatggggttcacaaacgttagagcgcaattaatgaccgtccccatctttttcctcacggcaattgtcttcttcatttgtgcagtttggtccgatcgtgtgaaattaagatctccatttattctaggagcctgtataaccacgtcgatcggtatagcaatcgtccttggttctgaggttcacggtgtaagatactttggtgttttcatcctttgtatgggtatttacgtcaatgccgcttgtaactgtttgtggttaagcggtaatactggtaattatttcaagagagcaacagctttaggtattaatctgtttatgggatctggttcaggtttagtctctggccaaatattcgtcgccaaagacaaaccaagatacgttaagggtttgtccatcagtttagccttccaagtcttctccatattcatgactgtcgtacaagttttcttatataaaagggaaaatgacaaaaagaaagcgatcattgatcgttgtaatgaattgggtgaacccatcccatacgatgaaagattaagcgataaaaaccctgaattcaaatacatgtactag

SEQ ID NO: 1058 - DNA, 786 bp, Saccharomyces pastorianus
atgacacaggaatttattgataaagtgtccgaatacctgacgcaagatataaatattacgcccatctcgcagggcgcagaagccattgttttctcaacgaccactcacccatatctaccggaaacaaagggcactcacgagaagtatattatcaagtacaggccgccaaaacgttacagacacccacagatagaccaggcgctgactaagcaccgcaccttgaacgagtcacgtttgctggcgaaattacacttgattccaggattatgtgtccctcaactaatagcatgcgactcatacaatggatatatatggctagagttcctcggagaagatcttccagaagggtatggtttcagcaacttgaagaattttctgtggatgcacgacaaagacccatacagtgatcttgtggcagctacgttgcataaagtgggccgccagattggcttactgcattggaatgattactgccacggcgatttgacaagctccaatattgttcttgtcaaagatggtgccggatggatgccccatcttattgatttcggtctggggtctgtttcgaacctggtcgaggataaaggggtagacttatacgtattggagagagccatcttaagtacgcattccaagcatgctgaaaggtacaatgcttggatcatggagggatttgaagcagtctacctcgaacgaggtgcgaaaggtaccaagaaactgaaagaagttagtaagagatttcaagaggtcagactgcgtggacgtaaaagaagtatgcttggatga

SEQ ID NO: 1059 - DNA, 1275 bp, Saccharomyces pastorianus
atgacagtgaggcctgatccgtactccaaaacagcgtactatcatcttcaagaaaatgaaataaccaatactgcgtcaaaagaagaagatggtctaaatgatgcgactttccgatggagtgacttacatctgcatgtgtaccatggtttgaaatttactgttctactactcacggtagtcccagtatgtataatctacaactccatgaaaataatagttcaacgcaaacgtccgttttgcctcgaccatgtgaatagaatctttttaagacaaagttcatggattcttgatgaacacatttgtcaatacgtgctgaatcctttatttgtttgcttatacccatccactttctctattccaacgtatgtcagttatgacgttcccgtagaagatcaggaatcttcagagaacaacattttccgaactcgagctttgaatgcacctaaagtcgttaacacgaagttttacaaatacgtaatgccccaagtatttgaccccagcacagatcctattctagtgttctatcatggtggaggttacgcactaaagctgactcccacctcgttatcgttcttgaataatatgcgaaacgcattcccgaagatggccatccttgtgccagattatacagttactgccacggatgaacaatccaagaagtatcccctacaagttctacaaagcgtggccattttcgactacattaccaagactatgggctgcaagaacgtgattattatgggtgattcagcaggcggtaacgcggttttaaacattgttttatatttgaaaaagtgtcatagagatgtctatccaaaaaaagtgatagctataagtccctgggccaatgccacttttttccatgaaggcgaaaaagagcatatgctacggacgcagcaatgggatggtctgtgcttaaaaagccactcgatgtttggaaggatgttcgtaggcaacaacccaaacgttgatttcactaatgacccttttgttaatattgaaaagaattttgaaacaggagattggcgagaaatcttaaaaaaatgctctgtgatgattacttacgggagtgacgagctgctgagtttgcagaatgagatcttagcaaaaaaaatgtgtgaagccagtgacggattagaccatttcacttccaaaaacgtgttggtcgaacatcaaggctttcacaccggccccatagttaattactcccgaaacatggaccggtggacgaggataccatctatttcacgtatcctcgagttcatgcagacctaa

SEQ ID NO: 1060 - DNA, 732 bp, Saccharomyces pastorianus
atgcaaaatatccaagcagtgcaggagatagaaaggcacgaaaccccgttgaacattagacccacctctccatataccttaaacccgccagttgagagagatggtttttcttggccaagtgtagggacaagagatcgtgctgaggaaacggaagaggaggaaaaagaacgaattcagcgtatttcaggcgcaattaagaccatcctgaccgaactaggtgaagatgtcaacagagaaggtctactagataccccacagaggtatgccaaagccatgctttatttcaccaaaggttaccaaacaaacatcatggatgatgtcatcaagaatgccgtctttgaagaagaccacgacgaaatggtcattgttcgtgatatcgaaatctactcattatgtgaacatcatttagtgccattcttcggtaaagttcatatcggctacataccaaacaagaaagtcattgggttgagtaaattggccagattagcagagatgtacgcaagaaggctacaagtccaagaaaggctcacgaagcagattgcgatggcgttaagtgatatcttgaaaccattgggtgttgccgttgtcatggaagctactcatatgtgcatggtttcaagaggtattcaaaaaacaggatcttctacagtaacttcatgtatgctgggagggtttagagctcataagacaagagaagagtttttaaccttactaggaagaagaagtatttga

SEQ ID NO: 1061 - DNA, 588 bp, Saccharomyces pastorianus
atgcctcaagacacacatgacgatggcttgccgagctacgaggaagttctaaaggaagaagagaggttgcagtcccaacagcagcgaccaccaaggccacggcccaatgcgccaccaaggccccagaggccctacacagtgccaccagcttcgtcttcccattcccattcacactcacagactcactctcacacgtcctcaagttcccatgcaccccctccagcgaagccgcaacaaagctcaagcttgccctggacataccctcccaagttctattgtaccaaatgtggcaatacaggctacaaggtcaagaacggaaggtcttgcaagtcgtgttggagaaggtttgcacctcaaaataacattactgctgccccttccctttacacaaactaccaaatgcccgtatacactagcgcatggcagggaaacgggcccttgtgcgttcaaccaggggaccctcggcttgggggcgtcttgtgtggtgaatgcagaggttctggacgtactaggttcctcttggacgaagatatgtgctccttgtgccatggcgtaggcaggatcatcacccagcctcaacgctattag

SEQ ID NO: 1062 - DNA, 3207 bp, Saccharomyces pastorianus
atggcaaagcagcaggagtctagcaagtccaacttggctaacgaggatgatgcctatgatgcaatcttcggtggtgagtttggtactttagagatcgggtcatatattggtgcgaacaaaactaccaatacaaaggactatacggaacatctaccggatgctgtggattttgaagacgaagatgaattggctgacgacgatgatgatttagcagaagatgtggctactggtccacattcaagtatgatggatatgggtgtgtatgataacaatgagaatagtgctgttatgcgtatggattcaaatagtttgaatctacaattacctgagattggaggagaagtgtctcgagaatttattttggaaggtgacggaagtgtacctgcaacaaccaatgcgttgttcatggggatggatgcaaatgaaatccatcttgccactgaagcaggtgttcttgatgcgggtggtggacatgaaattgctcattctcaactttctctcaacgacgtcaatgctgatagtatggcaatgaacaatagatttaccatggaacctcaagaatttcagatgtcagataacaagcacaagaaacccactaaattggatttaataaaccacgaaaagtatcttctaaaaaaatacttccctgattttgaaaagggaaagattttaaaatggaacaggttgatttacagaaggtatgcgtcgtaccattggcatcgagatgtgtctagagtaaagaaaccgttcatgcctttgaacttgaaattcagagtccaacaagatgacaaaaggctattcaactcgaaggctacatcatgcctctcttctatttaccaaggaaaaaacaacatgtatcaagacagctcttctgcgtcacgtaggggtttaatacatttctctattgatgaactttttcctgtcaaagagcagcaaaagaaacgcaagatcattcatgatgaaaagacaatatctgaagacttgttgattgctaccgatgattgggaccaagaaaaaatcatcgatcaggagaccataccaaatatgacaccaacggagccatccataacacctaacttgaatcctccaggtggttataagctgaagaatctgatcgaagatgttgccgaggattggcactgggatgaagatatgattatagatgctaacttgaaagaatcgaaatatgctgaactaaatatgaatgatgaaaaactattattaatggtcgagaacactgataatttagtgcagcgaaagcagcagttagaaaatgataatctaatattacccattaatgaaaaaactttacaacaaaaactcaatttgtctaatgatgataaatatcaaattttgaagaaaactcatcaaacaaaagttcgttccactatatctaatctgaatatccaacattctcagcccgctataaatctgcagtctccgttctataaagtggctgttcctagataccacttaaggcatttccatcgtgaaaactttggctcgcacattagaccaggcaccaaaattgttttcagtaaactgaaagcacgtaaaaggaaaagggataaggggaaagatgtcaaagaatctttttctacatcccaagatctgaccattggtgataccgctcctgtatatttgatggaatattctgagcaaacaccagttgcattatccaagtttggtatggctaataaattaattaattattatcggaaagcaaatgaacaagatactttaagacccaagctacctgttggtgaaactcatgttttgggtgtccaagataaatctccattttggaattttgggtttgtggagcctggtcatattgttcccaccttgtacaataatatggttagagcgccagttttcaagcatgatatttcaggaacggactttcttttgataagaagttcgggatttggtataagtaatcgattttacttacgtaatataaaccaccttttcacggttggacaaactttccctgttgaagaaattcctggacccaattcaagaaaagttacttcgatgaaagcaacaaggctgaaaatgatcatttacagaattttgaatcataaccatagcaaagctatttcgattgaccccatcgcgaaacatttcccagatcaagattatgggcaaaatagacaaaaagtgaaggaattcatgaaatatcaaagagatggacctgagaaggggctttggagactcaaagacgatgaaaagctattggataatgaggcagttaagaatttgattacacctgaacaaatcagccaagttgaatcaatgaatcaaggtttacaattccaagaggataacgaatcttataattttgattctaaactaaaatccttggaagaaaacttactattatggaacatcacaaaaaatttcataaattcgactcagatgcgagcaatgatccaaattcatggtgttggtgacccaactggctgtggagaagggttttcgtttttaaaaacgtcaatgaaaggtggatttgttaaatcaggctccccctctggtaacaacaacgcttcgaacaaaaagggtaccaacactcatagctataatgtggctcaacaacaacgggcgtatgacgaagaaattgcaaagacgtggtatacacacacaaaatcgttgagtataagtaatccgtttgaagaaatgaacaatcctgacgagatcaaccaaactaacaagcatgtaaagacggagagagatgacaagaaaatcctgaagattgttaggaaaaaaagagatgaaaatggtattattcaaaggcagacaatcttcataagagatcctagggtcatccaagggtatgtaaaaattaaagagcaagataaagaagacgttaacaaactgttagaagaggatacttcgaagataaacaatttggaggaactagaaaaacaaaaaaaattgctgcagttagaattagctaatcttgagaaatcacaacaacgtaggacagctagacaaaattcgaagaaaaacagcggcgcaacaaagatggaaggtgcaatggacaatggcagcgagttttccggtgcaatagacggtaaaataacaaaaaacaaaagcaaaaacacaacaagaagatgcgctacctgtggacaaatcggacacattagaacaaacaagtcctgtccgatgtatagtagcagagatgatccaatttcaccaaagtag

SEQ ID NO: 1063 - DNA, 1662 bp, Saccharomyces pastorianus
atgcaagtacaagggcccgatactaatgtggtgagcactgtggctctgggaacaaaaaaaagaaggctatccaaggcttctgttcaggaagaaagtgaacacacggatgggaagctggaggtgaagaagaacaagaagaaaaagaaggagaagcccatgacatgtactttgcagaagactgctgttgataaaggtattggcgtcaaggatgtaagggatatgactcaatacttgttacaggctgaaaacaactctcctaagtggatagatattagtaacagatcaagtttacaaaaaatggtggttttatttattccaggcttgcagccaagtgattttgggggcggcaggagtgcgttcagtgagatcaatgatgacaagtttaagtatattcccgaacaaattgcatctaagttccacactttccctgtgatggctcccggttcgaagatgacgctattttcaccatacaattcatttatcaatgttgggttgtccaagctggagaagataaatagactgaaggagctgcaaaagaaaaggaaaattaccatcaatgacttggttttatctgaacagcagcttgtggccaacgattacccattaacttctggagactctaacgatgcaggctgggtgcagactgccgagtttgcccacgatggttcacacatatttgcattagattgtgaaatgtgtctttctgaacaaggtttggttcttaccaggatttctctggtgaatttcgataatgaagtcatttacgaagagctagtgaagccagatgttcctatagtggactatttaactcggtatagtggtataaccgaagaaaagctggctgctggtgccaagaaatctttaccagaggtgcagcaagatttactaaagataataagtcgttcagatattttgatcgggcactcgctgcaaaatgatttgaaggtgatgaagttaaagcactcattgattgtggacacggccatcatataccatcacaaagctggtgatcccttcaagccaagtttgaagtacttgagtgagacattcttgaacaaaagtattcaaaacggcgaacatgattctatcgaagacgcaagagcatgtcttgagttgacaaaactgaagattctaaatgggttagcatttggcataggcatcaacacggagaatttgttcactaagttgcatcgttttgaagtaagaaccatgttacttaatgacatgatcgtcaaagatcatagcgaagacgactctaaaggctgtttgatccgttgtgttgaggataacgaaacgtggacaaacattcatgaaaatttaaataaggacgttaaacttattgtgggcagattgaaaaatttggagagatcgcgtaattacaacaaaaagccacgaaagggggatgatttattggaagaaaccacggttcttcgtgatattggacagcacctgacacaggtatacgagaatgccgcaccaggcaccatgattctggtcatgtcaggtacaggcgatacacggccatggaataacctttcgactgaattagacgtcatccaagataagaaggagagactggacaaaagacgtgaaagggaacccgaaatagcagacgccataaagctggcccgagatggtgtagcatcctttactgtaaaatag

SEQ ID NO: 1064 - DNA, 1155 bp, Saccharomyces pastorianus
atgcgtctctccaacttgatcgcttctgcttctctattctctgctgctgctcttgctgcccccgctaaccacgaacacaaggacaagcgtgctgtggttaccaccaccgttcagcaacaaaccactattgtcgttaacggtgccgctccaacgcaagttgctgctttgcaggaaaatgctgttgtcgactccgctcctgccgccgccaccacttcagctgctgctgctgcttctccagctgctgcttctccagtttccgacgctgctgtttcttctgctgccgttgttgtttcttctgctgccgcaactccagcttccagctcagctgcttcttctaccgcttcttccactgcctcttccagccaagacgtcagtggctttgcctccggtgtcaaaggtatcacatataccccatacgaatccagtggttcttgtaagagcgccgacgaggtcgcttccgacctggctcaattgaccgacttcccagtcatcagattgtacggtaccgactgtaaccaagtcgaaaacgtttacaaggccaaggcttccaaccaaaagcttttcctaggtgtctactacgttgaccaaattcaagatggtattgacaccatcaagtcggctgttgaaacgtacggttcttgggacgatatcaccaccgtttccatcggtaacgaattggtcaacggtaaccaagccaccccagctcaagtcggtgaatacatcgacaccggtagagccgctttgaaagccgccggttacagcggtccagttgtctccgttgacaccttcattgctgtcatcaacaacccagaattgtgtaactactcagactacatggccgtcaacgcccatgcttactttgacaaaaacactgctgcccaagactccggtaaatggttgttagaccaaatccaaagagtctggactgcttgtgacggtaagaaggatgttattgttactgaatccggctggccatcaaagggtgaaacctacggtgttgccgtcccatctaaggaaaaccaaaaggacgctgtctcttctatcaccagctcctgtggttccagcactttcttattcactgccttcaatgactactggaaggccgatggtgcttacggtgttgaaaaatactggggtattctatccaatgaataa

SEQ ID NO: 1065 - DNA, 759 bp, Saccharomyces pastorianus
atgggtttggcagctacaaggacgaagcagcggttcgggatggaccccagaaacacggcgtggagcaacgacacgtcaagattcggacaccagtttttagagaagctgggatggaagccagggatgggccttgggctttctcctatggactcgcctacgtcgcatatcaaagtgtcgattaaggacgacaacgtggggctgggcgccaaactgaagcgtaaggagaggaaggacgagttcgacaacggcgagtgcgccgggttggacgttttccagcggattctaggtcgtttgaacggcaaagaaagcgagatctcgcaagaattggacacgcagaggaagcagaagatcatcgacgggaagtgggggatccattttgtcaagggagaagtcctggcaagcacctgggacccgaagactcacaaactcagaaactattctaatgcaaagaaaagaaagagcgacgacgacgacgacaagagtgagaagaagaagcacaaaaaacacaagaaggacaaaaaggagcacaagaagcacaagaaggagcacaagaaggaggagaagaagaagctgaaaaaggagaaaaaggccaaagagacgaaacgtacatcgaagttgaaatccagcgagtctgcgtccaatattcctgattcggtgaacacgaggctgtcggtgcgctccaaatggatcagacaaaagagggcagcactaatggactccaaggcgctgaatgagatcttcatgattacaaacgactag

SEQ ID NO: 1066 - DNA, 942 bp, Saccharomyces pastorianus
atgcgtttctcttctacactcgctactgcagccactgcactattattcacagcttcccaagtttcagctatcggtgaattggctttcaacttgggtgtgcaaaacaacgacggttcttgtaagtctacttccgattatgagagcgaattgaaggccttgaagggctatacttctaccgtcaaggtttacgcttcttctgactgtaacactttggaaaacttaggtcctgctgccgaagctgaagggtttagtgtttttgttggtgtttggccaaatgacgatacccattatgccgctgaaaagactgctttacaaacatatttgccaaagattaagaaatccactgttgccggtttcttagttggctctgaagctttgtaccgtgacgatttgaccgcttcgcaactatcggataagattaacgatatccgtagctttgttgctgacatttctgattccgatggaagctcttactctggtaagcaagttggtaccgtcgactcctggaatgtcttggttgctggttacaactccgctgttatcgaagcttccgattttgtcatggccaacgctttctcctactggcaaggtcagaccatgcaaaatgcctcttactctttctttgatgacatcatgcaagctttacaaactattcaatctactaagggttctactgatatcactttctgggtcggtgaaaccggctggccaaccgaaggtaccaactttgaaagttcttacccatctgtcgacaacgccaagcaattctggaaggaaggtatttgttctatgagagcctggggcattaacgttattgtctttgaagcctttgatgaagattggaagccaaacacctccggtacctctgatgtcgaaaaacactggggtgttttcacttcaagcgacaatttgaaatactctttggactgtgacttttcctaa

SEQ ID NO: 1067 - DNA, 933 bp, Saccharomyces pastorianus
atgtcttatagaggacccaatggaaattttggcggtatgccaatgtcatcatcacagggatcatactccggtggtgcacaattcagatcaaatcagaatcaatcttcttttggcatgttgaaacagtggaagcagtcttttgaaaagtttgcttccaggattgaaggactcactgacaatccaattgttcacaaattgaagccttatattccaagtttgtcaagatttttcattgtggccaccttttatgaggattcgtttaggattctgtcacaatggtccgaccaaatcttttatctgaataaatggaaacattatccatacttctttgttgttgtgttcctggttgtggttacggtctctatgttggctggtgccagtttgttagtcctaagaaagcaaaccaactatgccaccggtgtgttatgcgcttgtgttgtttctcaggccttggtttatggattattcacaggctcatcatttgtcctaagaaacttcagtgtcattggtggattattgattgcattcagtgattcaattgttcagaacaagaccacgttcggtatgcttcctgaattaaacagcaaaaacgacaaagcaaagggttacctattgtttgcaggtagaatcctaattgttttaatgttcattgccttcacatttagtaaatcttggtttactgtcgtcataaccatcatcggcaccatttgttttgccattggttacaagacaaaatttgcatccattatgttaggtctgatcttgactttttacaatgttacactaaacaattactggttttataacaataccaagagagactttttgaagtacgaattctatcagaacttaagcattatcggtgggctattattagttaccaatactggtgccggtgaattatccgttgatgaaaagaagaaaatatactag

SEQ ID NO: 1068 - DNA, 1128 bp, Saccharomyces pastorianus
atgatgtctactatctaccgtcatttatctaccgctagaccggctttaactgaatacgcaaccaatgccgcagttaaatcgacaactgcatcctcagaagctagtactctgggtgctctacaatatgcattgtctttagatgaaccaagtcattcgtggacaaaatcgcaattaaaagaaatttatcataccccactgctcgaacttactcatgcagcacaattgcagcacagaaagtggcacgatccaaccaaagtgcaattgtgcacattgatggacatcaaatctggtggttgttctgaggactgtaagtattgtgcgcagtcttcgagaaacgataccggtctaaaggctgagaaaatggttaaagtggatgaagtgattaaagaggcaaaagaggccaaaagaaacggatctactagattctgcctaggtgctgcatggagagacatgaaaggtcgtaaatcagccatgaaaagaattcaggaaatggtgaccaaagtgaatgatatggggctagaaacgtgtgttactttaggtatggttgatcaagatcaagcaaagcaattgaaagatgcaggtttgactgcatacaaccataacatcgacacttccagagaacactatagtaaggtcatcaccacgagaacctacgacgacaggttacagaccatcaagaatgtccaagaatctggaataaaagcctgtaccggtggtattttgggtctcggtgaaagcgaagacgaccatataggattcatctacacattatccaatatgtctcctcatcctgagtccctaccaattaatagactagttgctatcaaagggactccaatggctgaggaacttgccgatccaaagagtaaaaagttgcaattcgacgaaattttgagaaccattgccacagcgagaatagttatgccaaaggccattataagacttgccgctggtcgttatacaatgaaagaaacagagcaatttgtctgtttcatggcaggttgtaacagtatcttcaccggtaagaaaatgctgacgacaatgtgtaacggttgggacgaagacaaggcaatgttggctaaatggggattgcagcctatggaggcatttaagtacgacagatcttga

SEQ ID NO: 1069 - DNA, 1758 bp, Saccharomyces pastorianus
atggtcgctcaaactgttttgcgaaattgcttacaatgggcccaagataatggggcctttattgatccaaagatctccttcaggatcacacaagaggccggagtagctgcctttattaacgagaaatgctctcccaagccggaccaagcattgatcaaggttcctgaaagtctactaatcacttctcagcaagctttgaaagaatttccacagggggccgatgagaagggccttctaaactctatcacccagttatatctatcgaaattgaaattcggctctaatgccgttcacttgaagtccttctataaaccttacctggacgtgctacctctagaactaccacaaccgtatttttggtctaccgaggaaattgtgaacttacacggcacagatgtgtacttaaccatgagagacaccttgaataagctaaccaaggagtggatgggactatgccaggttttgtccatcgagcatgctccgcaagacaagcagctcttgctcctgttcgaggagaagccagaggcggccgtagtgccattggaaaagttcagcgcgcacattaattcatgtaaactagaaactttaacttggaactcgtttgcggcatacctttggtcgcattgcattttcaactcaagagcgttcccacgtgttattttaaacaagagtgacacgaaaggcagtgatttgaacgaaggatttctgtacccgatagtagacttactaaaccataaaaacgatataccagtaaaatggcagatgaatgaacacaacgaactctgcttcatgtcgcaatccggtgggtttagtgcaaatgatgaattgttcaacaattatggtgacatctccaacgaaaaatgtttgttgaattatggattttgggactcatcaaacaaatacgacttttcaagattaactttaaaattgcccgctgccttgactaacagtgtgccaatagatttcaaaaaatcaggcaattatgtcagtgaagatagagaaaccgctatccttcagtttaatttacagccttcaggaccgctacccgcgaagttgctaccgttatttacttatttgagtaaacttaaatccgaggaaacccccaccgtaagaagtgtgttagaaggtatcgaccaactggcatctgtggtgtctcaaaggttactattttataagaatttcaaaattaaaacggcatccaatcaaaagctacatccgcacatcgttaaactgatcaaactatactatcaagataataaaaaaatcctgaatgtcacagttgaaaaactatctgttttgcaaaagaaaatcttcaatgctaacaaggaattctctttatcattcaagaccattttcaaaaacgaccaaaaatttgccaattcgctcttattgatgtttggtgctattaattatgaagacctaatcaccaaagactgtctcaatgacgcgttattgctctggataatcagatcggtcaacgatacaaccagcaagcaagaaagttttatcaagcaaatgttcaaacaagtaagtgattcaatcgtaatccaaaaagaagacgtcatggagtacttgccattttacaagaagtattttcccaatttaacagaaagaatcccagaaatttacaacattggtgagtgggggataaggcaattcatcgtggcagataccgtcattgacaggttggtttggatcaggaaatcaaataatgaacctattttcttgatgaagaaagattacgagttgcagatttaa

SEQ ID NO: 1070 - DNA, 888 bp, Saccharomyces pastorianus
atgtccactgaaattgaagaagctactaatgccgtaaacaacttgagcatcaacgactctgaacaacagccaaaggtcccaacccacaagacagtaattgatcctgaagacacaatctttattggtaacgttgcacacgaatgtaccgaagacgacctcaagcaattgtttgtggaggaattcggggttgaagtcagcgtagagatcccagtgaaggagcacaccgacggccatatcccagctagtaaacacgctctcgtcaagttcccatccaagattgatttcgacgatgtcaagagcaagtacgacaccaacgtggttaaggacagagagattcatatcaaaagagctagaacccccggccaaatgcaaagaggtggtttcagaggaggtagaggcgccttcagaggcagagctggtttcagaggcggtttcagaggtaccttcagaggtggtgccagaggtagaggtaacttcaggggcagaggtggtgccaggggtggttttaatggccaaaaaagggaaaagattccgttagaccaaatggaaagatcaaaggataccttatacgtcaataacgttccattcaaggccaccaaggaagaagttgccgaattcttcggtgctaacgccgactccatctctttaccaatgagaaaaatgagagatcaacataccggtagaatcttcacttccgattctgccaatagaggtatggcctttgtcactttcgaaggtgacaacatcgatatcgaagctaaggctgaagagttcaagggtaaggttttcgatgacagggaattgactgttgacgttgccgttgtcagaccagaaaatgaagaagaagaagttgagcaagaatctggacctgaagaaaatcaagaatga

SEQ ID NO: 1071 - DNA, 771 bp, Saccharomyces pastorianus
atggctccaggtaagaaagtcgctccagctccattcggtgctaagtccaccaagtctaacaagaccagaaacccattgactcactccaccccaaagaactttggtattggtcaagccgtccaaccaaagagaaacttgtctagatacgtcaaatggccagaatatgtcagattacaaagacaaaagaagatcttgtccatcagattaaaggttcctccaaccattgctcaattccaatacactttggacagaaacactgctgctgaaaccttcaagttgttcaacaagtacagaccagaaaccgctgctgaaaagaaggaaagattgaccaaggaagctgccgctatcgctgaaggtaagtctaagcaagacgcttctccaaagccatacgctgttaagtacggtttgaaccatgttgtctctttgattgaaaacaagaaggccaagttggttttgattgctaacgacgtcgacccaattgaattggttgttttcctaccagctttgtgtaagaagatgggtgttccatacgccattatcaagggtaaggctagattgggtactttggttaaccaaaagacttctgctgttgccgctttgaccgaagtcagagccgaagacgaagctgctttggctaagttggtttccaccattgacgctaacttcactgacaaatacgatgaagtcaagaagcactggggtggtggtgtccttggtaacaaggctcaagccaagatggacaagaagactaagacttctagttccgcttaa

SEQ ID NO: 1072 - DNA, 2130 bp, Saccharomyces pastorianus
atgtattcctccctttgtcatcttgtagcatcatctaagcgttatatactccgaacaccccagcgcctttacactagcttgacgcaagaacaaagccgcatgtctagaataatggaagatttacacagcgaatacgtgccgcttattgccagcgtggacgttgggaccacctcgtcccggtgcatcctgttcaacagatggggccaggacgtctcaaaacaccaaatcgaatactcgacttctgcctccaagggtaaaatcggggtctctgggctcagaaggccctctactgcccccgcccgcgatacgccaaaacccagcgacgtcaaggccaagggcaagcccatcttctccgcagagggctacgctatccaggagaccaagttcctcaagatcgaggagctggacctggacttccacaacgagccaacgctgaagttccccaaaccgggctgggtcgagtgccacccgcagaagatcctagtgaacgtggtccagtgccttgcctcgagtttgatctcgttgcagactatcaacaccgaacgtatcgccaacggtctgcctccctacaaagtaacctgtatgggcgtggccaatatgagagagactacaattctgtggtcccgtcgcacaggcgagcccattgtcaactacggtattgtctggaacgacacaaggaccatccagattgtcagagacaaatggcagaacaccagcgtcgaaagacaactacagctgagacaaaagactggtttgccgctactgtccacgtatttttcgtgctccaagctacgttggttcttggacaacgagcctttatgtgccaaggcgtacaaagaaaacgacctgatgttcggtacggtggacacatggttgctgtatcagctgaccaagcaaaaggcgttcgtgtctgacgtgaccaatgcctccagaacagggttcatgaacctttccactctgaaatacgacgacgagctgttaaagttctggggcatcgaccgcaatctgattcacatgcctgaaattgtgtcctcgtcccaatactacggagacttcgctatccccgagtggatcatggacaagctgcacgatttaccaaagaccttactgcaagatctagtcgacagcaacttgcctattcaaggctgcctgggtgaccagagtgcctccatggtgggccaactcgcctacaaacccggtgcagccaagtgtacctacggtactggttgctttttgctgtacaacacggggaccaagaaactaatttctcagcatggtgcgttgaccaccctggcattttggtttccaaacctacaagagcatgatggccaaaagccggaattgagcgagcctcatttcgcgctggaaggctccgtcgcagtggcgggcgcagtggtccaatggctacgtgacaatttacgcttgatcgacaagtcagaagatgtaggccccatcgcatccacagtacccgactccggtggtgtggtgtttgttccagcattcagcggtctattcgctccctactgggaccctgatgctagagccaccatcatggggatgtcccaattcacgaccgcttcgcacattgccagggccgccgtggaaggtgtttgcttccaagctagagccatcttaagggcaatgagttcggacgcatttggtgaaggttccaaggacagagactttttggaagagatttccgatgttacgtacgaaaagacaccgttgtcggttctggctgtagacggcgggatgtcgaggtccaatgaagttatgcaaattcaagcggacatcttgggtccctgtgtcaaggtcagaagatctccaacagcggaatgtacagctttgggggccgccatcgcggccaacatggcattcaaagatccaaaatcacgtccattgtggaaggacttgcacgacgtcaagaaatgggtgttctacaatgggatagaaaaaagcgaacagatctcaccggatgttcatcccaacttaaggatattcgcaagccaatctgacgatgcggaaaggagaaagcactggaagtattgggaagtcgccgttgaaagatccaaaggctggctcaaggacatcgagggagaacacgaccaggtcctcgaaaacatcaagtaa

SEQ ID NO: 1073 - DNA, 672 bp, Saccharomyces pastorianus
atgagctcacaaccatctttcataactatcaggggcaaggccatctcgctcgagacccagacggagtctctcctctcgaagtactccacgttcgcgcagaccaccagctcagaacagactggggaagagaaggcaatagacacgcagctggaggccatcctgggccagagacaggacgtggtcgagtcgctgacaaagatctgcgactccaacccggcgatctccgcctcgaagctgtcgcagcttcagcgccacaaggagatcctgcaggaccactggaagagcttccgcaacatcaggtcctccatccagcaggagcgcaacaggctcaatctgctatttagcgtgaagaacgacatcgctaactccactacggatgcccccgctcccatcgctgacgctgacgagtatatccagaacgaaacaaggcggattgaccagtccaacaacgtcgtagaccgcctcatctcccaggcctgggagacccggtcgcagtttcactcgcaaagcaacgtcctaaacaccgcgaacaacagggtgctgcagactctacaaagaataccgggcgtcaaccagctcatcatgaagatcaacacaaggcggaagaaaaacgccgtcgtattggccacgataaccaccctctgtatactgtttttgtttttcacatggtaa

SEQ ID NO: 1074 - DNA, 5637 bp, Saccharomyces pastorianus
atgtccatttctgccgatgaagtgaaggagaaacagctcgtggaaaaggtcgaattgcgcctggcgatcgccgactcccctcacaagttcgaaaccaacctacacacctttttgccgccgttgctgttgaagctggcgtccccgcacgcctccgtcagaacagcggtgttttctgctctgaagagccttatttctaggataaacacgctgccccaggtccagctgcccgtgcgggcgcttatcgtccaggcgcaagagcccaatttagccgctcatcaagactccaccagtgttcgtctctacagcttgttgttggcctcgaagggtatagacaggctctccgtgcaagataagcagctgttgctgcccctggtcgtatcaaacattgcgacgctcacgggcacggtagccgccaggatgttccatattcttttgaagcttattctggactgggtcgcaccgcaggactcgtcgcgtgagcaagaggagtttgtggagcttctgcaactggacgacgtcagcttcgcgtttttgatgcgccagttcaccaactttttcctcctggtgccctcgaagcagccgcaggcctcgcaacagcctctgtcgagggggtatacgtgtccagggctgtctctcacagatgttgcgttcttcacgtacgatgcgggtgttaatttcaacaaggatcagctgctcaagtttaaaaatgcgattttccggttcgtttgccacgggatggcggcagttaatcgtgataagcaaccatccaaggacaccgaactgatgaagtttctgtgcgtagcctctaccgattcctcgactttgtctgattccgcggcacagtttatgaaacggtttgctgtgccgtacgagaaccaagagtttgtcgcgttcttacagtcgatgtacattggcgacaatgccaaggggagatcacccgttaagcctgccttgcaagaaaaaatcctgtccatcttgaataagagtcacgtcgcaaccaccagcccagaacgcatctctttaatttgctccattgggttgcattcatctgaatacaagctaaggtctttgacgctttcgttcattcgtcacgtcgcaaaattgaactaccaaaacttacaccctctttcctcctcttcctcctcctcctcctcctcctcctccttgtcatcgtcgactgatttttccacgagtattgtttccttagtcagaaacaatcttcacgcagagggttggcccaggctacagttgggacctcaaacccccgccttcaatacggccatttcgcagagacagctacagtacgaaactctgggcgatatcttgaaaagagattttgacctggtaagagacttgtcctatatcgaattcttattcgaatccttacaaggtgacttaccacaattccgctccagcattcaagagtctctgctttctttagttgttcatttaccaaacctacctcctcaatccaaagcaaatttgaagactctcctcaagaaaaacttttatattgatgagcaacaggaagaaggtaataatgacgccattaactctattatggcgcttaaattcgtctctataaagttcactaatgccgcattttcctttgatgaccctgaggcaagattgttcaatctttggggtaccgcgaggacaaatagattccatattattgaggagtcgtttaaggggctacagcctttctggttcagaatcaacaacgcatcattgaacacttcgtcgattgtaaaaacatctgatttgttgggctcgcaagtgtcggagacgaaatttcctcaattcggtgaatttattcgcatttttatcaagcatttggattccgagttttcattgattacacgcaaatctctgaataacactgttagattcatcaaacaatgtctcatatcaaatgcaatttatggcaaaaaaacaatggtaattcaagatgaagactggtcgattagaatagataaagctttggaactagacgaaacggttacttcgcaagtaaatggaatggttcagacaataaatgatgatatattcatccgctttttaactcttttggcaaatgaatttaccattacgaaccgtaatggtgaacaggttgcggtttctccataccaggatcctattttcggttccgttttattgacgttattgaattttgtaaacagcaatgttttgcaaaaactagaaagtatagttccagatctataccatttactcattacgaaatttcaatcatcaagtgataatgatttagaagtctgtgcaagcagcatcggtatcgtttccaccgccattgtagattctgttcatatcgaacagattacaagtatagccgaatcacaaacacttgcagaaacttatgttgcctcttacgttgttccgagattatatttaaagaacaaaacagcccgtatccaagaaactaatgttgtgaatttgttgaagaacttggaatcccatctatcccactctactaccaataaaagtatgatattgaagttaatttgtcaagtaactaaatttggtttacttctccaagtgaatacccaagaacggaaaacatttttgtcccaaatcatgaatacaatacaagataaattaattaacgatgtgactgctattcaaacgtggtcatatttatctttatattcaaacaatctagacaattccgattttttccaagaaaagctactcgaaacgcacgtttccaaacaaaatgattttttgttttcagtaggtgaatcgttaactgtcttggctggtaagtggtcaagtaagtacctaatcaagcagattgatattccaaatttcgatgttacgactattcaggaagattttccacctacaaacgtcaccaccatactcaatgaaattttatcaggttgtgattccacaaaaccttccttaagaaaggcatcttgtatttggttgttatcatacatccaatacttgggtcacttgccggaaataatatccaaatgtaatgacatccatttaagatttatgagattcttagccgatagggacgaatttattcaggattctgccgcaagggggctttcgctaatatatgaaattggtggatctgatctgaaagaaagtatggttaagggactactcaaatcgttcacggattcaaccacgggtgctgcatccaccagtgctacaggtgtctcaggttcagtgtcagaagagaccgaattatttgaacctggtgttctaaacactggcgatgggtccattagtacttataaagatattctaaacctggcatctgaagttggtgacccagcacttgtttacaaattcatgtctttagccaagagttcggccctatggtcatcaagaaaaggtattgcattcggtcttggtgccatcatgtccaaatcttctctagaagaattattgataaaggatcaacaaaccgccaaaaaattaattccaaaactgtataggtatagatttgatccataccaatcagtttcatgttccatgacagacatttggaatacactgattgccgattcctcttccacgatatctctttatttcgatgatattctagaagaacttttagctggcatggccaataaagagtggagggtcagagaggcaagtacctcggctttgttacaattggttcaatctcaaccacaagaaaaattctctgaccagatgctgaaaatttggacaatggcatttagaaccatggatgatatcaaagacagtgttcgtgaagttggtaccaaatttacaactgtgttgtctaaaatattagcgagatccattgatgtggaaaagggtgtgaaccctgccaagtccaaggaaattctagacaatatcctaccatttcttttgggaccacatggtttaaacagtgacgctgaagaagttaggaattttgctctcaccaccttaattgacctggtgaaaaactcctccggtgccatcaaaccatttaccccaggtctggtctatgatttcatcacattattttcttccattgaacctcaagtaatcaactatctcgcattgaatgcagcaaattataatattgatgctaatgttattgatacgcaaaggaaaaatggtgttactagctcaccgttatttcaaacaattgaaaaattgatctccaattcaaatgattgtatgatggaagatataataaatgtagttatcaaagccgccaaaaaatgtgtcgggttgccatctaaggtggcatcatcacttgttattattcttctagtgaaaagatcttctattcaaatgagaggatattctgggaagctattgaaagtttgcatgactatgtttgaagatagaaatgagtccgttaatatcacatttgccattaccatgggatatttgttcaaaatttcggcgctggacaaatgtgtcaagtattctgaaaaactggctgccaaatacttcgagtcaacatcaacggaaaataacaagaaaattgtcggcacagcaattgattcaattttaaattatgcaaggtcagactttgataatgtggcaagtatattcatgcctctgattttcattgcatgtaatgatgaggataaagatttggaatctctatacaataagatttggacggaagcgtccggttcaggtgccggtaccgttaagctatttctgccggagattttaaacatactctcgataaatatcaaatcaaacgaccatgtcattaggaaaacatgtgctaaatctgttatacaattatgcggtaaaattgatgaaaacattcctcatgagcagattgttaaactatttgatatctcgaaggaagcactaagtggtagatcatgggatggtaaagagcatattgtgggtgcaatggtttcattgacgaaaaaattttctcagactgtgattggtgatacagacttacaaaattcaattaatgatgtaatgcgaaccgagatttcaaggaaaaacgagaaatacactaaaaaaatattaccgctatatgccaagtacgttagtgtaaatccgcaagatgcaacgatcgtactattaatggaaaaatccaaagagacgattagatccttaggcaatgaatctgctgacgatgaagattccaccagacatacatctgatgaaaccgcaataaaaagaatcaaacccaacactgacattacacaaaagtcgtctaagcagaacatcgagaacgaagagtacgtgatcaatttgttaaaggtcattgtcgatgtgtgtaacaattctaaatcgaagtatccgatgaatttattagaattcgtactgaacgaaatcgcatacctcttccacaacgacaagatcatttacacatggagaacgcaacttgctgcgagtgagattggcatttcgatagttggtaaattcaatacgatcagtagcaccgatttcataaagaatgtgaaagaactatggaacgaaattttccaaatgaactgtaacaaagaaaccgttgaaaatgttaaattgcaaatgataaaacttggtggtttgattattcagaaaatccccatcatacaaaacaatatcgaagagaatttaaggcagttgaattcgatagattcaacaagcagaattgaattggaattgaagaatattggtctatga

SEQ ID NO: 1075 - DNA, 2058 bp, Saccharomyces pastorianus
atgcacgacaagaagtcgccaatggcgaactctcattatctgaagaatttgaaacagcagttccgcaacaaaaaccttatcgagacgacgatccatctggtaaactgcaatgaccatgattcgctggccttcctggcaagaacgtacgggattccgccgcagttgaggcatgtggtgtggccgatcttactgaaataccatccgatgtgcatttcaccgaatatcacctccaacaccatctcctgggaccccatcaccaatgattttatactcaatgaccctttcttgaacagcaagtcttgcgctggcaagcaggacacgtcggacaacgggaatgttctcccgtacgatatcgagtctgtcattctgcatgacttaaagaaatacttccattccaggtcaaaccccaccgccactcccagcagtagcaacaccaacaacattgccacgccgacgcctctttcgtcctcggatgcgtccacagtctcctccatggagctgatgcccccctcactggactacgaattccaaatcatagagaccctgaagaatgccatcgtaaagtttctacggaaatggtccaaaatcttcaaatacgaaagcggtcttgcctggattgccctggggctggccgaatggtatcccatctacccttacgaggccgtgtccactttcagcgagactcgctcgttttatgacgtggacgactatattgtattgagcggcagaaaacatgctcatctaagcactagcacgagcaaaaacaatggtagcaacaatacatccaactccaatacaaacggcaccagtgcgaatataatgtcaggtatgaacaacctgagtttgaacacaaacaccggctcgcacaattcagcttacatatctcacacgctatcgtacctttataaagagtacccactaccatatgaactacgatcgaaattgcccacaacaccaatcttcacattcgatgctcttttcgaaagactggctcttgtcattttgcattgtcctgatactatcttggcacacaaacagttgaaaaatgactcaagcgcaccatccactacaaagacgaacatgaatttcaacacgaactattttcctatcatatctggtggtgatctatcatttcaaacccaagtgtttttcaaagtcttttcttcaatattgcccgagttatatcaacctttaacagaagagtcttcattgcaaccttcatcgtcaagaaactcctggatttactggtggttgaaatgctctggatccaaagctctacaaagacaagatagaggacgtgtatgggatctgctgctcggatggaggcccaaaccaaacatgaacacaataaatttctttttgaattataatgacaaacaaatagagcatctctatcacgataccccgcaatgtgataacgagcagtattggatgaaagattggatagcattgtaccacaatgatcctttttggtttcctgatctcgacagtatggaattaggttccaaacaattcccatacgattacagcgtcttcaaagagttactcctgagaaacaaatacggggatacgcaaaataaagctcagacgaatggtacgccaccatcttccaatagcgattcaaacgatggccgtaacggtagtaattcagaacttaaactaccgttttcttccatcgaccctcatatgcaactgattttcatttttatcgcgattttacaattcaatgagttcaaactattagagtttgaagaagccgagatttcagaatttttaaataacgtccctctgttaacaaaattcgatgactcttcctataagaagctatacgagaacacagattccaatatatccagcccgccctcatcaccaacaatttccacctcttcatcattacaatccaacctcaactcaagtgtccatatttccaattctcatatgctgattgaagtcggtaacgacgccaaagcctcgcactgtttcgatgatcttttaaatatggctggggatatttggagaaaatggttatggagagaattagaggagagctcgatttga

SEQ ID NO: 1076 - DNA, 1881 bp, Saccharomyces pastorianus
atggtgccactggaagatttgctcaataaggaaagcgtcgctatcacgcctcagacagaccacgatcctgtggtaaatggcaagaccggcatttccagtgtgatgaagaaggatgggctgcctagtcccaacttatcgaaaagggcctccgactgctcgaagaagcccatcatcacgtgcacaacggacgctattggtttgaaacgacaagaagatgaacgtatgtcatctggcagcgcttcttcaacgtccccggcatttcatggctcttcgcatttgaatactcccccatatgaacccttgggcccatcagttgtgtctccttcgtctccttcgtcaggctcttcctcctctccctcaccatttgcgcggggccacaacccggtggacgatgacgaagatgttttggacggcgatgatgaatctgaagacgtaatactcttctgtaagtgggagcactgtaatgtgacgttcaaccagccggagttgttgtacaatcatctgtgccatgaccatgtcggcaggaagtcgcataagaacttacagttggactgccattggggagactgtacgaccaagacggagaaaagagatcatattacctctcatttgagagttcatgtaccattgaagccgttcggctgctccacttgctccaaaaagttcaagcgtccacaggacttgaaaaagcacttgaagattcacttggagtccggaggaattttgaagcggaaaagaggccccaaagtgggttcaaagagaaccagcaagagaaacaagagtggctcgaaggatgcattgtcgtcccgtaccgcatctcttcctcctgccgctgctgccggttacaagtctcactccacttctccacaaatactaccacccccattacctctagaaatggcgcaccatttaccttcgcaacagcagcagccaatttctttaaaccaattgtgtacggacgaactgtctcagtataagcctgtttactctccacaattgagttccagactacagacaatcttgccaccactgtactacaataacggcaaaacggcagttcagaacgccaacagccaaggattgcacgtttacgaagacggctgctccaataatgcggtagccagcgctacccagttcttcactaaactatcaagaaacatgactaacaactatatattgcagcaaagcggcggcagttctgcctccacgtcatcctctggacacatcccaatcgcacaaacgagttatgtccagccacccaacgctatgccttaccagcctatgcaagtcactacaacgaacacaacaacttatgtgccaattcagttgaccaaatacccggcaggtaacttagttaccgaacatttgccacctttgcactcgaatactacaggtagtattatgaatcaccatcaccagccccatcacgctatggctacgacgccacactatcaacctgcccgtgctatgcccaattactcttctacaagctgttccatcttaccgccactacaatcaaagataccaatgttgccatctcgtcctacgatggtgagcggaaacccattgaaaccaaactgggaattcagcctgaatcaaaagagctgtacgaacgatatcatcatgagtaaactggccaacgaagagcaggaagacgaaagcaatgtggaggacgatttcatggagacgttgggtatagtaaatatcattaaggactacttgctgtgctgtgtcatggacgattacgaaagcgaagaaggcgactacgaagatgaagacgatggtttattgcaagcttcgctagaaaaactgagtttgcagaacccaatgggaacagactcaactcgcattttggccaagtatccaacaattctggtatga

SEQ ID NO: 1077 - DNA, 1062 bp, Saccharomyces pastorianus
atgggcgttgtcaagaagaaaaggtcacaccatgggaaggcgtcgcgccaacagtactacactggcgctcaagtcgctggaggcggcagcatgggcgccgtgaacagcaccatcccgtcgctgacgagctttgcggaggaaaacaactatcagtacgggtacgctgggcccagtgcgggcgggaacggccgggcactaacatacgcgcagcagcaactgaacaagcaaagacaggattttgagcgcgtgcgcctcagaccggagcagcttagcaacatcatacacgacgagagtgatacgatatcgttccgatcgcaccagctgaagaatttcatcagttcgaacgacgcgttcaacatgctgagtctgaccacggtaccgtgcgacaacatccggaactcccgggtgtttagcgagcagatggcgaagtacctcacgcagaagcagcgggagcttctagaagctcccgctgcctcgtcgtctggggaccccgagaacgagccgccgagggccctaaagtactcggatctcatactagccgccgagaacggcacccgcagctccaaggatctggtagaagccgtctttgtgcgcggcggcccactgaggcaccagcgtgacggcgtggtcgtgcgtcgcgacgacgccgcgctggtgggcaagctgcgcggagacctccgggaggcgcccgaggactattggacacatatgtatagggaggtgctggctcagtaccgcgaggccaggctacgaatcagacagaaggactccactgcagaggagaggcaggaggacgcacggttggagccgcaacaacaggactcacagcaagatcagcaggaaccgctatcacagcagcagcagcagcagcaacaacaacaacaacaacaacaacagggggcagacgcagccccacagaatcccagtggagcctcgacagaaaaggaagcggtgcctgcagtcgacgacccgctggagaacatgttcggagattactccgccgagcccttcaatacaaactttgacgacgagttcggagatctcgacgctgtgtttttctaa

SEQ ID NO: 1078 - DNA, 2106 bp, Saccharomyces pastorianus
atgagaacagaaatcactactgcggattcccttcgtgatcctcactccagcggtctaaagcccgactctgagctggttatcagagaggacatagaccagtttctgccttcggaagtgtcttcggtggagtcggaccatcgcaacgatggcgaggattcagacactgacagcgacaacttcctgcaagatcctgaagacgacgtggacgaagacgccaccggcaaggagaacgccgccgcctccgttgaatcaagaggccgtccctcttcttgcattttcgtggcaagtttggcagcggctttatccgacgacgaactatgcctttcggtgacggaaaacttcaaaagatatggtgatttggctagagttaaagttttacgcgataacgccaacaggccttatgcctttgtccaatacaacaacgaccatgatgctaaacacgctttgatccgtgctcagggcactttactgaacggcaggcggttacgttgcgagcctgcgaaagtcaacaggactctgtacttgaaaaaccagcagagtatcgactttaacgaaatcacccagatatgtgaaaaatttggtaatttggaacagatcgttcctgatagaactgacaaccagtacacaagaagatacacgtatcctatatcttcagcaagctcttggttcgttcaattcgtctatagagacgacgcgattagagcttatgcgaacttgaggaccgatccaaactggataatcgaatgggctcaaaatatcaatgtgcccaggaattacaatcttttgcacaagaacaaattcaaaaattccaaggatcaccaggcaaacgatatcaaagttaacaaaaatgaggactcgaggaggagcagtgccattatagaggaagacgaacgcgagctcgaacacgaagaaggatacgaacatgaatgtgggagtgatttggacgaaaaaatagcatgcgacagcattgatgacggggaggataaagattctgagattaccatcgataaaaagtccatattcgtaggtcagttagacaaagaaaccaccagagaggaattggatagacgattttcaacccacggtagaatccaggacatcaacctgatcttcaaaccaacaaacatatttgcctttatcaagtacgaaactgaagaagctgctgctgctgcgttggaaagtgagaaccatgcgatttttttgaacaaaacgatgcatgtccagtacaaggaagttggtggtcgtcacaatagaaagtttttcaacaaaaacggcagtggcaacttcaaccatcaccagtttttcagtatgagatccggtaaatcattcactggacccgaactgaacctagcacctccaccaatcaatatgtacagaaagatgagcggcggatctcaaccagaaaacgagaacatcatgccatatatgccaatgggcccgatgcccatggggccacctccacctaacgccgccaatttgaacgattttgaaatgttcccaccaaattactccacgttcatgaaggggatgataccactgagacgtaaatctatgcccaatgcctggtcttcgccctcgtctaagagtttgaactctgagaacgcaagtgttaatggcggtgatgagacttctgaactgccctctgaaattcctgaatcatctggaagatacaacgctgctaattcctttactacttacaataactcctcagccggcagctctaacaacaataacaccaacaacaagtttcaatacaaaaaacgttatgcaaggagatcaagttatggatataatgaggtaccaccaaaaccatactatttccagccttattactatcacccaatgcaataccacatgggccccatgggtccaatgcatccttcccagggttcggccggcaacaaccatccatacatgatggtttaccccatgccgcctcctcctccttctgggctagatggaaatatgatgcctcccccattaaatatgggtcaaccccacagtgctaacaatagcagtaccaatatacaagcaaatgaattcgtgccacatgatacaaacgacataaacgaagacggtaaggctgcttacagcttagactactaa

SEQ ID NO: 1079 - DNA, 3444 bp, Saccharomyces pastorianus
atggatgaatgcttgcccaactcatgtctgctgggtgttcacctcgtcatttcaactcattcgggaccacaaatagtttaccactatccaccttccaatacagcattcttaacaaataatccagcaaagcatcagcatttttatggaaatcatgatgtactggggaaaaacacagataagggagacaaatcgttcaataccggggctgccaaaacaacttcccaaggcccccaaaatgactcaatgaacaattttaatgccaccgttccgccatctatgacaaattcaaatataaatagtgggacaatgcccacaacaaggtcccatgctaatactgtgggctctcaaggctcaattcccactgcaagtaatggtataggctatggggaaaccgacgccgggaacaaccctgggtcttttcagtactcagaatccgaatccgaatcatcatcatctggcttgagtgatagtgaactatctacagattacgtagatgtttcaagcgattcattttcaatatcatcctcgttatcatcgccctcattatcctctacttcgtcgagtccaacttcatcctcccctctgcaagatggcttatcccccactatttcaagttcccaatcaatcgattcaatgtcccccacttctccacagataaccatgactaatgatggtgtttcagtctcggaatcatatttagattccgccgtaaacaataaatcgagggccacttcaaaaagatctcagaatttcttccacaaattgagtaccaaaaaaagtgctgaactgaaaccgcattctccaataaggaaactcaaatctaagccctcaaagagtactaccaaaggcaataagctgctaaaaaacccttccaacgagaccgatgcaaatgcccttgtggggaactattcactctcatcgaaaaaatcgatctcaagcacgggagactataaccaagatattcgtaataatagtctcaatgacactcctggccagtcaccccaccattaccatcatcgttatcaccactaccgtaagtctattgcgaatagtcaacgaaatatatccactcagtacgatgtcgacgaagatatggaagtttcaacaatgttacaggatggaaaaatatccatgaacgagatatttttcaaagaggagaatttccaagacataaataaaattctagaatttgatcatgatttcgttgcagaattttgtagtcccgaaagggaaatgtgcaatactagatttgaattgacagtggacaacttttgctttttaggcctgcccatccacgtggattctcaaggaagatggagaaaatccaaacataaaaataaaactcgttctaaaagatcatcgagtactacgacaaatattagtagaaagaaatccgttgcttccaagatctcatcggtaagtgaaaacactctaaagaaactaaacagtggcgaagctgagactgattacgacaacaatgttggtgacgagaactatactgatgcgccaaatttgaagataaatactgattttaatgggagcgagtttgacagagaaaaggaagacttgggtaaaaatatgaatatgttccatgtctgcttcgtcatgaatccccatttaatagaatacaacaagagagtagatgatatgtatcagtttgttgtggcaaggttatcactactgttaagatatgtgcaatcgaagacatcgtatgtttctagtgaatgtcatcttattttgaaggaaagggaaagagtattgaaacattcaaaaacgtaccaaaccatcaacggtgccggaaacaaaggcaaatacttataccaaagaatcctagccaagtcatcgttagctagagcgttaacggagtgtgttgacaagatccaaagaaacgaaattgcgtgtctcgagattagtgacgataaagtaatctctttgcaaatcccaattcaaaacgaatttgaaaaaatgccgaactttaaattacagcccgtattgagaggctcatatttgacgtctattttaaacatgaaatttttagaaaaatcatcattgagaattgaaggtcaaaatcgtcaaaataaccaggcccaaataagtgatgccaataacaacatatacagattcaacaacaatatcaacaataccggtcatggtggtgcaccaaatgtcgatgacggggatgataatgaaagcagttactactgtgacgataatgatgatcttttaaattacgcattgttgttactagatgagccaaataacattatcaattctttggaaacgttttcgtaccaggacgatatcggcagtgtgatattgaagcatttggtcagaaacacccagccaaacatccccttaaagtcgtaccactacttgataagtgaactactagacagtccgtcatcacaaaatgaccttacttcggagacaagttcattcgagtcgggaatcttgcgttcgtgcgcattgcatttgatgtattggagacatgcaagaatagtgattccagtgagctccaaatatacatacatcgtttcgccgttggctcctatacaaggttacacaatagatgatttcaaaagtacttcccaacatgatgataaagtgagcatggtggagaatgataagaataatggtgcgcatggcgagagtgtgcctttaatctatcaaaattcgatactatttagatccaaattcccatcattgcccactttaccgatttttttaaatttgttatcggtggataaacctcaggcgtacaataacataattccatcaagagaccacaagccagtttacttgaacgcgttagggtggctgatacagtacggatacgtgacacaattgctaacatttattaatatccgcgtggataaacatataaagatggcagtcgatgaggacttggagaaagagggattccgtaagactaataccacaggacgacctggtttggattacaaaagggcagataaaaaactagacgatgaagatggacaaaacagagacgccaatgccaacgaagaatgcatggggaagaccgaaagcgggcaacccaatggcaacaaaaccaatgacaacaatgatgtgaacggcaatgagaaggcggaagacggtcatggcgatgacctcgataataatgaaatggctgtggtcgatgaagaggaaatattacatttcgaatacgacgatccggagatgcagcacgactatacaataattctggagcccgagagagccacggcaatcgaaaaaaggtggctatacagatgcatttatgatcaaccttcagacatccaaattttgttcaataggctactaaagcatttcaatgggaaggtccccatggagctggttatcataaaagaggaaattagtaggcatgatttgaagagattgctcaatgctttaaataagtatctagtcgagactcaccactggtga

SEQ ID NO: 1080 - DNA, 1401 bp, Saccharomyces pastorianus
atgctaagatcacaattaggcagaggatctcggatccttgccaagataacaactacgccaagaacatactcatctgcgtccgcggtgggcgcaacagcaaatgcaggacagatcatcaagacgttttttaatagagactcgaccacggtcactttctccatggaggagtccgacaaaccagtttccgtttgcttcaacaacgtctttcttagggatgcatcgcacggtgctaatttggtcactacgggggaactttaccataacgagaaattgactgctccacaggacatccagatctctcaggacgggaaatctctggccgtgaagtggcaagatggcggcgttcatcagttccccctgcaattcttccttgattataaaggttccagtttcgtatctccggcaacaagaaagcaagaatctagatttcagtcgcagctatggaacaaggagatcttgaaatctaacatcaaggacttgctatctgtaaactacaatgagtttatcgacgccaaggacgactcgaagcttttccaaacgctggtcaatcttcaaaaattcggtatcactttcatctccggtacgccctcttcctcctctgaaggtctaaccatccagaagatctgtgaaaggatcgggcccataaggtcgaccgtccacggtgaaggaacgtttgacgtgaatgcctcgcagacgacgagcgttaacgcacattatgccaacaaagacctgccattgcatacggatttgccgtttttggaaaacgtgccaggtttccaaatcttacagtccttacccaccagtcagggagaagatcccagtactagacccatgaactatttcgtggatgccttttatgctacacgtaacgttagagagtcagactttgaagcctacgaagctttgcaaatcgttcctgtaaattacatttatgaaaatggagataaaaggtactaccagtccaaacctttgatcgagcattatgacagtaacgaacaaaacactttgctaagcaattacgagactttaatcaaatgcatcaactactctccgccatatcaagcacctttcacttttggtatttacgacaaaccatcagatttgaacaacaatccggatctgaatctaataactacgccagcaaagctcacagagagatttttatttaaatccttcattagagggttgaatgtcttcgaaaatcatatcaatgacttcaacaatcaattcagattgcagttgcccgaaaattgctgtgtcatatttaacaacaggagaattttgcatgccaactctttgacaagttcgaaccaaaaatggttgaaaggttgttatttcgattcggacactttcaagagtaaactaaaattcttggaagagaaattccctcatgttaaataa

SEQ ID NO: 1081 - DNA, 1803 bp, Saccharomyces pastorianus
atgtcgtcgagcctgtttattctggatgaagatctagaaccgctggtgtccaagaatatcagggcaataccgaacctgtcgtcgattctttccagctttaagcaatgttatcatcgcggttcgcctccaattctttcgcagaacggctggttctttatacatttgaagagagatttcttgcatttcatatcagtgatacatgccacagacaaaccgaacatagatttgatgagtatcctaacctttctagagcaattctatcatcttttgaaaaagtatttcgagattaatgttttgagcaagaacatcatactggacaacgtcttactcgtcttggaattagtggatgagtgtatagatttcggtattgtccaagtgacagacccaagtattatcaaggactatattcgtgtgaaagtcaacctgccaaaagtgccgatagagagtgacgaatggagttctgatgacgaaagcagtgacagtgacagtagcagcgagtacagtgacagtaagaaaaggaacaagaagaagaataagaagaagaagaagaagaagaacggcaaaggaaagaacgtgggcaaaagcaaaataaaaagcataatggtgaacaataaagaaaataagggaaacaatgtggtggaaacggtcaaacagactttgagaagcaagagcaatactggaagaaactctccggatgacgagctgcccaatgatggcaatgacctctatattaatggagacatcgcgaaaacgatcataatgcccatctcatggagaacaaaggggatccactattccaaaaacgaattctttttggacgttatagaacgggtccagtacctgatggatttcgagaagggagtaatcaggaagaacctaatccatggtgaaattgtgtgcagatgttatctttccggaatgcccaaactgaaaatatccatcaacaagctcttgaacaaggacccccagttcatgtctaattctaaattccaccagtgcgtttcactggattccataaacaccattgaggaagaaggaaaagacagcgatgattctggttcgcagatagcaaccgatacaaaggagatcgaattcataccgccggatggggagtttgtcctttgccaatatgagctgaaaagacacgtgaaggatgcaccgatgataaaactacaggcttttgaggtcaagcccaaaccgaagaaattcaagatccaaattgtaacaaaaattcaaaccaatttcaaaccaaccaactccacatcaaagctgaacatcaagatcccgctgacaaaggtctttcaggactacaagatagacctgagcaagcaaatccggttcaaggccaacttaggcaaagtcgtgttcaacctgagcgacgacttcttgctctgggaaatagaaactatgaagggccaccgtgaacgcaacactggcactgccccacaggaggacaatgccagcgctctggcatccatggtggcagagttcccactgttcaaccaggaagaatatgaccggatgcaagaagaactgaaaacctctatgaacccgccgcccctgcgcacgggacccaagctagaggaactgtacaaacaggtacacgaagagcgtctcccccacacgcacgatgtcgcccctcgagataagctggtcagcgtcgatttcgagatcccgtattgcacatgcagcgggctgaaagtcgaatacctgaaggtcgaagagccacagctgcagtaccagtcgttcccttgggtccgatacaagaccatcagcgacgacgagtacgcatacatcgtctga

SEQ ID NO: 1082 - DNA, 2211 bp, Saccharomyces pastorianus
atgggtgaatttaaacctccactgcctcaaggtgcggggtatgctattgtactaggcctaggggctgttttcgcaggaatgatggtgttaataacctatatgcttagacgttatcaaaaagaaattattactgctgaagaatttaccactgccggtagatcggtaaagaccggtttagtggcggcggctgtggtttccagttggatttggtgctctacgttgttgacttcatccacaaaggaatacgcagatggtatatttggtgggtacgcatatgccgccggtgcttgtttccaaattattgcgttcgccatcttggctattaagaccaagcaaatggctcccaatgcgcacacatacttggaattagtgagaaaaagatatggtaagattggccatagttgctatctgttttacgccattgcaaccaacattttggtcacttctatgcttttaacttcagggtccgctgttttcagtgacttgaccgggatgaacaccattgcatcttgtttcttactacccgtcggtgttgtcgtttatactctgtttggtggtatcaaggcaacttttctaaccgactatttgcacacttgtgtcatcatcatcattgttctcgtatttgcatttaaagtttatgccactagtgatattttaggttcgccgggcaaagtttatgacttagttcgtgaggctgctaagagacacccagtcgacggtaactttgaaggtgagtatatgactatgacatctaaatccgccggtattttattgatcattaatctgatcgggaatttcggtaccgttttccttgataacggttattggaataaagccatttctgctagtcctgcagcaagtttgaaagcttacgccatgggtgggttagcatggtttgctgtgccttctcttatttcattgaccatgggtttagcatgcattgcagtggagacctctccaaatttccccacatatcctgatccactaacttcgttccaggcaaattctgggttggttttgccagctgccgcaattgccatcatgggtaaaggaggtgcagtggcatcgctgctgatgatcttcatggccgtcacgtctgccatgtctgctgaattgattgccgtgtcatctgttttcacttacgatatctatagagaatatatcgatcctcgtgcaagcggtaagaaactgatttacacctcgcactgtgcctgtatcttttttggtcttgccatgagtggattttctgtcggactgtactatggtggtatttccatgggctatatttatgaaatgatgggtataattattagtagtgcagtgttgcctgtggttttgactttgtgctctaaagacatgaatgtagttgccgctgtggtgtccccaattttaggcacagctttggctataatgtcatggttggtttgcaccaagtcactttaccatgaactaactgtggacacaacattcatggattatccaatgctaacaggtaatttggtagctttattgtcaccagctatctttattcctattttgacttatttctttaaaccgcaaaatttcgactgggaaaaattgaaggagattaccagagtagatgaatctgaagaattggctcaagctgatcccgatattcagatttatgacggtgagcttaatgctaagggtcaagaagaagaaacaaattccctgacttctgcagagaatgaaaaaaatgatgttagagtaaataatgaaaaattgaatgacctcaacctcggtgtcgtgataagtaatgccattatgcaagaaagtggaaccgagttacaagaagaattagacgaagaacaaaaggaactagcccgtggtttaaagattgcctacttcctgtgtgtattttttgccttggcatttttagtggtttggcccatgcccatgtatggttccaagtatatcttcagtaaaaaattctttaccggttgggtcgtggtaatgattatctggcttttctgtagtgcatttgccgtttgtatttatccactctgggaaggcagacatggtatatacacaacattgcgtggggtatactgggatttatctggccaaacctataaactaagggaatggcaaaattctaatccacaagatctgcatgtagtaacaagccaaatcagtgcaagactgcatacacaatcgtcacaattcggacaggttgacgaaatcatttga

SEQ ID NO: 1083 - DNA, 363 bp, Saccharomyces pastorianus
atgtctgactttcaaaaggaaaaggttgaagaacaagaacaacaacaacaaatcatcaagattagaatcactttgacttctaccaaggttaagcaattggaaaatgtttcttctaacatcgtcaagaacgctgaacaacacaacttggtcaagaagggtccagtcagattaccaactaaggttttgaagatctctaccagaaagactccaaatggtgaaggttctaagacttgggaaacttacgaaatgagaatccacaagagatacatcgacttggaagctccagttcaaatcgttaagagaatcacccaaatcaccattgaacctggtgtggatgtcgaagttgttgtcgcttccaactaa

SEQ ID NO: 1084 - DNA, 918 bp, Saccharomyces pastorianus
atgagtagtatagaagtatcagaggcccttaaaactatggaagaaatcctggcgagacatagaaaggaaaacaaagatttacagaataaaataaccggtatgaaaaaacaggccactaaatctaaaagaaaggaagttaactcgaaatgtttagatcttcaagacaatttgaagattaaacaggagaatgaaatcaaaaattggaagatcgttaataaccaagcttccggccctgaagaagaagatgaagtgactccggagaaactattggagcaactatccatatcacaagaggaagaacacagccaacaggatgttcccggccaacaagatcaaccaaagaaacgtcgtaatagacaaaaggaaaaattggcaaagagggacgcagcaattgcgaaaatgaaagaagaagcagctttggaagcttcgcaacaacctgattttaaaaaaatggaacaagaatctatagaccaattatgcgaggtgaaaaaactgaagcagttcgatatacaacctgacggccactgtctattcgcctcaatattagatcagttaaaacttcgccatgatccaaaagagctagattcagacttgaatgtcagaaaactaagatcgctgagctgtaattatgtacaggaacatagggacgatttcgttccttatttgttcgatgaggaaagcatgcaaatgaaagatatcgatgaatatactaaagagatagagcatacagctcaatggggtggagaaattgagatcttagctctatcccacgtttttgattgtccgattagtattttaatgagtggtagatctgttcaagtttataatgaggacggtaaaaacgctgaattaaagcttgtctattataaacacagttattccttaggtgagcattacaattcattgcatgattcgtga

SEQ ID NO: 1085 - DNA, 1485 bp, Saccharomyces pastorianus
atgacagttttttcaagtataaatgaatttgagtacaacggtactttcgaaggaataaggaaagatgtcattgtgtcgcaaatgataaaggccttgcagaaacatttcccttcgatatgcgataaaaattatgagttaagtttatttttgcccatttttcagagatacatcttagaaaactcttcaatcactcacgaactagactctgaaagaattcgactgctcaatataacagaatttaccgagtttgaggatatccaagacaatgatgcattagatgacgcccttttaacgaaattagcaactgtaaaattaaacgacaaagtagattcagtaattggaaaacaaagtcctttgttcgaggtaaaaaatggtaagtgttctttagatataatattacaacaaatacaaaatttgaatatatcgtttaattgcgacgttccacttatattcataacaaaccccgaaacagaatcacaaatctctgatttcctaagggaaagctatccatgtaacaaagttgaatggaaaactttagtgcactcaagttttccagcaattgataaagatacgttgctgcctgccgtattccaaatgaatgtttgcgaagacgacctctggttgtcttgtgggagtgggaacctaatcgacactttatacttttcaggagagttagataacttaattgttcaagggaaagaggttctgttcgtttcaaatatggaaaatttaggcgctactgtagatttgaacatattaagttatatgataacaaacgatattaactaccttgttgaagtggttgacagaactgccaacgattcgaatacgggggtactagccacctatgaaagcacactacggttagtggactacaagtatctgtcccgtgaaagtgcaagaaagtgcagaactgttaacactaacaacatttggattaatttgcgaaaattgaagaatctaatagagtctgatagtctaaatttgccgatttgttcaagtgaaactaagacagtaataagtaacagtcaattcatggagactttgcacttgcaaacacatttgggagattgtatcggcttcttttcaaatagccaagttatcaaagtaccaagaaacagatttttaccgctagcaacatgcgaggacttattcctattgaaatctaatttatacgatctcgataagaacgggattctcagtctctatcctttaagattcgaattactgccatcaatcaaactaggcgacgaatttgacaattatggaacctttaagataggaataccagatattcctaatattttggaactggaccatttaactgtaacagggaatgttttctttggtcgtaaaataattctgagagggaccgtcattatcatttgtgatgaagacgatgtaatcaccattcctgatggctctattttagaaaatgtaatagtaagaaacaaatctcagctggaggatattggccaattctga

SEQ ID NO: 1086 - DNA, 963 bp, Saccharomyces pastorianus
atgccaacaaactccattaaattactggcaccagacgttcatcgtggtttagctgaactcgtcgccaaaagattgggcctacaattaactagcagtaagttaaagagagatccaaccggtgaagtctccttttctattggggaatctgttagagaccaagatatcttcatcatcacacagatcggttctggtgtcgttaatgatcgtgttctggaacttttgatcatgatcaatgcttccaaaactgcatctgcaaggagaatcactgccattattccaaattttccatatgcaagacaagatagaaaggataaatctcgtgcacctattaccgctaagttgatggctgacatgctaaccactgctggctgtgatcatgtgattactatggatttgcacgcttctcaaattcaaggatttttcgatgttcccgtagataatctatatgcagaaccaagtgttgttagatatatcaaggaaaacgtcaactatatggattctataataatttcgccagatgcaggtggtgctaagcgtgctgccactttggctgatcgtctggatctaaattttgcattgatccataaagaaagagctcgtgctaatgaggtttctcgtatggtccttgttggtgatgtcactgataagatctgtatcattgttgatgatatggccgacacgtgtggtactctagctaaggctgctgaaattcttctggaaaacagagccaagtctgtcattgctattgttacacacggtgttttatccggtaaagctattgaaaatattaataattctagactggacagagttgtttgcacaaatactgttccatttgaagaaaaaatcaagaaatgtccaaaactggctgtcatcgatattagtagtgtgctggctgagagtattcgtcgtttgcataatggtgaaagtatttcttacctatttaagaattatccactatga

SEQ ID NO: 1087 - DNA, 1758 bp, Saccharomyces pastorianus
atggatcagtttgaatataaaattatcctagagtttgaaagccaagatcaggtcgaatccgcttatcgagtttttaaggacgtttcaagcaaatctatctctaacagtacctgggaagaaaacataaagggtgacaatcaacagtaccaaaattggagaattggaaactggtcagtagatatgttaactgatttcacaaaccaaacatctaaggaaaaggaaaccgatttgattacttcacaatacttgggccatggaataataaggttattcaaattaaacaatgccaatgatccttgtgatgaaaaggacattctgactattcctggtgatgataccatgatcagtatcttatttgttccgacatacttcacagttcatgacttactgcatttttatattggtgatgatattgttaataatcaagtttccaactttcgtatactaagaaatcaacaaaaaggcatcggctttaattttatggttttaatcaagttcagaaatgcgattgatgcaaagaatttcaaagatgagttcaatggtaaaagctttagcaggatggatccagaaacttgtcatgttatttctataaaggagatcgatttccaaagaaaacttttccaaagaccagccgctaatgaagacttcccttatctacttactgatccatttactgttaaaaagaaaagagatctggtgaaagttgaactaccgacatgccctgtctgcctggaaagaatggactcggagacaactggattggtcaccatcccatgccagcatactttccattgccagtgcctgaacaaatggaaaaactctaggtgccccgtgtgtaggcattcaagtctgcggttaagcagagactctttattgaaacaggcgggggactccgcacattgtgccacatgcagttccaccgataatctatggatctgcttgatttgcggtaacgttggatgtggccggtacaactttaagcatgctataaagcattatgaggacactttacattgttttgctatggacatacgaacgcaaagagtgtgggattatgcaggagataattacgtccatcgactagtgcagaatgaagttgatgggaaactagtagaagttggcgggtccggtaatgatattaccaatgatactggtaattctgatgaactacaaaacccggattatgacatcaggggtaaagggagtgaagggtcaagctctaataaaaaagatggagaactggcagcaaacttcttgagacatagggaataccatctagaatacgtgcaagtgctgatttctcaattagagtctcaaagagaatactatgaactgaaacttcaagaacaaaaccaaaatctttctgagaactcgaagctagaaagcctacaaaagtctatggaagatttgaaactgcagtttcaagctgctcaaaatgaatggcgtaagaaggaaatcatccagaaaaccaagctcgaagaagacaaactagtcattggggggttgcaggccaacttagatcatttgacaaaaaagcaagagcagctagagcaagagaacaataaattggccgaatccaagcagggtctagaagaacaggtcagagatctaatgttttacctggactctcgagaacaattcaaagacgctgatgatagcgtcaaagaaggtaccgtcttagtacaacagaccctgggaggagcccaggcatctaaaagcaagaagaaacgcaacaagaagaaaaaaccggggaagtga

SEQ ID NO: 1088 - DNA, 2802 bp, Saccharomyces pastorianus
atgagcaatgatccaccttctatagcggcattaccaggcacgcacactcttgataatggtgccagcaatagtgacaaggctgctgggtccaataacaacggcggtgacggattacgattgcctaggaccacggggactctgaacgtcaatgccttacagaatgacggcaatgccgccagtgaagttgacggatataaatctatggatcctgccaaaatcggggacacaagccaggacgacgacaatgtagttgtttcactagatgatcccatccaatttacacgtgtatcttcctcctctgtcatcagtggtatgtcatcatcgatgagtacacattctcacaaagatgaagctaaatctctggatcaagtcaccccaaatgtgaataccaataacatgacctcgaactattctgccgataacacattctccaccataaatgcgtccgaatcagaccaccagtttaatgacactctcatatcaaaactgtcgctgacagattccacggaaactatagaaaacaataccacctcaaggcaccagccgatgattgcatcttccactgccaactcgaataacagttcgaccgatatacgaagagctacaccagtatccactcccatcatttctaaaccatcattgacggccactccaaggcaaatcagttcagcctctcattcatttgcggaccttaagcacaagcaacataaaccaaaggccaaaccgtccaaacctgaattgaaaactaaactgacacctgtgaagaataattattcaccaaagaatacgttgaaaaacccatcgcctcctaaaaagcagatcgaaaagccatactattctctctctacaaaaaaaaggaaaagcggctcaagcagtggcacactaagaatgaaagacgttttttcgtccttcgtgcagaatattaaaaggaactctcaagatgataaaagagcctcctcgtcatctaacaattcttcctcatcatctacaaccacctcattaagaatctctaccccatacaatgccaagcatatacaccacgtaggtgtagattctaaaactggtgagtacacagggctaccagaagaatgggaaaaactgttgacttctagtggtatttccaaaagagaacaacaacaaaatatgcaagccgtcatggacattgttaagttctatcaagatgtcacggaaactaatggagaagataaaatgttcaagactttcaacaccactacaggattgccggggactccatacgcttcgtcgccttcttccaacactgtcaataaatttcctccgccaacaaccgattcccataattatagttccaggggtggcactccactaactaataatgtcatgtctccgaacttgaatacggattctgggccatcgaacgcaaaatttattccaagtagacccgctcccaagcccccttctgcttccacttcaactccgatattaaaatcacccgtcacaaatccatctttcgccaatgtctctccttcacgacaaaatcatatgcccgcaacccctagtagaaccagtacgactagatcatcaatatcaagacatgctactttgaaaaaggaagagcaacctctacctccaatccctccgaccaaatctaaaacatcaccactcatttcaacacctccaccgcccccacaggcgccaccgtcgccatctccattgccacagaaaccaacgataacaccctctaccaaaccggttcaaacaagaagcttgtccaaagaactaaatgagaaaaagagagaagaaagagaaagacgtaaaaaacaattatacgccaagttaaacgaaatctgctccgagggtgacccaagtttgaagtacgctagtttagtgaaaatcggccaaggtgcctctggtggtgtttacaccgcttatgaaataggcacaaacgtctcagtggccatcaagcaaatgaacttggaaaaacaaccaaagaaggaattaatcatcaacgaaatcctcgttatgaagggtagcaaacaccccaacatagttaatttcatcgattcttatgtcttaaagggcgatctttgggttatcatggaatacatggaaggtggctcattaactgacgtggtcacccattgtatcttgacagagggccaaattggtgctgtttgtagagaaaccttaagtgggctgaaatttttacattcaaagggtgttcttcatagagacatcaagtctgacaacatcttattatccatggaaggtgatatcaaattaacagatttcggattttgcgctcaaatcaacgaactgaacttaaaaagaaccaccatggtgggaacaccgtattggatggcacctgaagtggtctctaggaaagaatatggccccaaagtggatatttggtctttgggtattatgataattgaaatgattgaaggcgaacctccttatctaaacgagactcccctaagagcactgtatttaattgctacgaacggtacaccaaagttaaaggaaccagagaatttatcgtcatacttgaaaaaattccttgattggtgtttatgtgtggagcccgaagaaagagcaagtgctacagatttacttcatgatgaatacattaccgaaatagccgaagccaattcttcgctagccccgctagtcaaattggcccgattaaaaaagctagcagaaaacatggatgctgatgaagataatgatgatgacaacaacgaacataacaataacgcaaacgattatgacaacaataatgataacaaagaaattgtaactgaaaatgataaacaaaagtaa

SEQ ID NO: 1089 - DNA, 1236 bp, Saccharomyces pastorianus
atggaaccagctacagacaaatctatcgatagattagttgtcaatgcgagaacaagaagacgtacctcttctgtagggaagattgatctgggtgatacagtgcctgggtttgccgctatgcatgagactacggcgtccaagaatgaggctaagaagagaatgcaggcattaactggggactctaagaaagacagtgatcttctgtggaaggtttggttctcatatagagaaataaactatcgtcatagttggttatcaccctttctcgtactcgtatgcgcatatagtgcatacttttcatccgggaatagaacagaaacaaacccattgcatatgttcgtagccgcatcttatcaggttggtgatactgattcatatggaaaaggtataaaggatttgtgttttgtgtttttctacatgattttcttcacctttttgcgtgaattcttgatggatgttgtcattcgaccatttacgattttcttgaaggtcgactctgagcatcgtcaaaaacgtatgatggaacaaatgtatgccattttctattatggtatctcaggtccctttggcctttatatcatgtatcatagtgatttgtggctgttcaagacacttccaatgtacagaacgtatcctgatataaccaatccatttttgttcaaagtgttttacttaggacaagcagcgttttgggcacaacaagcctgtgtccttgttttacaattggaaaagccaagaaaggattacaaggaattagttttccaccatattgtgacgctgttattaatttggtcatcgtatgttttccattttaccaaaatggggttaccaatttatatcaccatggatgtttcggattttttcctttctttgtctaaagtactaaactacttaaattccatgttcacccctgttgttttcggtttgttcgtgtctttctggatttatctacgtcattttgtgaatataaagatactatggtctgtcatgacggaattccgtcatgagggaagttatgtgttaaattacgccacgcaacaatacaaatgttggatttcgttgccgatcatattggtgctaatcggagctttacaattagttaatttgtattggctgtttttaattctcagaatcttgcatagattgatatggcaaggcattcaaaaagatgaaagaagtgaaagtgactccgccgggagcgacggaaaggaggaatccaaggaaaagcatgaatag

SEQ ID NO: 1090 - DNA, 1398 bp, Saccharomyces pastorianus
atgtcatcatccatgacagaaatgagaaatgccgtattaagggcgacagatcctaaattaagaactgataactggcagtatattctagatgtttgtgatttggttaaagaggatcctgaagataatgggcaggaggtcatggatcttatagagaagaggctggaacaacaggatgccaacgtaattttaaggacgctctctttgatcgtttcactcgcagaaaattgtggttcccgcttgagacaggatattagttcaaaacattttacttcattgatatttgcgctcatcgaaagccattcggtgcatattaccctaaagaaagcagtagctgatatggtcaagcagctgtctgactctttcaaagatgatccgtcattgcgtgctatggacgatttgtatgacaaaattaagagaaaggcaccttacttggtaaaacaacccaatgtgccagaaaagcgtaacatgggcacctcaactgacagttcagacgacgaggaattacaaaaagcgatgaaaatgtctttgttcgaatacgaaaagcagaaaaaactacaagaacaagaaaaagaaagagtttgcgagcctccgcagcaacagcagcagcaacagcagcaacagcagcagcaacagcagcaacagcagcataatcagcataaccagacttctgcagcattagggcagactgttgtgagaagagttcgagccatgtatgacttgtccactaacgaacctgatgaattatcatttcgaaagggtgacgtcatcacagtactggaacaagtatatagagattggtggaagggagctcttcgaggaaggatgggtatattccctttaaactatgtaacgccaattgctgagccatcgaaagaggaaacagaaaatgagagaaatagagaggcaatgatattttcccaaaaaagtactgtagatcaactacataattctctaaacactgcatctaaaacgggaagctcaaatgaagtactacaggatcctcatattggcgatatgtacggttcaataacgcctttaagaccgcaagttacaagaatgttgggtaagtatgcgaaggagaaagaggacatgctctccttacgtcaagtactcgcaaacgcggaacacacatataatgagctaatggaccgcgcagcaaacgtttatatcccacccccagcagcagcggttgcagctccttactccggaatgcccaacactaatgtcgctccggcaatgccacctcagaggaaaagttatccaaaccctgattatgcatcgtactccttgaatcaacatacacataattctgtgaatagtaagcccgacgttccgcagtatggttatgacaatggatactcaattactagtcaaccaccacccggttatgagcaatag

SEQ ID NO: 1091 - DNA, 1074 bp, Saccharomyces pastorianus
atgacgcgagataatcaagattctaacaacagggctagccccacaaataagtctagtgcacagaagacaccgtttgataggaactcatttgactatattgtacgatcaggattggccggaggtatatcaggttcatgtgcgaaaacattaattgcacccttagatagaataaaaatcttattccaaacatctaaccctcattatacaaaatatgcgggctcattggtaggtttagtggaagcagccaagcatatatggatcaatgatggtataagagggttctttcagggacattcggcaactctactaagaatatttccctatgctgctgtaaaattcgttgcttacgagcagattaggaacactttaattccttcgaaggagtttgaatcgcattggagaagattagtgagtggttctttggcagggttatgcagcgttttcattacgtaccctttggatctagtgagggttagattagcatatgagacagaacataaaagagtaaagctcaggaaaataatcaaaaaaatttacacggaaccagcttcaaccacgctaataaaaaatgagcatctacccaactggttttgtcattggtgtaatttttacagaggttttgttccaacagtactcggaatgattccatacgcaggcgtatctttttttgcacatgatttgctgcatgacgtgctgaagagtcctttctttgcgccctattctgtattggaactctctgaagatgatgaactagaaagaatacaaaaaaagcagagaaagcctttgcggacgtgggctgaattgatctcgggtggattagcaggcatggcatctcaaacagccgcatatccattagaaatcattagaagaagactgcaagtaagtgctttatcgccaaaaaatatgtatgaccataaattccaatcaatctctgagattgctggaataatttataaggaacgtgggttacgcggattttttgtaggtctaagcataggttacatcaaagtgacgcctatggttgcatgtagtttcttcgtctatgaaaggatgaaatggaatcttggcatttga

SEQ ID NO: 1092 - DNA, 1290 bp, Saccharomyces pastorianus
atgacaaataatacgctgaaagtaattgcagctacggctcttttgtcggtgttttcaacacggttagctaaggctgcatggaaggagtatacgctttcacatgcggctaacaagaacaagatcgcatcgcaacctcgtcaatatgacaaaaacttatttagggagcaactagctcgtaactacgcttttctaggagaggaaggtatgagaaaggtcaaagaacaattcatagttattgttggtgctggagaattggggtcctgggtatgtacaatgttaattcgctcaggatgtcaaaaagttatgattattgatccggaagatatatctgttgaatctttaaatacacattgctgtgcaacattattagatgttggaaaaccaaaagtcgagtgtttgaaagagcatttgtccaagatcgctccttggtgcgaaataaaagcaagaaccaaagcgtggaccaaagaaaattctgaagaattcttttttgcagatggcgattctccaactttcattgtggattgtctagataatctagaatctaaagtagatttgttggaatatgcctataataacaaaatcaatgtaatatcttctatgggcattgccactaagtctgatccaacccgtgtaagtataaatgacatctctatgactgaatttgaccctatatctcgttgtgtaagaagaaagttaagaaaaagagggattatcacagggattccggtggtttttagcaatgagatgcttgatccacgcagggacgatgtactgtcctctgtagatggagagcactgtgctatcaatgctagtagagatgaagccctgaggcacttaccgaaattaggaaccatgccaggcatttttggtttgagtattgcgacatggattttgacgaaggtttcgggatacccaatgaagaaaaatgaattcaagaataggctaaaattccatgacggcatactagaaactttccaaaatcagatggctcgattaaatggcggtaaagaccaatcatctgtgattgggttgaaagaagtcgggtacatagttgaagaaatgtttagaggcaaatctcctatcagcgggtactctacaaagctagctctaacaaaatgggaacctaacaaagaggtgtctttgaccaaccttgttcttttaacgaaagacgaacaagagattcacgaagaaagggttttgcgagatggcaacaaactaactgatgtttattctagtgaagttttgaacgctataaaaaggactttcaaagaggaagagtattattcttag

SEQ ID NO: 1093 - DNA, 1359 bp, Saccharomyces pastorianus
atgaatgccctaaaatatttttcgaatcatttaataactgcaaataaacctaagaaaacaataaatgttgaggtgacaaaggtccaagactcacttagtgcttcaaatgggactttcgatacacgtgccagtaacattgaaaacgatcacaccgtcaaagcgaaacatctgcgcagctcttccacagagggttccaacgaatccaagcaagatgaaaaatacaacggtcctgtttcgacaaagccaaaagcattatctcgtattttaaaagagaaaattgtgtcaattctatgggcaatactacttttccttccatattacttgataattaaacctttgatgtctttatggttcgtttttaccttcccattaaacgtgatcgaacgtcgtgtgaaacatactgataagaggaataaggaatcaggcgatagtgggcatgagtcgtctacagattcaagtcatagtggtgatttcaatgagaaacaagatgctgaaaatcggaatctaaacacaattcctgaaatagtggaagatgatttgaacgctggtgatgagatcattctacaaagagataatgttaaaggttcattattaaaggctgcagatgacgcacaatcagccaaatcaaaatcaagaaggtactctaaatccgaaacatcacttactaatcattcaactgctaatgccgtatttggcacaaaacgtatggggaggtttttgtttccgaaaaagctcatacctaaatcaatattaaatacacaaaagaaaaagaaattggttatagaccttgacgagaccttaattcattccgcttctcgaggtacaacacatagtaattcttctcaggctcatttagtggaagtaaagtttggaataagcggaatttctacattatattttattcacaagagaccctattgtgatttgtttttaacaaaagctagtaaatggtacgaccttattatttttacagcatcaatgaaagaatatgctgatcctgtgatagattggttagaaggctcctttgcagctagtttttcgaagagatattaccgttcagattgtgttttgagggacggtgttggctacatcaaagatctaagcattatcaagagttctgaagaaaatgggaaaggcagtcctctgtcttctttggatgacgtaattatcatagataacagtcccgtaagttacgcgatgaatgtagataacgcaattcaagtagaaggttggataagtgacccgacggatacggacctactaaacctattgccatttttggaagctatgagatactcaaccgatgtcaggaatatactggcactgaaacatggagaaaaggcattcaatatgaactag

SEQ ID NO: 1094 - DNA, 1419 bp, Saccharomyces pastorianus
atgggttgcacagtgagcacacaagcactggatgacgaaagtgatccgtttctacagaataaaagagccaatgatgctattgagcaatcattgcaattagagaaacagcgtgataaaaatgaaataaaactgttactgttaggtgctggtgaatcgggtaaatcgacagttctgaaacagttgaagctgttgcatcaaggcggtttctcccatcaagaaagattacagtacgctcaagtgatatgggcagatgctatacaatcaatgaaaattctgattattcaggcaagaaaattgggtatccaactagattgtgatgatccagtcaataacaaagatttatttgcatgtaaaagaatattactgaaagctaaagctttagattatattaacgccagcgttgctggaggttctgaatttttgaatgattatgtactgaaatattctgaaaggcacgaaaccaagaggcgtgttcaaagtactggaagagcaaaagcagctttcgatgaggacggaaatattgctaataaaaggagtgatattgcgaacggtaatgatacagtggcaggtagtgatgaagacaataaaaacagtagtagtaggctcaatctacaggacatttgtaaagatttgaatcaagaaggcgatgaacggatgtttgttaaaaaaacgtcaagagaaagtcaattgcaaaacaaagggaattttattcacgaggacatcgctaaggccataaagcaactttggagtaatgacaaaggtattaaacagtgtttcgcacgttccaacgaatttcagttagaaggatcggcagcgtattatttcgataatattgagaaatttgctagcccgaattatgtctgtacagacgaggacatcttaaagggccgtataaagactacgggtattacagaaactgaattcaacattggttcttccaaattcaaagttcttgatgctggtggacagcgttctgaacgtaaaaagtggattcactgttttgaaggaattactgcagttctatttgtcttagcgatgagtgagtatgaccaaatgctgtttgaagatgaaagagtcaacagaatgcatgaatcaataatgttattcgacacattattgaattccaagtggtttaaagatacaccattcatcctatttttaaacaagattgatctattcgaagaaaaagtgaaaagcatgcccataagaaaatacttccctgactatcaaggtcgtgttggcgatgcagaagcgggcttgaaatattttgaaaagatattcttaagcttgaataagacaaataaaccaatttatgtgaaacgaacatgtgctaccgatacccaaaccatgaaattcgttttgagcgccgtcactgatctgataattcagcagaatttaaagaagagtggtattatatga

SEQ ID NO: 1095 - DNA, 282 bp, Saccharomyces pastorianus
atgtctttcctaggattcggcggcggtcaacctcagttatcatcccagcaaaagattcaagctgcggaggctgaattggatttagttactgatatgtttaataagttggttaacaactgttataagaaatgtatcaatacttcctactccgagggtgaactaaacaagaacgaatctacgtgcttagacaggtgtgtggctaaatactttgaaaccaacgttcaggtcggtgaaaatatgcaaaaaatgggccagtcctttaacacggcaggtaaattttag

SEQ ID NO: 1096 - DNA, 1644 bp, Saccharomyces pastorianus
atgcctatcctatcactatcctcaacacgggacaacgtgtttgcaaaaatatacgattatctcaaggtattagttcaacaggtgattgtgccccatttagaggatgagaagtcgcaaaaacgtactccttccgtcaaaagtgaagccaccatacaggaacactctcacaaagactattctgctcccaaagatcccaaagagagcgacccgagtgatgtttgccagttatttcccagccagaataacaatcagttgagcgtgacgtcaaaatcatcagttgttccttgcgctttgaactttgaaagcctgcaaacacccttttctattgacgtggatgaaaacggcaccgtaagaacgcaattgaacttgggtgaaataatttcacagggtcctgttaacaatgacctaacaaagtcacagaatgatttgttaagctcacccttactcgatgaatcctacataaataatgaacagtataaagcccttttcccctctagctttcttccgataacacctataagtaatgtgattacccctgcatcaaagaaaagtgttgacaactctccgctatccgatggcgttcagggtgctacccacgaatcgtccgaaactttgccatacatatgccactactgtgattccaggttccgaattagagggtacctaacacggcatataaaaaagcatgccaaaaggaaagcttaccactgtccattttttgatggcagtatctcacaagagttgcgctgccacaattcaggtgggttcagcagaagagatacgtacaagacacacctgaaatctagacacttcaactatccagaaggtattaagcctcaatgccgtaacaaatcttctggagcgtgtgctcaatgcggagagtattttagcagcagtgagagttgggtggaaacccacattgaagctggaagttgcaaggggttaccagaaggatactcagagagaatacgagagaagaagaagacgtccaaaatgaaaatgataaagaccttagacggccaaacaagattcatttcttcagaggaaagtgttcttgaaccaagagggttactaaatggaaatcccacggaagcagtaataaatgccaagcagtcccacagagacgacaccctgccgacaaaaacagggggaaatgaaatcgctacgaacactcaatggttcgaacacaaacaaatccccaaaccttcgcaaactacaacgaaattagaatcacaggtaactacggatattcaaaactccaaaaatgcgccaattatatctccccccatcatgtcacctcaaggcacatctcttgtagcccaggaatatcaatcatcaaaatatacactacatatgggctccccagccttatcctccgtttcatcagcattatctccactttcaggggacccaatcgcaagtgcggaatcagacaaactatacccattagactcggagcaatcgtttttagaatcggacgggatggacgagcacacaattggccacctacagaagagtaacatgatctccataaacgagatattagaaaagcaaatgaatttcgagttactagggcgaaatcacttgaaggaaacgcaagattatttagctttatacaagaaggctagtggggccgaattttag

SEQ ID NO: 1097 - DNA, 1593 bp, Saccharomyces pastorianus
atgtctgctaccaagtcaatcgttgcagaggctttggaatacgttaacattggtttgagccattttatgggcttaccattggcccaaagaatttctttggtcataatagctccatttatctacaatatcgtatggcaattactatattctttgagaaaagaccgtccacctctagttttctactggattccatgggtcggtagtgccgttacgtacggtatgaagccatacgaattcttcgagcaatgccaaaagaaatacggtgatattttctcgtttgttctattaggtagagtcatgactgtttatttaggtccaaagggtcacgaatttgttttcaacgctaaattggctgacgtttccgccgaagctgcttacgctcatttgactaccccagttttcggtaaaggtgttatctacgattgtccaaactctagattaatggaacaaaagaagtttgttaaaggtgctttgtccaaggaagctttcaagtcttacgtcccattgattgctgaagaagtttacaagtacttcagagattccaagaacttccgtatgaatgaaaaatcttcaggtaccattgacgtcatgattacccaaccagaaatgaccattttcactgcttcaagatctttgttaggtaaggaaatgagacagaaattggacaccgactttgcttacttgttcagtgacttggataagggtttcaccccaatcaatttcgtctttccaaacttgccattagaacactacagaaagagagaccatgctcaaaaggctatttccggtacttacatgtctttgattaaggaaagaagaaagaataacgatattcaagatagagatttgattgattccttgatgaagaactctacttacaaggacggtgtcaagatgactgatcaagaaattgctaacttgttaattggtgtccttatgggtggtcaacatacttctgctgccacttctgcctggattttgttgcacttggctgaaagaccagatgttcaagaagaattatacgaggaacaaatgcgtgttttggacggcggtaagaaagaattgacttatgatttactagaacaaatgccatttttgaaccaaactatcaaggaaactttgagattgcaccatccattgcactctttgttccgtaaggtcatgaaagatatgcacgttccaaacagttcttatgtcattccagaaggctaccacgttttggtttcccccggttacactcatttaagagacgaatatttcccacacgcccatgaattcaacatccaccgttggaacaacgatgcctcctcttcttactctgttggtgaagaaatcgattacggtttcggtgccatttccaagggtgttacttccccatacttgcctttcggtggtggtagacatagatgtattggtgagcattttgcttactgtcagttaggtgttttgatgtctatcttcattagaactatgaaatggcgtttcccagaaggtaagagtgtcccatctcctgatttcacatctatggttactcttccaattggtccagccaagattatctgggaaaagagaaacccagaacaaaagatctaa

SEQ ID NO: 1098 - DNA, 702 bp, Saccharomyces pastorianus
atgtttgccaaaacagcagctgtcaacttatcgaaaaagggagggttatcgttgctttccaccacagcaaaaagaactaaagtcactttgccagacctaaagtgggattttggtgctttggaaccttatatttcgggccaaatcaacgaattgcattacaccaagcatcaccaaacgtatgtgaacggattcaacactgctgtagagcaattccacgaactctcgaatcttctggccaaggagccaagcccagcaaacgcaagaaaaatgatcgctatccaacagaacatcaaattccacggcggcggcttcacaaaccattgcctgttctgggaaaacctggctccagagtcacaaggtggtggtgagccacccaccggcgctttggcaaaggccattgacgaacaattcggcagtttggacgagttgatcaagttgaccaacacaaaactagccggtgtgcaaggttccggatgggccttcatcgtcaagaacctgtccaatggaggcaaactggacgttgtccaaacctacaaccaagacaccgtcaccggtcccttggttcctttggttgccatcgatgcctgggaacacgcctactacttgcagtaccaaaacaagaaggtcgactacttcaaaaccatctggaatgtagtcaactggaaagaagcatccagaagattcgacgccgaaaagatctaa

SEQ ID NO: 1099 - DNA, 1572 bp, Saccharomyces pastorianus
atgagtgaagattttttgcatccgccgttccagacgtatccttcaaaggacagtgaagggaaaaaacatattgtcattgtaggcggtggcattattggttgctgtacagcatattacctgacacagcacccaagtttcagtccttccactcatcacattaccataatcgaatcaaggcgtattgctggaggagcttctggtaaggcaggcggtttgcttgcatcttgggccttcccgcatcaaatcgtgcccctgagtttccaactacatcaggaattaagcgaccagtatgacggagagaacaactgggactacaggagactaacgaccgtctctttagaagctgatgtgcgggaggaagtactcaaaaactacgagaaactgagcaagaaggcatataaccttaatgtcccacctccaaagaaaaaaccgggctttatatccaataagtttaacatcggagactcgagctcatccttaagctcttccgcatcttcttcaaagaacgaatacactagcaacgaagaggaaggattggagatgcacgcttctggctcagtgcctagcttacattccttaacaaatgaacgtatgaagagccatacaaatagcatgtccgaccttgattctgtcagtcccgccgagcaattaagggaaagcaatattcataatcctttgccaactgatttgagctggataagaagagaattggtaaacgattggtcatcgctaggtggcaccgacactacggcgcaacttcacccttacaagttcacccattacatgctgtcgaaagcaatggaaacaggtgctgttgatcttttactggggaaagtggtgggagtcaagcgtgacgaaatggactgcgttcgttcccttacgtaccttccctcggtagtgaaaaatcgcaggaatagtaaaggccaagcagaaagtccagagattaaactgggtaccatattcaacgatgaaaatgctaaacccatcgaaatcaatgatattcaacagatcgtgttgagtatggggccctggacgtccaaaattctgaaagattgtccaatctctggattgagagcgcattctatcactatcaaaccaagcgaaaagacagtggctccgtatgccatacttgctgaattaaaagttaatgagcgtgaatttttttcccctgaaatgtatgcaagaaaagacgaagtgtatgtttgtggtgaaggtgacactttggtaaacatacctgaaagctcggatgacgttgaggtggttaccgggaaatgtgatgagctgtatcattacgtatccaagttgtccccaacgctatcaaagggccatattttgaggaagcaggcatgttttctaccggtgttgaatgttcctacaagttcaggtcccctgattggggagaccaacgtaaaagatctctatatcgcaagcggtcactcctgttggggtatcaacaatgcgcccgcgacaggcaaattaatggcggaaattctacttgatggtgaagcaacttctgccgaaatctcaagtttggatccaaagctatatttcgacgctaccattctctcataa

SEQ ID NO: 1100 - DNA, 1341 bp, Saccharomyces pastorianus
atgattgtaaggcgtttcttttcaatttctagtcgcaagtccattttgaagaagcctcagtatgatgtgaaaaggataatagagaatattccccagtatcaaacttcgattcaaaacagagagctggtagaagctgaaaatattacatcagacttacaactgctgggtgagcgatatcaatatatcaaaaagattgacaaagccattgcagatattcaaatacaaagaaaatcgattgaagcacaaattagaagggatagaacaaaaatcacagaatattcagctgccttgaaagttcttaaagagcaatatcaagacaaggacggagaattgtcagagttgaaaataaaggtctctgggacttgcgaagcacttccaaatctcttggatcccacggttccattaaagaagccacaggttgtccaatggataaatcctttgaaagagtatgaaccgtcagaaacccaggcgcatgtagatatcatgcttaaaaagaaaatgctggacttgcagactgcctccaacattacgggaacatcatggtactacctactgaacgatggagcacgccttgaacaagctttagtctcatatgctttaaaaaaagcaaacgaaaacggatttgcaagctgtgtgcctccaagtattacgaaaagagagttgattgatgcctgcgggtttaatccaagagacatgaacaacgagaaacaaatttatgggctccaagatacgaatttaggattagttgccactgcagaaatatctatggcgggactaggcgcaaataaagttcttgatctaagctctgctgaaggttctaaaaaacttgtaggagtgagcagatgttacagagccgaggcgggcgcaagaggtaaggatacgaagggtctttatcgtgtccacgagtttactaaagtggaactcttttgctggagcaagccggaaaatagtacaaaaattcttgaggaaataaaacaactccaaacatcaattgtcgaggaactaggattatcagccaaagtgttgaatatgccttcaaacgatcttggtaatcctgctttcaaaaaatacgacattgaggcttggatgccaggaagaggtaaatttggtgaaattagtagcgcctccaattgtaccgattttcaaggtagaagattgaatacaaagtacaaaaaggatgacacaggaaagcttgagtatgtgcacacactgaacggtactgcaatggcagttccaagagtgatgattgccctggtagagaacttctatgatcccagaactggcgagatatttgttcccgaatgcttgagggagtttatgaatggccagcaatatatttaa

SEQ ID NO: 1101 - DNA, 717 bp, Saccharomyces pastorianus
atgccgatcaacattcgcagagcgacaatcaatgacatcatttgtatgcaaaatgccaaccttcataacctgcccgagaattatatgatgaaatattatatgtatcatattctttcttggccagaaacttcctttgttgctacaactacgactttagattgtgatggcgcagatgaacaagatgaggaagataagttggaattgaccctggatgggaccaatgatggcagaaccatcaaattggatccaacgtacctggctcctggcgaaaaattggtaggctacgttttagtaaagatgaatgatgacccagaccagcaaaatgaacctccaaatggtcacatcacgtctttaagtgtcatgagaacatatagaagaatgggaattgctgaaaatttaatgagacaagccttatttgcattgagagaagtacaccaagcggaatacgtatcattgcacgtgagacaatccaacagagctgctttacatttatatagagacacattggcctttgaggtgttgagcattgaaaaaagttactaccaagatggtgaagatgcatacgctatgaaaaaagtattaaaattagaagagttgcaaataagcaatttcactcaccgccgcttgaaagaaaatgaagaaaaactggaagacgacttagaaagtgacttgctagaagatatcataaaacaaggtataaatgatattgttgtataa

SEQ ID NO: 1102 - DNA, 897 bp, Saccharomyces pastorianus
atggccccaaaaaagcgcttcagaccactagaaatagggtcaccgaaacattctaaaaggaaagttcaaaaaccacttcaggagaaaactacaaacttgagagtttcgccatttgccctctctagaattgataaagatgctaagagtaaagagtccgctaaggttgagaaaacgagaaaggtgatctcagaaaacatatttaattcaaaacacgttgatttaaggctggagactcctcgcccgggcttgaaatttgttagcgaccctcaaaagggttcaaaagctccagatgtccgatatctaaaaaataaatccagtcatgccttgaaagatgaaaggcaagcaatagtgtcgccctcctttgataaatcattgaagtttgaggacatagagcagcctccaaaatccacttcaacaccggtttccgctcagccttctcaaataagagtagaaagagaaccatccatgtttccgctcccgtattatattgctccctcgcccatgtataacttcaacccgtatcaaaattttacagggaaccctgtatttctgacaccgtgctataatccaagtgtgaattatgcaatccccgttcaacaaccggaattgctttatccaaatggtaacgtgtacgattcaccattgtttgacaaagtaaggcacccacaccaaataaatgacccagatagcttgaatagagaacaacattacgaataccgtccaatatttcctatctcgatttctaacaacggggattttgttgggcaagagacacctagaatagcatcaaagccaagcaataagagattctcaaactctcaagatgttgattattctgattatgaatcgagcggacagaatgcaacctatcatgatagcaaatctcctcttgattag

SEQ ID NO: 1103 - DNA, 2061 bp, Saccharomyces pastorianus
atgcctgtctccgaagcctttgctaagttgtgcgtaactgaaaagcctgctgccgaatctgccgttgcagtgaagtccctggttttcaagccaaagacaccaaagtctgccactcccgtccccatcgtagtggtggccttgcagtctaccactactggctctccattaattgcgagcgccacttctaccaaggatccaagattagctcgtgatgatttggtcaagcaagcgttccaatctgagtctgccagagctttcattctgggcgatttggctaacgccacaaccgatttccacttactgattgaccaagagttgagcactgtggacggtgacaccgttttgcagctaaacgataccacgttcatgaagaaggctgacatgattaagtttctaagcgattttgaaaaattccagaaggtggttgatttctctcaggaagtgaccaaggaggccgctaccgagggcaagaaacaacagaagaagcagcaaccttctaaggctgctgcagctgccgcagctgccgctttggaggacgccaaattgatcggcatcaccgtagacaaggctttggacttcccgggctggtaccaacaaatcttgaccaaaggtgaaatgttggactactatgatgtttctggttgttacatcttgagacctccttcttattccatttgggaaagcatccagagatggtttgacgacaaaatcaaggccattggtgtgcaaaacgcatacttcccaatgtttgtctcctcccgtgtcttggaaaaggaaaaggaccatgtcgaaggttttgctccagaggttgcctgggtcaccagagctggttcttccgaattggaagaaccaatcgcaatcagaccaacttctgaaaccgtgatgtacccctactacgccaagtggatccaatcctacagggacttacctttgaaactaaaccagtggaattctgtcgttagatgggagttcaagcaccctcaacctttcttgagaaccagagaattcttgtggcaagaaggtcatactgctcatttgacttctaaggacgctgaagaggaggtcttgcaaatcttggatttctacgctggtgtttacgaagaattattagccgttcctgttgtaaaaggtagaaagactgaaaaggaaaaatttgctggtggtgattttaccacaacctgtgaaggttatattccacagaccggccgtggtattcaaggtgctacctctcatcacctgggccagaacttctccaagatgttcaacttgtctgtggagaacccattaggttcagaccacccaaagatctttgcttaccaaaattcctggggtctatccacccgtgtcatcggtgtcatggtcatgatccattccgacaataaaggtctggttatccccccaagagtgtctcaataccaatccgttgttattccagtaggtatcacaaagaagacttctgaagagcaacgtaaacacattcacgaatccgccagaagcgtggaagctcgtttaaagaaggtcggtattagagcctttggtgactataacgataattatactccaggctggaaattctctcaatatgagttgaagggtacaccaatccgtattgaattgggtcctaaggatattgaaaagaaccaagttgtcgttgtccgtagaaacgactccaagaaatatgtcgtttcccttgatgacttggaaactcgtattccagaaatcttggaagagatgcaaggcgatttattcaaaaaggctaaggaactatttgacactcacagagttgtcattaatgaatggagagattttgttccagctttgaacaagaaaaatgttattttggctccatggtgtggcatcactgaatgtgaagaagacattaaagaatcttctgcaaagagagacgatggtgaagaatttgaagaggacgacaaggctccaagtatgggtgctaagtctctatgtattccatttgaccaacctatattgaatgatggtcaaaagtgtatcaagtgtgaacgtactgctgttaactactgtatgtttggtcgttcttattag

SEQ ID NO: 1104 - DNA, 1449 bp, Saccharomyces pastorianus
atgctaaggaatagcgttaagagattgtattccaatgtcactagaacagaaaatttcaaactttcgtcactctcgaacgggttaagagtggccacatccaattctcctggacacttcagtgccttagggctctatatcgatgcagggtctcgttttgaaggtagaaatttgaaaggttgtacccatatcctggacagacttgcgttcaggtcgaccgagcatatcgaggggagggcgatggctgagacgcttgagttattgggtgggaactaccagtgtacatcgtctagggaaaatatgatgtatcaggcctcggtatttaatcaggatattggtaagatgctccaattgatgtccgagacagtgaggttccctaagattactgaacaggaactacaagaacagaaattgtcagcagagtacgaaatcgatgaagtttggatgaaacctgagctggtgttgcctgagcttttacatacggcagcatactctggagaaacattggggtcccccctgatctgtcccagagaacttatttcttccatttccaagtactacttaatggattacaggaataagttttacactccggaaaatactgtcgcggcatttgttggaattccccacgataaagccttggagcttgcagaaaagtatttgggcgactggcaatctactcacccccaaatcagcaagaagacctcccattacaccggtggcgaaacttgtatcccaccagcacccgtttttgggaacttgccagaattattccacattcaggtaggatttgaaggtcttcctatagatcatccagatatttacgctttggcaactttacaaaccttgcttgggggaggcggttcattcagtgcgggtggtcccggaaaggggatgtattcccgtttgtatacacatgtcctaaaccaatattattttgttgagaattgcgtcgcattcaaccactcttattctgactcaggcattttcggtatctcactatcttgcatacctcaggcagccccacaggcagttgaggtgattgcacaacaaatgtataacacatttgctaacaaagatctgaaattgactgaagacgaagtttctagagccaaaaatcaattgaagtcttcactgctaatgaatttagagtcaaaactcgtggagttggaggacatgggtagacaagtcttaatgcatggccgtaaggttcctattgacgaaatgataaataagattgaaaatctaagaccagacgatatttcccgtgttgctgaaatgatatttaccggaaatgtaaataatactggtaagggtagaggtaaacctaccgttgttatgcaaggggatagaagcgcctttggtgacgtagagcatgtattgagtgcatatggactaggcaaaaatgcctccattaaaaacgatagctccaagaaaactggttggttttga

SEQ ID NO: 1105 - DNA, 1074 bp, Saccharomyces pastorianus
atggttcgcactttcaagatcaaagtcccagcttcttccgccaatatcggccccgggtacgatgttcttggtgtcggtctttctctattcttggagttagaagtcaccatcgactccagcctagctcacgagacaaacgacgaccccaacaactgtaagctgtcctacaccgaagacagtgaaggctactcctccgttccattgcgttcagatgctaatttgatcaccaggactgcactatacgttttgcgttgcaacaatatcagaaactttccatccgggactaaaatccacgtttctaacccaatcccactgggccgtgggttaggctcctctggtgctgctgttgtagcaggtgttattttggggaatgaagtcgcccagttggggttctccaagcaacgtatgttggactactgtttgatgattgaacgtcatccagacaacattactgctgccatgatgggcgggttctgtggctcatttctaagagacctgactccacaagaggtggagagacgtgaaatcccattgtctgaggtgcttccagaaccctctggtggtgaggacactggactagtccctccactaccccccaccgacatcgggagacacgtcaaataccaatggaacccagccatcaagtgtattgctatcatcccacaatttgagttgtctaccgctgattccagaggcattcttccaaaggcctaccctacgcaagatttggtcttcaacttgcaaagactggccgtattgaccactgctttgaccatggacccacccaatgccgacttgatctaccctgccatgcaagaccgcgtccaccagccttatagaaagacattgatcccggggctcacagagatcctatcctgcgtgaccccctccacctacccaggtcttttgggtatctgcttgtcaggtgcaggcccaaccatcttggccttggctactgagaacttcgaggatatctcgcaagaaattatcaacaggttcgtcaagaacggtgtcgagtgttcctggaagttactggagcccgcttacgacggtgccagtgttgagcagcaatga

SEQ ID NO: 1106 - DNA, 2988 bp, Saccharomyces pastorianus
atggtggacgaaagcgataagaaacaacagactattgatgagcaaccccagataaatgccgaaaagcaaacttcaagcaagaaggataaaaagaaggaggaagaggagcagctatctgaagaagatgcaaagcttaaagcggacttagagctacttgtcgagagactgaaagaggacgacgcatctttgtatgatgcatccttgaatgctttgaaggaatccattaaaaactccacaagttctatgaccgcggtccccaaacctttaaaatttcttcgtcccgcatacccagacttatgtgctatatatgataaatggacggattcgaatttgaagtcctctttagcagatgtgttgtcaatcctagctatgacatactctgaagatggtaaggatgattctttgagatatagattgctttctaacgtctctgatttcgaaagctggggtcatgaatatatccgtcatttggccttagagattggtgaagtatacaacgatcaagtggaaaaggatgctgaagatgagacatcctccgaggaatctaaaagcgaggaatctttgactaaagctggattcgatttctccaaggaagatatcttacgtctgtgtttagatatcgttccgtattttttgaaacacaacggtgaagaagatgctgtagacttgctcttagaaattgaatctattgataaactaccccaatttgtagatgaaaacactttccaaagagtttgtcaatacatggtcgcatgtgttccacttttgccccctcctgaagacgttgcatttttgaaaaccgcatattccatttatctgtctcaaaatgaactaacggatgcagttgccttggcagttagattaggagaagaagaaatgatcagatccgtttttgatgctactagcgatccagtaatgcataaacagttagcatacattttagccgcacaaaagacatcctttgaatacgagggcgttcaggatataattggtaatggtaagttgtcagaacactttttatatctcgctaaagaattgaatttaactgttccaaaggttccagaagacatctataaaagtcatttggataactcaaaatccgtattctcgagtgctggcctagattccgcccaacaaaacttggcttcgtcattcgtcaacgggtttctaaacttaggttactgcaacgataagctgattgtggataatgacaactgggtttataaaactaaaggtgatggtatgacttctgcagtggccagtattggatctatataccagtggaacttggatggtttacaacaactagataaatacttgtacgttgacgaaccagaagttaaagcgggtgcgttgttaggtattggtatttccgcttcaggtgtgcatgacggtgaagtcgaaccagctttgctgcttttgcaagattatgttactaatccagatgttaaaatcagctccgcggctattcttggtctaggaattgctttcgccggtagtaagaatgatgaagtgttgggattattgttaccgatcgctgcatccactgagtcacctatcgaaactgcagccatggcttcattagctctatctcatgtttttgttggtacttgtaatggcgatatcacaacttctatcatggacaactttttagagcgtacacctatcgaactgaagactgactgggtcagattcctggcgcttgcgttgggtatcctttacatgggacaaggtgaacaagtagacgatgttctagaaactatcagtgctatcgaacatccaatgacttcagctattgaagttttggttggttcatgcgcttataccggcacaggtgatgttttattgattcaagacttgttgcatcgtttaacccccaagaacgtaaagggcgaagaagatgctgatgatgatgaagaagatgctgaaggccaaactaacagtataagcgatttcttgggtgagcaattaccagaaactgccaagaatgaagaagttgagagtgaagtcgacgaaatggatgttgatgctgaaggagaggaaaccgaaatcaaggctgaagtcacagaaaagaaaacggatgaaactttgggaagtgaagagaaaaaagttgaagacggagaaaagggaaagtctaccgataaagataccgctgcagatgaaaaaactgaagacgaggaagaagaaaaagaagcaggtgtagtcgatgagcttgcgtatgctgttctgggtattgctttgattgcccttggtgaagatattggtaaagaaatgtctttgcgtcattttggtcacttaatgcattacggtaatgaacacatccgtcgtatggtacctttggcaatgggtcttgtttctgtatctgatccacagatgaaggttttcgacactttaacacgtttctcgcatgatgctgatttagatgtttcaatgaattctatttttgccatgggtttatgtggtgctggtactaacaacgcaagattagcccaacttttgagacagttagcaagttattactcacgtgaacaagatgctctgtttatcacaagattagcacaagggctattgcatttaggaaaaggtactatgacattggacttgtttaatgacgctcacgttttgaataaagtcacattagcatcaatcttaaccactgcagttgggttagtatcgccaagtttcatgttgcagcaccatcaattgttctacatgttgaatgccggtataaggccaaaattcattttagcattaaatgatgaaggagagccaataaaggtcaacgtacgtgtcggacaagcagtggagactgttggacaagcaggtagaccaaaaaagatcactggttggattacacaatctacacctgtcttattaaatcatggtgaaagagcagaactagagactgatgaatacatcagttatactcgtcatattgaaggtgtggtgattctaaagaagaaccctgattaccatgaagaagagtaa

SEQ ID NO: 1107 - DNA, 2457 bp, Saccharomyces pastorianus
atggaggacggtggagaagaagtagagcgcattcccgatgagttgttcacgtcaaaaaagaagcaattgttagatagactcataagagtcggaataattctcgtgttcctggtatggggtaccgttttagtgctgaaaagcataccataccattcgaaaataccagattatcacgaacccaaccctgactacacaaaggatggaaaattaaaagtatcctttgctaacgttagaaacaatacgtttttgcccaaataccatgacctgcagtggattaatgccattggaacggaagagagtgacttgggcctctatgttacgtttatgaacgatagttatgtgatcaaatctgtttacgaagattcatatcatgacgttcttttgaaggggaaaacctttatccataatggtcaaaacctcacagtgcagtcaatgacagcgtctccggacctcaaacaactgttgatcaggacaaacagtgtccaaaattggaggcactccacctttggttcttattttgtctacaataaagaaagttcatcatttgacttgattggaaacgacgtagctttggccatatggtcccctaattctaacaatattgcatacgtgcaagataacaatatatacgtctattctacagaatcgaggaaaactacacgggctgtaactgatgacggaaatcccttcctcttcaacggtaagccagattgggtttacgaggaagaagtctttgaggacgacaaggcgttgtggtggtcaccaactggtgattatctggcgtttttaaagatcgatgaatcagaagttggtgagttcattattccctattatgtccaaaatgataaagatgtatatccagaaatgcgtagcattaagtacccaaagagtggtacaccgaatccccatgccgagttgtgggtctactgtatgaaagacgaatcatcgtaccaccctagagtaaatggagacggaaagggttcaagtatattgattactgaacttacatgggtcggagatgaggacgttttagttaagactactgatcgttcctcagatatgctaacggtatttttagtggacacgaatgcaaaatcttcatacgctgtgagaaatgaaagtgcccatgggggatggtgggagattacccataatactctctttattccagcaaatgaaacgcttggtagacctcataatggttatgtcgatattctaccaataaatggttataatcacttagcctactttgagaatagtaataacacacactacaaagtactgacaactggggattgggaggtagttaatggaccacttgcctttgattcaaaaatggatcgtctttattatatttctacacaaaagcactcaaccgagcgccaccttcactatatagatttccagtcacaacccaagatgcatcaagttactgatattttcaaagaaggtgtattcgatatatccttttcttcaggtaggaggttcggtttactcacctataaaggacccgacgttccataccaaaaaatcgttgattttcattcacacaaaacagacacatatatagaagggaacatattaggcgaaacattatactatttggagagaaacgaagaaatcagcaaaaatttagaagattattcgattcccaaaaaaatattccaggagttaaatttgggtaaggatgaatcgggagcggacatattggtgaattcgtacgagatcctcccaaacgattttgatgcaacgttaatcgattattatccagtttttttctttgcatatggtggaccaaattctcagcaagtcatcaagacattttctgtaggtttcaatgaggtcgtagcttcacaattaaatgcaattgtagttgtcgtcgatggtcgtggtactggtttcaaaggccaaagatttagatcgcttgtccgtgataagcttggcgattacgaggcccgtgaccaaatatctgcggcttccctttatggttccctgagtttcgtggactcgcaaaagatttccttatttggttggtcgtatgggggatatttgactctgaagaccttggaaaaggacgcaggagaacactttaagtacgggatgtctgttgctccggtaaccgactggagattctacgactctgtctataccgaaagatacatgcacactcctcaagaaaactttgacgggtacgtggaatcaagtgtccacaatgtcacagcgttggcccaagtaaacaggttcctactaatgcatggtacaggggatgacaatgttcacttccaaaattctctgaaatttctagaccttttgaacttgaacaatgtcgaaaattacgatgttcatgtattccctgattctgaccacagtataagatatcacaacgcgaatgtgattgttttcgacaagctgcttgcttgggtaaagcatgcatttaatggggagtttaccaagtaa

SEQ ID NO: 1108 - DNA, 885 bp, Saccharomyces pastorianus
atgggtttaacagtgccttttaagcaagttgacgtattcaccgaagttccgtttaaaggaaacccaattgcggtgataaacttcttagatattgacgaaagtgaagttacccaagagcaattacaagcaattgccatttggacaaacctgtcagaaacatcttttctatttaaaccatctgatgaaaagtacgactacaaactaagaatctttacctcactatctgaattaccatttgctggtcatccaactattggttcttgtaaggctttccttgagtttacccagaataccactgcaacttcgctcgttcaagaatgcagagcgggagctatcccattaacagtcaacgagggactgatcagcttcaaagctgcgttatttgacttcgaaggtatatctgatgaagtcattactggttacgaacaatcacttggcttaaaattcattgtggctccagcactgttgcgcactggaccaaactgggttgttgctttagtagaggacgcagaaacttgtttcaacgccaatccgaacttcactatgctcacagagcaaacaaaacagaataaacattgtggagttattttggcaggtgtcaagaagaatgcatcgattaaaaactcatatgaaatgagagcattttctccgttggacaaggtcgatgaagatcctgtttgcggaagcggttctgtggcacttgcgagatatttacaagaactttacaagttcgaagaaaccacgaagattaccatttctcaaggtggaagattgggaagggatggccatattgtagctagcattataaaagagacggatggtagcacttcataccatgtagcgggccatgcgataactgttgtcaatggcaaaattacactttaa

SEQ ID NO: 1109 - DNA, 885 bp, Saccharomyces pastorianus
atgagtttaacagtgccttttaagcaagttgatgtattcactgaagttccattcagaggaaacccagtcgcggtgataaacttcctagatactgacgaaagtgaagttactcaaaaacaattacaggcaattgcaaattggacaaacctatcggaaacaacctttctatttaagccatccaataataaatgtgattacaaattaagaatttttaccccaaagaatgaattgccattcgctggtcatccaactattggttcctgtaaggcttttcttgagtttaccaagaataacactgcaacttcgcttgttcaagaatgtggggtgggggctatcccattaacaatcaacgagggactgatcagcttcaaagctgcgttatttgacttcgaaggtatatctgatgaagtcattactggttacgaacaatcacttggcttaaaattcattgcgactccagcactgctgcacactggaccggagtgggttgttgcgctagtagaagatgcagaaacctgtttcaatgccaatccgaacttcactgtactcacacagcaaacaaaacagaacaatcatacagggattattttggcgggcccaaaaaagaatgctccgattaggaactcatacgaaatgagggcatttcctacagcggaaaatatcgatgaagaccctgtttgcggaagtggttcggtggcacttgcgagatatcttcaagaactgtacaagttcgaagaaaccacgaatattaccatttctcaaggtggaagattgggaagggatggccatattgtagctagcattataaaagaaacggatggtaacacttcataccatgtggcaggtcattcgatcactgttatcgacggaaagatcactctttaa

SEQ ID NO: 1110 - DNA, 1431 bp, Saccharomyces pastorianus
atgagtgacaagatagagagacatactttcaaagtcttcaaccaggactttagtgttgataagaggtttcagctcattaaagaaatagggcatggggcttacggtatagtgtgttcagcgcggtttgcagaagctgctgaagataccacggtggccataaagaaagtaacgaatgttttttcaaaaactttactgtgcaagagatcattacgtgaactaaaactattaaggcattttagaggccataagaacataacatgtctttacgacatggatattgttttttactcagatggctctatcaatggcctttacctttatgaagaacttatggagtgtgacatgcaccaaatcatcaaatcaggccaacctttgacggatgcccactaccaaagtttcacataccaaatattatgtggtttgaaatatattcattccgcagatgtcctgcaccgtgatttgaagcccggtaacttacttgttaatgccgattgtcagttgaaaatctgtgattttggattagcaagagggtactctgaaaacccggtagagaacagtcaatttttgacggagtacgtggccaccagatggtatagagctccggaaatcatgttgagttatcaaggttacactaaggcaattgacgtatggtcggcaggttgtattttagcggagttccttggtggaaagccagtctttaagggtaaagattacgttaaccaattgaaccaaatattacaagttttggggacgcctcctgatgagaccttgaagagaattggttctaaaaatgttcaagattacattcaccaattaggatttattccaaaagtaccttttgttaatttatacccaaacgccaatgcacaagccttggatttgttggagaaaatgctcgcgtttgatcctcaaaagagaatgaccgttgatgaggcgctagaacacccttacttgtctatatggcatgatccagcagacgaacctgtttgtagtgaaaaatttgagtttagttttgaatccgtcaacgacatggaggacttaaaacaaatggttatacaagaagtgcaagatttcagacagtttgtaagacaaccattactagcagagcaaaagcagcaacagcaacaacaacagcaacagcagcaaattccagaaacaaataacggaaatatggaaatggcagaagaaggatactcaaaacaaatggctgtaccctcaaactctgttccaccacaacaagagtcatttggtatccactcccaaaatttgccagggcacgatacagatttccctccccgacctcatgaaaatatgatggatatgaggtctgcccctgggcccacccctggaatcccgtctcaagatgataatgacacatttttagatcttgaaagagaactggaatttggtttagatagaaagtatttctaa

SEQ ID NO: 1111 - DNA, 2196 bp, Saccharomyces pastorianus
atgttcaggtcgcatgcctcggggagtaagaagcaatggtctaaaagaacttcaaacggcagtgcatctgccgattctgcaccgggccctcatgcctataggcagcaaacactgtcttccttcttcacgagttccaacaaaaagacacccggtgtttcgaaaaactccacaacaacaacaagtacaacaacaacggttattgacttggaaagtggtggtgaaggcaaccaaactaaagtcgcgttgcctaggccgagactggtacggaataactcgtcctctttattttcccagtctcaggatgcgtttggagatgacgatcctgaagcagaattcaaaaaactggtcaatgtgcccagacttaatagctataagaagcctagcagatcgtcgtcgatgaccagctctctgcacaagactgcctccgcgtccactaaatatagaacgtaccagtacgatgaagatgaaaccttgcgagaggttaccagtgtgaagtccggttctagacaactatccttcaccagcacgatcaacattgacgattccagtgcaggggttcctgctgatctggaaaggcctgctaagagatcgaagccttccctggagtttcaaggcttaagactcacagcaccaaagaaaataaagccgctcttaaggaagtcagcatcaagcttggaatcgatgaaccacagaaatgcacttttgtcccccgttgtactgacgaaggagcaagaaatggttgtgagtctgatcatcaaaaaaaggacaaacgtcttttatacaggtagtgctggtacaggtaagtccgtcatcctgcaaaccattataagacagctaagttctctgtacggcaaagaatccattgcgataaccgcctcgaccgggctggccgccgtgaccattgggggctccacactgcataaatggtctggtataggcattggcaacaagaccatagatcagttggtgaaaagaatacaatcacagaaagacttgttggctgcatggaggtacacaaaagttttgatcattgacgaaatctccatgatcgatggtaatctactagataaactagagcaaattgccaggagaatccgtaaaaatgacgacccttttggtggcatccaattggtcttaacaggagatttctttcaattaccacccgtggcaaagaaggatgaaaataaaatcgttaaattttgttttgaaagcgatatgtggaaacgatgtattcaaaagaccatcttactaaccaaagttttcagacaacaagataacgaattgattgatattttgaatgccataagattcggagaactgaacgtcaacatgacgaggacaataagaaacctaaatagggatatagattatcccgacggtattgcccccacggagttatatgctacgaggagagaagtggaatcttctaacgtgaggaaattacaatctttgcccggtgacttgtacgaattcaaagctgtagataacgcaccagaaagataccaaacactattggactcctccctgatggtggataaagttgttgtattgaaggaagacgctcaagttatgatgttgaaaaaccggcctgatgtggatttagtcaatgggtctttggggaaagtcttgtttttcgttacagaatcattggtggtcaaaatgaaagaaatctataaaattgtagatgatgatgttgtcagtgatatgcgacttgtgagccgggtcgtcggcaatcctattttgaaagaatcaaaagaatttcgtcaagatatcaacgccaggccgttagccagattggaacgtttgaaaattctgataaatcatgcagtcaagatttcccctcataaagaaaaatttccttatgttcgctggacaataggcaaaaacaggtatatccatgagcttatggtcccagagcgtttccccattgatataccaagagaaaatgtcgggctagaaagaactcagattcccctaatgctgtgctgggcattatccattcacaaggcgcaaggtcaaaccattcgaagattgaaggtcgacttgagaagaatctttgaagccggtcaagtttacgttgcgttgtcgagagcagtcaccatggataacttacaagtactgaactttgacccaagtaagattcgtactaatggaaaagtgaaagatttttacaagcatctggaaactttgaagtga

SEQ ID NO: 1112 - DNA, 1026 bp, Saccharomyces pastorianus
atggccgatttcctgctgagaccgatcaagcaacgccacagcagtgacggcaaatacgtgacggtagatgctggcggcggatcagtgtccaagatcgagcccatcgcggatttcgtcataaagaccaaactggtatccagcaatggcccagaggagttgcagaacgccaagaaggtgttcatcaacgtgtgccattccgggctcgtgcccaaacccgagacggagttcgatgcgaggatagtgttcccgcttattatccagaacgagtgggagatcccgatcatcacgtcgtgccaccggacggaccgtgacaagaagggacaagagtgctatgtgtgggactgctgcataaacagcgattgctcgcgctggatacgtgaggacgtccagctgcgggaaatcctggtggagtggtgtctggagtcatgcgagatccgtgagtccgtcgtgctttgcagggaccacatagcgttccccaagatgaggcagaagggcgcggagatccctgcgctggagatactgaacgacgagctgcagaacgattacaagacggagatgcacaggatcatcgaggaagaggccagcaacccgatgagcgttctgcgcggccacgctaaggacgacgacggtggcgacgatggtgacgacgggacgctaccgccgctgttcccagtggcgaaggcaccggtaggccgcatagaggagattgacgagaccgctatcgcccagcggaggaacaagaaggctgcggcagtgcagcagcagcagcagcagcctgacaagcccgagtacgaggtgaaaatgaagaggtacgacagtggggagtacaagctgcggattctcgtcgagaacaaagcgggaaactcgctgccggggcagtttgctccgctgtacaagccggcggagaacgagctgtatatcaacgacgagttgagcataccgttgccgcacggcgtggtccggaacgcggcagacatcaagatcttccacgtttccaaagaacgcagactgtacgtatacgtttga

SEQ ID NO: 1113 - DNA, 1401 bp, Saccharomyces pastorianus
atggacagttttgggaatttgagtataggagacaatttcactagcgggatggagcacggtgatgaggagctggtgggcctttccaacctaagcatatcgaaaaatggaccaacattatctccacaactcatcaaccggttcatgccccatttcccttcaagtccatcgcctctacgaaatgcattggattttagtgtaagtaaaggcgatgaagaagagaatgacctaatggagatagacgaagttgacgatacgagtttcggagaggtttacgacagggagcccactgaagcaattattgaagtggatgagaggtccatagtggaagaaatcgaagtcacgcctgaagacaaacaaaagcaagaaaacagtgaaagtcagaaccaacaccaagagggggaaagaaatattgtttcaccacaccatgcaactgtcataaaggcactattgtcaccgacagatttaggcgtagcggcggctactaaagtagaaagtattgtaccattgccacaggctaacccagacaacaatcaagattcaaagagcaacctagaaattggtaatgaaaatgaaagcgagcagaatgacgaagttgaggatgaactcaacctacaaacaggtaatgataaatcaagaacatttacaaatgcgttcgattccgagataatcaaaagggaattgagatcaagatcaaaatatcaaccgattcaagtttcatttaatacacacaattacttttattccgataaagagggcgtgaaaacatattctcttacaaaaccaaatgacaacggaatagatgacttttatgaccggaacgaagctttcaaattgcccaagccgtggtcacccaattcgcatccgacatcgagagcatcatacgccttgatgtcatatttacagttatttctcaatgcgattactacgattgtaattttcagttttatactatcattcatcttaacactacagaaggacttgaaatccacatgggaacaaagaaaacacgaattacagtacgaatccgaaaattgtcaagaacaatacatcacaaaccgttgtaatcaaacgccgggtttaccggctttggaccaacagtgcgcagaatggaaacaatgcatgaacagaaacaacgacatatttttccgtgcaagaacaacattgagcgcacagctgtttggagacatcatcaattcgtttatagatccattaaattggaaaacactatttgtcatattttgcggcatcataacttggtgttttagttcaaattttttactcggattcgtgcgagctaagagctactacggcgatggcatcaaaagatatcccgtgtcacctccactaacatcatcgtctgaggcatcttccaaagagggctctcgcttactcaagcagtaa

SEQ ID NO: 1114 - DNA, 690 bp, Saccharomyces pastorianus
atgttttcaacgatagctagatcaaaccttaggccgattgccacttcttgtctatttaaccgtccgcttagtcaatctttcattattctaaagaaaaagtctacccttaatgaaaaagtcgaagaagatgaagttgacgtaaatgaacttctgacaaaggctgaagctcaatttaagaagacgttagaaacacagaaacagaagctgaatgaaatgaaacaggggaattttaatcccaaagtatttgatggtctgatgttcaaaaacaacaaaaaatttacagatattgcaaccacttctcttaaaggtaagaatgcactcctaataaccgttttcgatcctaaagatgtgaaaactgtagtaagtggggttcttgccgccaacttgaacttgactcctgaaagaattccaaataatgatttacaattgaaagtgtcattgccaccaccaacgacagaatcgcgattaaaagtagccaaagacttgaaaaaagtcttcgaagattataaacagtcctcattaaaggaatcaatggggaccatcagaggtagtatcctcaaggaatttaaaagttttaagaaagatgactccgttaggaaagccgaacgtgatttggaaaaacttcataaagactacgttaacgagttacacaaacaattcctacaagttgagaaaagtattgcaaaataa

SEQ ID NO: 1115 - DNA, 1935 bp, Saccharomyces pastorianus
atgcccaaggtttacctgaatccagacatgattaatcacttgaattccacagtccaggtttacttcaatttatggttggagaagcagaatgcactattgcgctctcaacctcagatcattcaagacaaccaaaaacttataggcattacgacaatagttgccacaatcttcactctctatgtttttgtcaagataatcttcactccaacgcattgctctgcatcctataaaccagcaaagttttccgtgtctacaccagagcctgctcagaataactggaagggcaaaaggtctgtatccactgacatatggaatcctgaagaacctaactctattcaatgccattgtcctgccacaggtcaataccttggctctttcccatcaaagacaaccaaagatatagatgaaatggtctccaaggcaaataaggctcaatccacttggggtcgttctgaattttcaagaagattgagagttctggcctctttgcacgattacatcataaacaatcaggatcttatcgctagggtagcgtgcagggactcggggaagacgatgctagacgcctctatgggtgaaatcttagttactctagagaaaatccaatggactatcaagcacggtcaaagagctttacaaccttcaagacgtccaggcccaactaactttttcatgaagtggtacaagggtgctgaaatccgttatgaaccactaggtgtgatcagttctattgtttcatggaattatccattccataatttgttaggtcctattattgctgctttgttcactggtaatgccattgttgtgaagtgttcagaacaagttgtctggtcgtccgaattctttgtcgaattgactcggaaatgcctggaagcatgtgatgaagatccaaacctggttcaattgtgctactgtttacctccaagggaaaacgatgactctgccaattatttcactgctcatcctggtttcaagcatatcacttttatcggtagtcaacctgttgcccattatattctaaaatgcgctgccgaatcgttgaccccagtagtcgtagagcttggtggtaaggacgcatttattgtgctagatgcggccaagaacttggaggccctatcttccatcatcatgagaggtactttccagtcatcgggacagaattgtatcggtattgaaagagtcattgtcagcgagaaaaactatgatggtttagtcaagattttgaatgatcgtatggcagcaaacccattacgtcaaggctctgatatcgaccacttagaaaatgtcgatatgggtgcgatgatatccgataacagattcgacgagttggaagctttggttaaggatgctgtcgaaaaaggtgctcgtttacttcatggtggctcccgttttaaacatccaaaatatccacaaggtcactatttccaaccaactctcctagtagatgtcacatcagaaatgaaaattgcacaaaatgaagtgtttggtcctattttggtcatgatgaaagctagagataccgaccactgtatccaattggccaactctgccccattcggtctaggtggctctgtatttggttcagatatcaaagaatgtaactatgtggcaaacagcttacaaactggtaacgttgccattaatgatttcgctactttctatgtttgtcaactaccattcggtggtattaatggttccggctatggtaaatttggtggtgaagagggcctattgggtctatgtaatgccaaaagtatctgttttgatactttaccatttgtctccactcaaattccaaaaccattggactatcctattcgaaacaatgctaaggcatggaatttcgtaaagagtttcattgtgggtgcttatacaaattccacttggcaaagaataaagtcccttctttcgctagctaaagaagctagttaa

SEQ ID NO: 1116 - DNA, 2076 bp, Saccharomyces pastorianus
atgccatttggaatagataacactgacttcaccgttctggcggggcttgtgctcgctgtgctgttatatgtaaagagaaactcgatcaaggagctgctgatggccgatgatggtgcgattaccgctgtcagcacgggcaacagggatatcgcccaagtggtcactgagaacaacaagaactatctggtgttgtatgcgtcgcagaccgggaccgctgaagactacgccaagaagttttccaaggagttggtggccaagttcaacctcaacgtcatgtgcgcggacgttgaaaactacgatttcgaatcgttgaatgacgtgcctgtcatcgtctccatcttcatctccacgtatggtgagggtgactttcctgatggggccgtcaacttcgaggacttcatctgcaatgcggatgccggtgctctgtcgaatttgaagtacaacatgttcggtctgggcaactccacatacgagttctttaacggtgctgccaagaaggctgagaagaaccttttggctgctggtgccaccaggctgggcaagctcggtgaagctgacgacggtgccgggaccaccgacgaggactacatggcttggaaggactctattctagagctcttgaaggacaacctgcatctggacgaacaagaggccaagtttacgtcgcagttccagtactccgtcctggacgaagtgtccgatgccgtagcgcttggtgaaccctcttcgcactatttgccctcgcatgagttgaaccgcaatgcggacgggatccagctgggtcctttcgacttgtctcaacctttcatcgcccccatcgtcaaatcccacgaattgttcgcttccaatgaccgtaactgcatccactccgagtttgacttgtccggctccaacatcaagtactccaccggtgaccatcttgccatttggccctccaatgcagtggagaaggtccagcaatttttgtccatcttcaacttggactcggagaccatttttgatttgaaacccttggaccccaccgtgaaagtgcccttccccaccccaaccaccgttggcgctgccatcaaacactatttgcaaatcactggccctgtgtccagacagatgttctcttctttgatacagttcgcccccaacgccgatatcaaggacaaattgaccctgctgtcaaaggacaaggatcaatttgccgtcgagatcacttccaagtatttcaacattgccgacgcattgcattatttatccgacggcatcaagtgggacactgtccccgtgcagttcttgctcgaatccattcctcatatgactcctcgttactactccatttcctcctcttccctatctgaaaagcaaaccgttcacgttacctccattgtggaaaacttccccaacccggaattgcccaatgctgccccagttgttggtgtcaccacaaatttgttaagaaacattcaattggctcaaaacaacgttaacatcgatgacactaacttgcctgttcattacgatctaaacggcccacgtaacctcttcgataattacaaattgcccgttcatgttcgtcgttccactttcagactgccttctaacccctccaccccagtgatcatgatcggtccaggtaccggtgtagcccccttccgtgggtttattagagaacgtgtcgcattcatggaatcgcaaaagaagggcggcaacaacgtctccttgggtaagcatctattattctacgggtcccgtgataccgatgactttctatatcaagaagaatggccagaatacgccaagaaattggacggctcatttgaaatggtggtggctcactccagattaccaaactccaaaaaagtttacgttcaggataaattaaaggattacgaaaaccaagtctttgaaatgatcaataatggtgccttcatctacgtttgtggtgatgccaagggtatggccaagggtgtgttaaatgctctgatcggaatcttatcccgtggtaaagccatttccagcgaagatgctgcggaattgatcaagatgctcaagacttccggtaaataccaagaagatgtttggtaa

SEQ ID NO: 1117 - DNA, 1686 bp, Saccharomyces pastorianus
atggattggtcgtttatattacaactgttgataacaatactggtcattgtactgggtgcaaattggttgttaagttccttcctactggacttcaaaagagacctgacagcggttgctctggcacaacaggcaagtgtatctagcgttcgtaacgagaatgaaactgcatattatagaagcatcttagtgcctactggtttcccattgactactggactaggactctctttaaagtacaaaataagaaatggtaattttggtgatgtttggaatgccacgatggaagtttccaagggaaggaacaccatcaagctggtaggagacgagaaaagttattcattgggtgagatcaatggtatggccaagcgtatacttcagaaactttctgtgaagaagtacaaaaatattggtatatctgcgtcagtcgccacggtggaaggattttctcttactttggcctctatgatggcgtctataaaaactggttctgtacctcattttttgccagcggttcctagacaacgagtggcggatcttgatgtcctaatcatcgattcatggagatctttcaagatgctaaacggtagtgaggattggtacaaactgatcattgtttgtgatgatcctacgaaagcaccacaattcgatttggacaataatcatgtcattacatgggtagagattatagatgggtttggtaacgatccagagttccaatacacaccgccagatgacaattctgatgacaagaaactgtttgcgtacgtagcctcaccatggaatggaactaacagcttcaatcagatatgcctggtgagtaacattgcggaatttatcaagagttttcccctaggtaacgaattgaatagcagtgatcatttaaccatctcagcaaaattagcaagttccagtgcaagcttacaaacctgggggaagctcttcgctgtcttgctacacggtgggtctgcatcatttgtcgatccagcagcgttggattgcaagtcattgcataagactacactattgattattgaagcaaaagacattaccaaattaacggattccgcttcggaaaagggcttagtacataaattttacttatcctgggcgattaatttactgagcgagggtatctttaccaaaattgctaagattgaaccgaatgctcttgagaaactaagatgtgtttatttggcagaaagtgtgaaagatgctgaagtgatttcaacatttcctgcaaagattcctcaattgaagaagaccaataaaagaataaccccaagcactaaacaactgaataaaataagagcacagtttggatctcgtgtggttctcgagttatattgtccatatactatcatggggcccatagcacatacgaatttttacgattacagagtttttgacagctcggtggataataacgttgtttgttatggacccttaagcacaacgttagaaggtaaaatggtggaaacggaaaccaaccctcttttgaacatagagaaaagacaaggtatgttatgtattcgtggctttagtatcggtaaaccagtcgagtcaaatcgtttgcagaacgcaatgaacttggccgaaaaatttggaggaggtgaaggttggatgcctttagtcggtatatttgggttgtggggccaagatggttgcttatacacctataaccaataa

SEQ ID NO: 1118 - DNA, 888 bp, Saccharomyces pastorianus
atgactgtggatttagcttctatcgagaaatttctctgcgatctagccaccgaaaaagtaggtcctatcatcaagtccaaatcaggcacccagcaagactatgatttaaaaacaggttccagaagagtcgatattgtaactgccattgacaaacaagttgaaaaattaatttgggaatcaatacgagcacaatatccaaccttcaaattcattggggaagaaagttacgtggaaggggaaagtaagattaccgatgatcctactttcatcattgatccaattgatggaaccacaaactttgtccatgattttccatttagttgtacttcgctaggcctaacgataaataaagagcccgtggtaggcgttatttataatccacacattgacctcctcatatcagcttctaaagggaatggtataagagttaatgggaaaggctttgaccaccaagctaaattagaatcaatgggttctctagtattgaataaatccgtggtggcattacaaccaggctcagcaagagaggggaaaaactttaagacgaagatggccacttatgaaaagttgctttcgtgcgattatggttttgtccatgggttcaggaatttaggatcctctgcgatgaccatggcatatatcgctatggggtatctcgacagttactgggatggtggttgttattcgtgggatgtttgcgctggatggtgtattctaaaggaagcgggtggccgtgtggtgggtgccaacccagatgaatggaatattgaagttgataacaggacatacttggccgtaagagggacaattaacaacgacgttgacgaacaaaaaaaatatatcaaggatttctgggcttgtgttgatggtcagttaaaatacgattaa

SEQ ID NO: 1119 - DNA, 2571 bp, Saccharomyces pastorianus
atgtcacgtgaagtgctgccagccaatgttaccccatcgcattatgacattgcattggagcctgatctcgaaaccttcaaatttgaagggtctgccaagatcgatttacagatcaacgatcattccgtagattctgttacgttgaattatttggaaatagatttccattctgcttttcttgaaagtgtctgcgccattgatgttaagaaagatgaaagccagcagacagtgacttttgtcttccctaatggaactttgaaaaatttgggagattctgcaaagttggagattgagttcactggtaccttgaacgacaaaatggctgggttctatagagccaggtatacggataaagccactggcgagactaaatacatggccactactcaaatggaagccaccgatgctagaagggccttcccctgtttcgatgaaccaaacttgaaggctagtttcgacatcactttgatttctgaatcttctctgactcatttgtctaacatggatgttaagacggaaataaccgagaaaggtaaaaaaatcacgaccttcaacaccactccaaagatgtctacgtatttggtggcgtttattgtggctgacttaaaatacgttgaaaacagcagtttgcgtatcccagtccgagtatattccaccccaggtgacgaaaaacttggtcaattcgctgttgatttggctgcgaggactttgaagttttttgagaatacctttgacatagagtaccccttaccaaagatggatatggtggcggttcacgagttttcagcgggtgctatggaaaactggggactggtcacttacagagtcattgacctgttactggatatggaaaactcgagtttggatcgtatccaaagagttgctgaagtcattcagcatgaactggcccaccaatggttcggcaacctagtcactatggactggtgggaaggtttatggttgaacgaagggttcgccacttggatgtcttggtactcttgcaacgagtttcaaccggaatggaaagtttgggaacaatacgtaaccgacaacttacaacgtgctttgaacttagattccttaagatcttctcacccaattgaagtccccgttaagaatgcagatgaaatcaaccagattttcgatgctatttcttattctaaaggttcctcattattaagaatgatctctaaatggctaggcgaggaaattttcattaaaggtgtgtccaagtacttgaacagatttaaatacggcaatgctaagacaaaggatctatgggatgccctgtcagaaacctctggcaaagatgttcgttcggtgatgaacgtttggactaaaagtatcggttttccagttctatccgtaaaggaggaaaatggcaaaattactttgactcaaaaccgttatctaagtactggtgacgttaaggacgaagaagacaccacaatttacccagtttttttagctttgaaagataggacgggtattgaaaattcattggtactaaacaaaagatctgctacttttgaaatacaaaaccaagacttcttcaagctcaatggtgaccaatctggtatttttatcacttcttactctgacgaaaggtggaccacattatctacacaagctgattttctatccgtcgaagaccgtgttggcttagtcgctgatgcaaaggccctttccgcatctggttacacttccactacaaacttcttgaacttggtttctaattggaaagatgagaactcattcgttgtttgggaacaaatcattaacagtttatctgctttgaaatctacttgggtcttcgaacctgaaaacgtcttgaatgctcttgatgaatttactttaaagttggtgtccaaaaagctctctgagctgggatggaatattagcgaagatgacacctttgcctcacaacgtctaaaagtcactctgttcaatgctgcgtgcgcatctggtgacaaaaaaatgcaaaatattgcagtggaaatgtttgaaaaatacaacaatggggacaaaaaagccattcttgcgttgatcaagccagctgttttcaacaccattgccagaattggtgaagatgctaactacgaaaaaattcttcacatctaccaaaaccctatttcttcagatgaaaaaattgttgcgttgagagccttgggtagatttgagaacagtaagttcttagaaagaaccttgggttacttgttggatggtactgttttgaaccaggacttctacataccaatgcaaggtatcagagctcataagaagggtatcgaaagattatggacttggctacaagaaaattgggacgaaattgtcaagagattgcagccaggttcacctgtcttgggtggtgtattgacgttggggttgaccaacttcacctccgttgaagatcttgaaaaaatcagtaaattctacagcgaaaagccaactaaaggcttcgaccaaacgttggcccaagctttcgacaccattagagctagggcacaatgggttagcagagatcgcgaagtggttgctgcttacttgaatgaacacgaatacgaacaatag

SEQ ID NO: 1120 - DNA, 732 bp, Saccharomyces pastorianus
atgactgtacaaattccaaagctattgttcttacaaggtttcttgcaaaacggtaaggttttttcagaaaaatcatccggtatcagaaaacttctgaagaaggccaatgttcagtgtgactatatcgatgcgcctgttctcttggaaaagaaggacctgccattcgaaatggacgatgaaaaatggcaagccactttggatgcagacgtgaacagagcttggttctaccacagcgacatctcccacgaattggacgtctctgaaggtttaaagactgttgttgactacattaaggctaacggtccatacgacggtattgtcggtttctcccagggtgccgctttgtcttccatcatcactaacaagatcacggaattggttccagaccacccagaattcaaagtcagtgtggtcatttcaggctactccttcaccgaagcagacccagaacaccctggcgaattgagaatagccgagaaattcagagactcattcgctgtaaagccagacatgaagaccaagatgattttcatctacggtgcctccgaccaagccgtcccatccgtcagatctaagtacctgtacgacatctacttgaaggcccaaaacggcaacaaagaaaaggtccaagcctacgaacacccaggtggccacatggttccaaacaagaaggacatcatcagacctattgttgaacaaatcaccgcttccctgcaagaaactactgactaa

SEQ ID NO: 1121 - DNA, 1662 bp, Saccharomyces pastorianus
atggtgtcccaagaatatgagcccatccaaccgagcgacgaactaccaacagatatcaatagcgacaccaatagtcactcatttgacgacagcaataacaatgccactcatgagtcgcctcggcgtacaacgacgcggccaggatcggcgccgaggagtatagtgggtacgttgaggaagtattctaagtttattgggcctggtttaatggtctctgtatcatacatggaccccggtaattacagtacggctgttgcggcaggctctgctcaccgatacaaacttttattctccgtcttggtctccaatttcatggccgcattctggcaatacctctgtgccagactaggtgccgttacaggtctagatttggcgcagaattgtaaaaaacacttaccctttggactgaatatcactctttacatcctggcggaaatggctattattgcgacagatctggccgaggtggtgggaactgccatttcgctgaacattctattccatataccgctggcattgggtgttattctcactgtggtagatgtcttgattgttctgctcgcttacaaacccaacggatctatgaaaggcatcagggtttttgaggcgtttgtttcgttattagtggttctgaccgtggtttgctttacggtggaattgttttacgcgaaattaggtcctgccaaggagatattctcaggctttctccccagcaaagccgtcttcgaaggtgacggcttgtatttgagtttggcgattttaggtgccacagtaatgcctcactcattgtatttggggtcgggcgtggttcaaccaagactgagagagtacgacatcaagaacggactttattcgccagaccttgatgatatggacaacaatcaccataattatagaccctcttatgaggcaattagtgaaactttgcacttcactatagcagaattactggtttcgttgttcactgtggcgctatttgtcaactgtgccattcttatagtctctggtgccacattatatggaacaactcaaaactcagaggaagctgatttgttttccatttacaacctgctatgcagctctctttcaaaaggtgccggtacggtattcgtgctggcgttattgttttcaggacagagcgcaggaatcgtgtgtaccttgagtggacagatggtaagtgaaggtttcctaaactggactgtgtcaccggcattgagaagatctgcaacaagagcggtagccatcacaccgtgcctgattctcgtccttgtagcagggcgcagtggtctctccggtgctcttaatgcgtcacaagtggtgctttctctactgttgcccttcgtgtctgcaccactgctctacttcacttcaagcaagaatatcatgcgcgtacagctcaaccgtgacaaagacctctcaagaacttcggacaagaaagacgtgggtcaacgaaatgaagatgacgaaaccatcgaattgcaagaaatgggcatgggtagcagctcacaggaccgtggcttgatctcgccccctcctgaatacatagatatgagcaacggaacaatcgtgaccgtgcttgcagtcattgtgtggctgatcatttcgggcttaaatttctacatgttgatgggcttcactacgggccaagaggttcacctctga

SEQ ID NO: 1122 - DNA, 447 bp, Saccharomyces pastorianus
atgttatcaagggccatattcagaaatccagttataaatagaactctgttgagtgccagacctgccgcttacactgcgaccagattgaccagaagttcattgattcagagcaggaagtattctgacgcgcacgacgatgaaaccttcgaggaattcaccgcaagatacgaaaaggaattcgatgaagcttacgacttgttcgaagtgcaaagagtgttgaacaactgtttctcttacgatttggtccctgctccggcagtcatcgaaaaggctttaagagccgccagaagagtcaatgacttacctaccgccatcagagtatttgaagctttgaaatacaaagtcgagaatgaagaccaatacaaggcctacttggacgaactgaaggatgtcagaaaagagctgggcgttcccttgaaggaagagctatttccaagctcttcttga

SEQ ID NO: 1123 - DNA, 618 bp, Saccharomyces pastorianus
atgaaagtatttggtttatggtactggctgctgctgcttcttagcgccaacgtaatcgcgtctaaagtgggtgagttggtagacaaagatgacgaggtgattactcaaaaggtgtttttcgatatcgagcatggtgaagaaaaggttggcaaaatcgtaattggattatacgggaaaatctgtcccaagaccgtcaagaacttttacgagctgagcaccactacggactcaaagaaggggttcgtcgagtccactttccacagagtaatccccaactttatgatccagggaggcgacttcacacacggcacaggtgtgggaggcaagtccatctacggagacacgtttcccgacgagaacttcaccttgaagcacgatcgtaagggcaggctgtcgatggccaaccggggtaaggacaccaacgggtcacagttcttcatcactaccgtggacgaggcatcgtggcttgacggcaaacatgtggtcttcggccaagtggtggacggtatggacgtagtcaattacatccagcacgttgccagggactccaatgacaagcccttggacccagtcaagattgcagactgtggtgaatggaccctcaaaccctcttcgtaa

SEQ ID NO: 1124 - DNA, 888 bp, Saccharomyces pastorianus
atgaacgtcacaccgttggatgaattgcagtggaaatcaccagaattgatccaggtgtttggtctaagaaccgaaaatgttctagattatttttcagaatcaccatttttcgacaaaacgtcgaataatcagattatcaaaatgcaaagacagttctctcagttgaatgatcctaatgctggcgtgaacatgacacagaacataatgaacctgccagacggcaagaatgtggaagacgaacttgcttatgtggacccggcaagaagacaaattctctttaagtacccgatgtacatgcaattagaggaagaactaatgaagctggacggtaccgagtacgtgctaagcagtgtacgagaaccggacttctgggtcatcaagaaacagaaacgaataaataatactactgcaggcagctctagggggcctaggatcattccgctacaggattactacataattggtgccaacgtatatcaatcgccgacggttttcaagattgtacagagcaggctgatgtctactagttaccaccttaacagcacattgaagagcctgtacgacctcatcgaattccagccctcgcaaggcgtgcactacaaagtgcccatagataccgccactaccaccgccaccactggcgcaaacaacggcaataatgttggtggcggcagtaataagaacagtgtacggcccaccggcgccgcaaatatggccactgttccctcgaccacgaacgtcaacatgaccgtcaacaccgtgggcacgggaggtcagactgtggacaatggtgccggccgtgccggcaatgggaacatgggaatcaccacggagatgctggataagctgatggtgacaagcattaggtccactcccagctacatatga

SEQ ID NO: 1125 - DNA, 393 bp, Saccharomyces pastorianus
atgatgtctctacgaatgaacaacggcctcccaatgctcttgaagaggtcactgactacttctaaagctgcgtatcggtttcattcaaccatccctaaaccaaacgaacagatacctgatgtcgatacatttctagccaaaatcggccgtaattgtaacgaactgaaggacacatttgagaacaactggaataatctttttctatgggattccaagacattaaaggaaaaaggcgtgaatatccaacagaggagatatatcttaaaccaaatccagaaataccgtaacaatgaacccatccgtgagataaaattgggcaagaagtcattttttggcggtgagaggaagagaaaggcatttactgctaaatggaaggctgaaaataagcagtag

SEQ ID NO: 1126 - DNA, 1353 bp, Saccharomyces pastorianus
atggccaaaagaagacaaaaaaagagaactcatgcgcaggttgtacctgagcaggaaaaaggtattccaaaatcaatggtcattagagtcgggcaaacttctctggccaaccactctttgaaccaattagtaaaggattttcgtcaaatcatgcaaccacatacagctataaaactaaaagagcgtaagtccaataaactcaaggattttgttgttatgtgtggtccattaggtgttactcatctctttatgttcacacaatccgaaaagacaggtaatgtttctttgaagatagcaagaactccacagggtcctactgtgaccttccaagtgatggattattctttagggaaagatatcaaaaagttcttaaaaagaccaaaatcattgaataatgatgacgtactaaatccaccattgctagtcttaaacgggttttccacatccaagaaatccgatgaagacaatcaggatgtaaacgtagagaaggtcgttgtttccatgtttcaaaacatctttccacctttaaatccagctaggacttcattaaattctatcaaacgtgtattcatgattaacaaggacagagcaacgggcgaaatttccatgcgtcattacttcatcgatattagagaggtagaaatttcgagaaacctcaaaagactttataaggctaagaataatttgagtaaaacggtgccgaatttacatcgaaaagatgacatttcctcattaatcttggaccacgatttgggtgcctatacgtctgaatcggaaatagaagacgacgctattgtgagagtggttgataaccaagacgtcaaagcaaagcaatctcaaaactcgaaacctcaaaagaaatcagcagagacaaaggatgctaaagaggaaggagaagaagaagacgtagaaatggaggagcccaaacgccatgaaccttcccaaccaactccacgcaagaaggctatcaaacttaccgaattgggaccaagactaaccttgaaactggtcaagatcgaagaaggaatctgttcaggaaaagtgttgcatcacgaatacgttcaaaaatcaagcggagaaattagagaattggagaagagacatgctgcaaagatgagactcaaggaacaaagaaagaaagagcaagaagaaaacatcgcgaaaaagaaggctgtcaaagatgctaagaaggaacgtaagttggaaagaagaaaagccagggctgcagaagagggcgacggtgaaaacaaggccgatgctgtgagtgatgatgaatcttcgtccagcgaggatgagcattacagtgatgtgcctgaggatctagatagtgatttatttagcgaagttgagtaa

SEQ ID NO: 1127 - DNA, 843 bp, Saccharomyces pastorianus
atgaaatctacaagatggatactcaaggatctcttatccaggcaccgtgttaaagcgttcaatagcttgttctcgagacgacttcctacaccgaatgcaacgaagcaacttcaaataggtgaacattttcttttctttccgccaccatttgaaaagtttggtaaagatgggtatttcaactaccaaagccccgccatactattggaagaccccaagttacaataccgcagaagggtttggggtcaaggcgagcttatccagtattcgcccatcaacttagaccaagaatacatatgccaagaatcgattaaatacataaagaagttgcggaacgagcatgtcgtttgtattgaaagggcccttctacaaagtcaccttgagaaaaggactaacaagagtgacatctgcttattggagagaagaatcttaatgtatacaaactcactaccaaacaaggctccaacagaccccccggcagaaagagtggggtacaaaagcttggggaatttcactgttactgatatggacatcatagcgtatgggcaattgtctctaaatccacatcgaatacattgggacaaggaatactgtcgccgagttgaggggtacgaagatatcatcatgcaaggtcccttttcaatccagctattactgaaatgcatccagccgcttttgagaaagcctattacacaactgcggtatcgcaatttaaattatatctatccaggaacaactttgaatatatgtcaatctttgaattcttcggcccacaaacagacgttccaagtcagagacctccaggaaaatagtatagtatacttgaccgcggaaatttgctgctag

SEQ ID NO: 1128 - DNA, 1164 bp, Saccharomyces pastorianus
atgtccgatattaacgaaaaactaccagaactattgcaagacgccgtcttgaaagcatctgttcctgttccagatgacttcgtcaaagtcaaaggtatcgactattcaaaacctgaggctaccgatatgagagcaactgacctgatagaagctatgaaaaccatgggttttcaagctagttcagttggtaccgcttgtgagattatcgagagtatgagatcatggagaggtaagcatattgacgaattggaagaccatgaaaagaaaggttgtttcgatgaagatgggtaccaaaagacaaccatttttatgggttacacttctaacttgatcagttctggtgttcgtgagactctacgttatttggttcaacacaagatggttgacgcaattgtcacttcggccggtggtgtggaagaagatttaattaagtgtcttgctccaacttacatgggtgaatttgcattgaagggtaagactttgcgtgatcaaggtatgaaccgtattggtaacttgctggttccaaatgataactattgtaagtttgaagaatggattgttccagtcttggacaagatgttggaagaacaagaagaatacgtcaagaaacatggcgttgactgtttggatgccaaccaagacgtagactcgcccatttggactccatctaagatgatcgatcgtttcggtaaggaaattaacgacgaatcttcggtcctttactgggctcacaagaacaagatcccaatcttttgcccatctttgaccgatggttccattggtgatatgttgtttttccacactttcaaagcgtcaccaaaacaactaagagttgacattgtcggtgatatccgtaaggttaactccatgtccatggccgcttacagagccggtatgatcattttaggtggtggtttgattaagcatcatattgccaatgcttgtttgatgagaaatggtgctgattatgccgtttacatcaacaccggtcaagaatacgatggttctgatgcaggcgctagacctgatgaggctgtttcttggggtaagattaaagcagaagctaaatccgtcaaacttttcgctgatgtcaccactgttttcccattgattgtcgctgctacatttgccaatggtaagccaatcaagaaagttaagaactaa

SEQ ID NO: 1129 - DNA, 1128 bp, Saccharomyces pastorianus
atgtttgaagtcatcacaatcaccaaacgaaatggggctttccaaaactcttccaatctgctgtataacaacgcaggaatatcggacgacgaggatgaagatgagcaagacatctatttgccggatgtaaactcacgttctaaagatgagtccgactctcagattgtgacacccggtgaactggtcaccgatgagtccgactctcagattgtgacacccggtgaactggtcaccgatgaccccatctggatgagaggtcatggcacatactttcttgacaacatgacctactcctccgtcgcgggtacagtgtcccgtgtcaatagactgctatcggttatcccattgagaggtcgttatgctccagagactggtgaccacatcgtgggaagaatcgctgaagtgggtaataagagatggaaagtagatattggcggtaagcaacacgccgtgcttatgttaggctctgttaatttaccgggtggtattctaagaagaaaatctgaaagtgatgaattgcaaatgagaagttttttaaaagaaggtgacctactgaatgcggaggtgcagtctctgttccaggacggtagtgcttctttacatacaagatccttgaaatatgggaagttgagaaatggtatgttttgtcaagttccaagctctttaatcgttagagctaaaaaccacactcataatttgcccggtaacatcaccgtggttctcggggtcaatggttatatatggttaaagaaaacctctcagatggacctggcaagagacacacccactgctaacaacaatgcctcgaataaatcatcgggccccactggagcagtatcgttaaacccttccattacaagactagaagaggaatcatcttggcaaatatattcagacgagaatgacccttccatatcaaacagcatacgacaaacaatttgccggtatgcgaatgtcatcaaggcgttggcattctgcgaaatcggtattactcaacagcgtgtggtgagtgcttacgaagctagtatggtctatccaaatataggcgaactgatcgaaaaaaacgtaatggagtccatcggtaatgatattcttaccgctgagagaatgagaggtaatggcgactaa

SEQ ID NO: 1130 - DNA, 1494 bp, Saccharomyces pastorianus
atgaaaaccgcactacccgtattgcaaagagtaaataaactgatcagatcgtgcaagatgtcaggagtattcccttacagcccgccagtgaaccgcgaaatgcgagaattagacaggtcgtttttcatcaccaggataccaatgtgtgcagtgaagtttcccgagcccaagaacatcagcacgttctccgagaacttcaaagattgcattctaagggtgccacgtatcccgcacgttgtgaaattgagcgccgccaagccatcggaggaacccacaagcgtgcaaaacaagaagctaaagaccgcagatagcgacaatggcacaatctcgaagggggtgttgttacacgattccattcatagtgtggaggaagcgtatgcgcagctgcctgcggaagcattggacttcctcaaggaaaaccgggccgagatcctagcgcatgaatacgtgctagactacgatttctggaaggcggaagaaatccttcgagcagtcttgcccgaggagttcttggaagagatccccacgggcttcacgatcaccggtcacattgcgcatctgaacctgcgtagcgagttcaagcccttcgactcgctcatcggacaggtcatcctggacaagaacaacaagatcgaatgcgtggtggacaaagtgagttccatcgccacgcagttccggaccttcccgatgaaggtcattgccgggaagagcgacagcctggtggtggagcagcgagaatccaactgcacattcagattcgacttcagcaaggtgtactggaactccagattgcacactgagcacgaaagactggtcaagcagtacttccagccaggtcaggtcgtgtgcgacgtcttcgccggcgtggggccctttgccgtgcccgcgggcaagaaagatgtcattgtgttggccaatgacctgaacccggagagctacaagtccctgcaagagaacatcgcactgaacaaggttgcccagacggtcaagtccttcaacatggacggcgcggagttcatccgtcgctcgccagaactcttacagcaatggatcaagaacgaagaagacggcacgattaagatccctgttcccgccaggaaacgccaccggtcccagcagcagcagcaacaacaacagcaaccgcgcttcaaagaagtgccgatcccagctcgaatcagtcactatgtcatgaacctgcccgacagcgccatctcgttcttgggcaacttccgcggcatctttgccgaatacgcccgcgaagacggtaacaacgaaatgccgtgggtgcacgtgcactgcttcgagaagtacccgcccggcgaagaggtcaccgagcacgagttgcacgagcgcgttcatgcgcgcatagtcgccgcacttcaggtcacggcgcacgagctgccatttcaagccgttgccctgcatctggttcgcaaggtcgcaccgaccaaaccgatgtattgcgccagcttccaactcccggccgccgtgtaa

SEQ ID NO: 1131 - DNA, 177 bp, Saccharomyces pastorianus
atgcatttgatgtacactttaggcccagacggcaaaagaatctacacattgaagaagagcactgagaccggcgaaattacaaagtctgctcatccagccagattttctccagatgacaaatattcaagacaaagagttactttgaagaagaggtttggtttggtacccggccaataa

SEQ ID NO: 1132 - DNA, 3000 bp, Saccharomyces pastorianus
atggaaacaattgatatccagaatcgatcatttgtggttcgttgggtaaaatgtgggcgtggcgatataatcaactatcagattaagccattgaagaaatctattgaaatcggtatctataagaagttgaaatctagtgtagatgatcatgcatccgctgttctcattgcacctgacaccaaaactttgttggactatacgacaaaatctctattaaataaaggaagctcgggtcacacagaggaacatcacagacgtccttctcagacttcgcataattctagtaatggatcggatggcaagagaaaggagagatcatattcttcgctgtccattagtagcatacagcagcaatctcaagaaatacctttacgtgagaaactatccgggtcgggatttacactagttaaaagggtcggcaatgtttcaggcaacaccatggttcaaggtgaccttgaagtaaaagacactgattactattatgcttttatattggacaactcgtcctctaaaaatgcaaagaagaaaattctctttaatgcgagtgttataaacggcgacaatcagtctatgataagcacaagatcgacacctccaacaaggcctgcaaatttgagtagaacatcaacccaacaggacatgttgtttagagtaggacaaggtcgttatctgcaaggctatctcttgaagaaaagaagaaagaggttacaaggtttcaagaaaaggtttttcactttagactttagatacggaaccctgtcgtactatttgaatgaccataatcgaacttgcagaggcgaaattgttataagtttatcatctgtcagtgccaataagaaggatagaataattatcattgattctggtatggaagtttgggtactaaaagctacaagcaaagaaaattggcagtcgtgggttgatgcattacaatcctgttttgacgatcaatttgaagagagagatatatccatattggaggaaagcccggagtcccttgatggtggtgagcaagtagataataagaacacccagaaagatcgtgatcagataacacccaccgttaccactaaatctacacaatcacgtacacagcatagtctgaaagatgtcgatgaaatgtatataccactctctagcgaatcatacgctactttttctatgaacctgcgtttgatccaacaacgactagaacaatgtaaaaaggactccttatcttacaaaccaaatgcgctacaccaaagatctgagggactaaataggtcaccttcgtcatcatccgtttttgcaaataatagagtgtcttcatttaatcactcttcctccggcatgacttcatctgattcgctagtttctgatgaaactccaacccacacaatgcatgccgaacattccgagcatgccttatacaatcaactggcagatctcgaagtatttgtaagtcgattcgttactcaaggggaggtcttattcaaagatcaccagattctgtgcaagaaggcaaaagacacgagagtttcactaacatcataccttagtgaaaacgatgaattttttgatgccgaagatgaaaccagtcgtggtgtgattttattacctgacacagaagacgatatgaacaacatggttgaagaaactcctcttctgggtaaaagcgaccaaaatgagtttacagaagaggtcgaaatatcagaagaagaacttataggcacatcaagtttggaaagtcgcacgactaatgacgaaaaccacaacggtaatcactacaaaaatcaccacaaaaatcgtcgccgtaatcaccaacatcaccagaaaaccaaaagtatagaatcatcagctgagactttcacaagtaaagatttatatgcgctttcctatccaaagtctatttcacgccgaaacgacatacctgaagctgcagcttctcctccaagtctcttatcatttttgagaaagaatgtgggtaaggatttgagctctattgctatgccagtaacatcaaatgagcctatttctattctacagttaatttcagagacatttgagtatgcacccttgttaacgaaggctacacaacgccctgatcctataacctttgtttcagcattcgctatttcctttctttctatatatagagataagacaagaactctgaggaaaccatttaatccgttgctggctgaaactttcgaactaatacgagaagacatgggattcaggttgatttctgagaaggtttctcatcgccccccggtattcgccttttttgcggagcatcttgaatgggaatgtagttataccgtgacgccttctcaaaagttctggggcaaatctattgaactgaacaacgaaggtattttgagattgaaatttaaagcaacaggggaactatttgaatggacgcagccaactacaattctaaaaaatctgattgcaggagagaggtatatggagccggttaacgaattcgaagttcattcatcgaaaggagacaaatcacatatcttgtttgataaagcgggtatgtttagtgggagatcagaaggatttaaagtttccgtaatcccaccagtttcaagtcaccgtaaaaaggaaactctggccggtaaatggacacaaagcttgatcaatgaaaccactcatgaaactatatgggaggctagtgaattggtaaacaactccaagaaaaaatatggcttcactaaattcaccgctaatttaaatgaaatcactgaaattgaaagaggtaatttgccacctactgattcgagactgagaccagatattagggcatacgaagagggaaaggtcgacaaggctgaagaatggaaattgaagttagagcaactccagcgtgagagacgcaataagggccaagatgttgagcctagatatttcgagaaagtatctaaaactgaatggaagtacataactggaccaaaaagttattgggaaaggaggaaaaaccacgattggtcagacgtttcccatttatggtga

SEQ ID NO: 1133 - DNA, 2145 bp, Saccharomyces pastorianus
atgtctcaccttattactttagctacgtgtaatttgaaccaatgggccctagattttgaaggtaatagagaccgtattttagaatctatcagggtcgccaaagaaagaggtgccagattacgtgttggtccagaactagaaattactggttatggatgtttagatcattttttagaaagcgatgtctgtctccattcgtgggaaatgtatgcacaaataattaaaaacgagaaaactcatgggttaatacttgacgtcggtatgccagttttacataaaaatgttcgttacaattgtcgtcttctatcattggatggtaaaatattatttataagacccaaaatttggttagcaaatgatggtaattatagagaaatgaggtttttcactccttggatgaagcctggtgtagtggaagactttattctcccacctgaaattcaaaaagttacaggtcagaggcttgtgccatttggtgatgctgtaataaattctttggacacttgcattggtacagaaacttgcgaagaattatttacaccccaatcgcctcatattgccatgtcgttggatggtgtggaaatcatcacaaactcgtctggttctcatcatgaattgcgtaagttgaataaaagattagacttaattttgaatgccactaaacgttgtggtggtgtttacttgtatgctaatcaaagaggttgtgatggtgacagattatattatgatggttgtgccctgattgccatcaatggtacgattgtagctcaagggtcacagttttccttagatgacgtagaagttgttactgctaccgtagatctagaagaagtgagaagttatcgtgcggctattatgtcccggggtttgcaggcttctttatcagaaatcaagtttaaacgtatcgatattcctgtagaactagccttaatgacctccagattcgatcctacagtatgcccaacaaagatccgagagcccttttaccactctcctgaggaagaaattgctttgggtccagcttgctggatgtgggattatttgagacgttgcaacggcacagggtttttcctgcctttgtctgggggtattgattcttgcgcaaccgcaatgattgttcattcaatgtgccgcttagtaacggaggccgctcagaatggaaaccagcaagttatcaaagacgctcgtaagataacacgtagtgatgatgattgggtcccaagcactccacaagagctagcctcaaaaatgttccattcatgtttcatggggacagaaaattcatctaaggagacaagaagtagagctaaagatctttcaaaggctattggatcctatcatgttgacttaaacatggactccctggtaacgagtgtagtgtctttatttgaagtggctacgggcaaaaaaccaatatttaaaatctttggtgggtctcaaatcgaaaatttggctttacaaaatatccaggcgcgactaagaatggttcttgcttatctgtttgcccaactattgccgtgggttcgtggcattccaaattccggcggtttgctggtgctaggtagtgccaatgttgatgaatgtttacgtggttacttgacgaaatatgattgttcttcggctgatattaaccccatcggaggtatatcaaagaccgatttgaaaagtttcattgcatacgcttctaaagaatatgacatgccaatcttggacgactttttaaatgctacgccaaccgcagaactagaaccgatgacaaaggattatgttcaatcagatgagatagatatgggaatgacttacgaggaattgggtgtgtttggttatttaagaaaagttgagaaatgtggtctttattctatgtttttgaaacttcttcatcaatggtcaccaaaattatcgcctcgtcaaatatctgaaaaggttaaaagattcttcttcttctatgctatcaatagacataaacaaaccgttttaactcctagttatcatgctgaacaatattcaccagaagacaacagatttgatttgcgtcccttcttaatcaacccaagattcccatgggcttcaagaaagattgacgaagttgttgaacaatgcgaatcgcacaaagcctcgaagcttgacattatgtcaattgattag

SEQ ID NO: 1134 - DNA, 3339 bp, Saccharomyces pastorianus
atgcgcgtacctatgaggaatatgttagtagtggcgctgctcgtttgggtacttacatctctggtttcatgctcagatcctcttttgtcccaagctctaagacggcagataccaaacaatgaaatgacatccactaaaaaactcaattcaaactctagctcagacaaaagtatacctcttcattttcctcccgctagaactacagaacatttaccaaaggaaaaacacagcttgaacccaacacctaatttgttacatactcgacgtgctgacaaaagagcccataaggctgctaattccataagtgtgccatatatggaaagccgttctttagaggatttaagcttatccgatatattaatcgcagccgacgttgaaggtgggctccacgccgttgacagaagaaatggacatatcatatggtccattaatcccgacaaatttcaacctctgatagaaatccaagaaccttcaagattagaaacatatgaaactctaattatcgagccttgtggtgatgggaatatatactactttaacgctcatcaaggattgcaaaagcttcctctgtctatccgtcagctagtttcaacttctccgctacacttgaaaacgaatattgtcgtaaacgactcggggaaaatcgtagaagatgaaaaggtgtacactggatcaatgaggactataatgtataccattgatgctttgaatggtgaaataatatcagcttttggacctggctcaaagaacgggtattttggaagccagagtatagattgttcgcccaatgagaagataaaactccaggaatgtgaaaacatgattgtaattggtaaaactatttttgaattggggattcactcttatgatggagctagttacaacgttacttactctacatggcaacaaaatgttttggacgttcctctggcacttcagaatacattctccaaagacggtatgtgtatagcgcccttccgtgataaatcgttattggcaagcgattccgatttcagaattgctagatgggtttctccgacatttccaggaattatcgttggcttatttgatgtgtttaatgaccttcgcactaacgagaatatattagtgccccatcccttcaacccagctgaccacgagagtgttctgagtaacaaagtttacttggatcaaacatcaaaactttcatggtttgctctatctagtcagaatttcccttcattagttgagtcggcccccaaatccagatatgcttccagtgatcgctggagggtttcttcgatctttgaggatgagactttattcaagaatgcaattatgggagtacatcagatatatggcagtgaatatgaccaactctatgaaacttatgggaaaccgaaggcattggacaccactcagaagcattcccctttgatgattgattctcccatcgatgctactaagttgcctcagaacagagatatagattcactaaacgaatatatgtcgtcagaagactttgaggcatatagagaaaaggtccataaacaaatatcaagagagctaaggaataagagtaagaattctttaattctgagggtcggtagtctcgtatatcggatcatcgaaacaggtgtgtttttattattgttcctcatgttttgtgctatcttgcaaagacttaaaattttgccgccactatacgtattattatcaaaaattgggtttatgcctgaaaaagaaattccagcaattgaactaaactcagaagattctgcaacaactggaagtataaccaagccgtttaatacaaaacctgaaaagcaggttgtttttgaaagtgcgctcaaaaatgcaaacccgaaatcacagaacgataacgatgacggtgatgatgacgacgatgaaaaatcacaagatttgactttagagaagaagaagagaaaaaggggatcgagagggggtaagaagagcagaaaattacgcaatgcaaatataccaaactttgaacaatctctaaaaaatttagtagtgtcagaaaaaattttaggttacggatcatcgggaaccgttgtattccaaggcagtttccaaggcaggcctgttgcggtgaagagaatgttaatcgatttctgtgatatagctttgatggaaataaagcttttaactgaaagtgatgatcacccaaatgttatacgatattattgctcagagacaacggatagattcctgtatattgctctagagctctgcaacttaaatatacaggatttgattgaatctaagaacgcatcagatgagaacttgaaattacaaaatgagtacaatcctatttcattactgaggcagatagcggctggggtcgcgcatttacattcgctgaaaattattcatcgggatttaaagccccagaatatacttgtatctacgtcgaacaggcttactacagaccaacagaccggagtagataatctcaggattctaatatcagatttcggtctctgcaaaaagctagattctggtcagtcgtcctttagaactaatttgaataatccttctggaacaagtggatggagggctcctgaactgcttgatgagtcgaacagttttcaatcccaagttgaaactgaacattcttcgagcaggcatactgtactttcatctgattccttttatgatccatttaccaaaagaaggttaacaagatctatcgatattttctcaatgggatgtgttttctattatattttatccaaaggtaagcatccttttggtgataaatacacacgtgagagtaatataataaggggaatatttagccttgatgaaatgaagtgtcttcgcgatagatctctggctgccgaagctacagatttgatttctcaaatgatcgatcatgatccattgaaaaggccgactgctatgagagttctaaggcatccattgttttggccaaaatcgaaaaaattagaatttctcttgaaagtcagtgatagattcgaggttgaaaacaaggaccccgcaagtgacttgttattgaaattggatgatatttcaggctttgttattcctaatgggaactggaccgtcaagtttgataaaaccttcatggacaatctcgggaagtacagaaaatatcattcttcaaagctgatggatttgttgagagctcttagggataaataccatcatttcatggatctgcccgaagatatagcggaaatcatggggccggtacccgatggattttacgattactttatcaagcgtttcccaaacctactaatagggatttataagattgtcaaggagaacttgagcgacgaccaaattttacatggatttttgtattcataa

SEQ ID NO: 1135 - DNA, 888 bp, Saccharomyces pastorianus
atggctgctggaaatgagataaacatcacgaataagctcaaaaggcaagagatttttgctgatataaaacatgagaagaataaagaacgtcatacaatgagaagaaagagggctaaggacgagagggagaacccagaactacgggagcaaagattgaaagataacgtaacgaagactatagaaaacacgagggtctatgatgagactattagcaaagaagtggaaggggacgaagaagatttgatgaaatactttaacggtaattccaacgaaccaccaaagatcttcctgaccacaaatgtgaacgcaaaaaagagtgcttatgaatttgctaacatcctgattgaggtgttgccaaatgtcacttttgtgaagagaaagtttggctataagttaaaggagatatctgatatttgtataaagagaaatttcaccgacattgttataatcaatgaagataagaaaaaggtaacgggtttgacattcatacatttaccagagggcccaactttctacttcaaattatcgtcctttgtggaagtgaagaaaattgttggacacggtagaccaactagtcatattccagagctgattttgaacaactttcaaacaagactaggtcaaacagtgggcaggttgttccagtctattttacctcaggaccctgatattgaaggtagacaggtgattactctacacaatcaaagagactacattttcttcagaaggcatcgttacgtcttcaaagacaatgaaagagtgggtttgcaagaactgggcccacagtttactcttaaattgaagagattgcaaagaggtattaaagaggaaactgaatgggaacacaagcctgaaatggataaagaaaagaaaaagttctatctatag

SEQ ID NO: 1136 - DNA, 849 bp, Saccharomyces pastorianus
atggacccaagtttagttttagagcaaacaatacaagatgtgtcgaatctcccatccgagtttcattatcttctagaggagatcggctcaaatgacttgaaactcaacgaagaaaaaaagagatatgagcaaaaggaattccagatacacaagtttataaggcagcaaggctccataccgaaacacccacaggaggacgaactagacgaagaaataaaaggttcacttttaaaatgtcagtctctacaaaaagaaaaatgcgttctagcgaataccgcgctctttttaattgctagacatttgagtaagttagagaacaacatagctctattagaggaagacggtgtgctagctcctgtagaagaagacggggacatggaaagtgctgctgaagcctccagagaaagttcagtaatgagtagtggtagcatgaagaagaaacgagctgcgtctagctcaggatctataccgcccactttgaaaaagaaaaaaaccaatcgtgcatctaagctccagaatgaaatagatgtttcaactacagaaaaatctgtcaccccaatgagtccgagctttgaaaataaaatcgcaaggacaaaagaaatcaaaaataatagaaatggcaagggtcaaaacggctcatttgagaatgaggacgaagacaaaaccttatactgcttttgccaaagggtgtcattcggcgaaatggttgcttgcgatggtcctaactgtaaatatgaatggtttcattatgattgtgttagtttaaaagaacctccaaagggtacgtggtactgtcctgactgcaaaattgagatggaaaaaagcaaattgaaaaggaaacgcaattaa

SEQ ID NO: 1137 - DNA, 1935 bp, Saccharomyces pastorianus
atgtttagaattcttcactttaagaatcacagcctgtcctgcaggggtcatttttcttcccaccctagatacaactcgatacctttgttgattacacattttaggcacaccttttgtaccaccagaaaagatagtggacagaataaatacagatctgaaagttcaaggccaaagttaagtaaaaaatccgaacaagcaaattatcctttagatactttacgcgaagatatttcaataatactgaatgatatatccggaataggccgctcgctgatagtcaatgcgctcgagccaacgaataatatggagggaggtgatctaatattgcctcttccgaaaataaaggtagctaatcccgtggccgttgctaagcgatgggccaccgagttaagcgcgtacgacagtttaggtaaagtttgtgcaaaggggcccttccttcagttcttcttcgatcagaagtatcttctccaatcagcagtaccgagtatactgcttcaaaaagaaagatatggtcaggaaaaatcttgtctgcagaaaaaagttgtagtcgaattttcatcgccaaacattgccaaaccgtttcatgctggtcatttgagatcgacaataataggtgggttcctttcaaatttatacgaggcaatgggatggtcagtagttcgtatgaactacttaggtgattggggtcgacagtttggtttattagcagtaggttttgagaaatatggtaacaaaaaggcgttagaaaagcagcccattcaacatttattcgaggtatatgttcaaatcaacaaggaccttgcggaagaagagaaggaaaacgacacatctcaatgtggcatcagtagcagggcccgtacgttcttcaaaaaattagaaaatggagaccagaatgctaccaagatctggaatagattccgctcactatccatccaccactatatccaaacgtattcacgtttgaacattaattttgacatattttccggggaatcgcaagtatccaaagaatccatggatgaggcattaaacatattttaccaaaaccatcttgttgaagaaaaggatggtgctctggtaattgatttaacgcaatggtcgaaaaacctaggtaaagctgtggtacaaaaatcagacggaactactctgtatctgacaagagacgttggggcagccatggagcgcaaaatagatttaaaatttgacaaaatggtatatgtgatttcatctcaacaagacttgtacatgtcccagctctttatgatactacaaaaaatgaacttcgattgggcaaaagatttgaatcacgtcaacttcggtatggttcaaggcatgtcgacaagaaagggaaacgtggttttcttagataccattctagacgaagcaagggataaagctttccaaattatgaaaaacaacaaaataaaaatagcgcaagtggaagatccacatcaggttgccgatttaattggtatatctgccataatcattcaagacatgaaggccagacgtatcaataattacgaatttaactggaacagaatgctatcttttgaaggtgacacaggcccctacttgcaatacacacattccagactaagatctttggaaaggagctccagtaatattacagccgatatgctggtgcaagcagatttttcaaatctcgacgaaccacaattgattaagcttgtcagactcctggctcagtatccggacgtcctcaaacgagcgtttaaaacacaagagcccgctacaattataacgtatttattcaaggtttgtcaccaggtctcttcatgttataaaaatgtatgggttgcagggaagtctgacgatgttgctataccacgacttgccatatattcagcaagcagacaagtactgcacaatgcaatgtcactcttagggctagtaccagtcgatagaatgtaa

SEQ ID NO: 1138 - DNA, 2796 bp, Saccharomyces pastorianus
atgtctcagcagaatattttggcagctagtgtttcagcgctctctcttgatgaccctgctgtgcattcaggtggagcttcctctaagaaaagcagaagacctcatagagcataccacaacttttcctcgggtactgttcctaccatgggtaactcgccctataccacacctcaattgaatcagcaggatgggtttcaacagcctccccaggcatttaccccgagacaatttggtggagctggctttaacaatggttcaggatccgttatgtccacaccggtaatggggagtcaagagcagtttggtgcgagtgaagcctcttcaccttacggtcagtccggtcttgatattacgatacctcagccgacttcgcatattgtcccaactcaaagattcgaagatcaagcacaatatttacagcgatcttttgaaacgtgcagagattcagtgcctcctttacccacaacacagttctattgtgttgaccaaggttcatgcgatccgcatttaatgagtttgtccatgtacaatattcctgagagtgaacatttaaggggcgctaccaaactaccacttggagtaaccatccaaccgtttgccagtttgacattaaatgacgcggaagttcccaccattcctttaccaatggatgggacacctttgcgttgtagacgttgtcgtgcatatgcaaatcctaaatttcaattcacttatgattcgagtgttatttgtaatatttgtaaagttaagatgcaagttccggcagaacactctgcacccatgggtcccaatggtcaaagaagcgatttgaacgaaaaactagaactattacaaggaactgttgatttcttggtgccaagtgtctacaacgccatccaagagaaagaacctttaccattacattacgtgtttttgattgatgtctcattattggctaatgaaaacggaagttctttagccatggtcgaaggtgttagatcttgtattgaatacattgcagattttcagccaaattgtgaggtggctttgatcgtttatgataataaattaagatttttcaatctaaggccagagttagacaatgctcaagagtacatcgtcagtgaactagatgatgttttcttgccattttatactggattatttgtcaaacctggtaactcgatgagaataatcaatgacactttgataaaaatcagtgattatatctctaccgataaatatagtcatgttccacaggtttgttacggctctgccttacaggccgcaaaattagcattggacacagtaactggtgggcaaggtggtaagattatttgttctttgaatagcttaccaacaattggtaatggtaatttatcattgaaaagggacaatgcgcacattgctcatgtgaaatgtgaaaatggattttacaagaaattagctacagagtttttgaaatcatacatttctttggatttgtatgttaccaatgccgggtttattgacatggttactgtgggccacccagtagagatgacatctggtatcttgaagtattatccacatttccaacaagaagtggatgcatttactttagtcaacgacatggtgacaaatgtttccaatattgtcggataccaagccttactgaaggtccgctgttccactgggttatccgtcgaacagtattattgtgactcgtccgaaaatactgatcatgatccaattattccagttttgacaagagattccacattagacgtgttactcaaatatgacaataaaatcaaagcaggaaccgacgttcatttccaaacggctttactatatacagacatcgatggtgttaggaaagttcgtactattaatacatcaggtgcggtatctaataatattcgtgaaatcttcaagtttataaaccagaatcctgttatgagaataatgatcaaagatgttattaagacactaggtgactgtgacttcgcaaaaattaggagattaattgatggtaaaatggtcgaaatattgactcagtataggggtttggttagtagcaattcgtctacacaattaatattgcctgattcgataaagacattgccagcttatatgttagcatttgagaagagcgaattaatgaagccaaacgcccaaagtactcgtggtaatgaacgaatttacgatttattaagatatgattcattgaactcagcacaactttgctacaaactttatccgcaaatcataccattccatgtattattagaagaaactgatctaaccttttatgatgccaacgataaattattacaaactaatcctgattcagtcaagaatttatccgtgagaagttcacattccaatttcgttaacggtggttgttacctgattttccaaggtgacatcatttacctgtggttcaacgagaataccaatagaattctgttgcaagacttattatcagtggaggaatcgttgcctatcaaccaaatttcgttgtttagtgggtcgttgcctgaaacgggcactgaaatcaaccaaaaagcatcgaatgttatcaagaactggcaacaaacggtcaacaagtcgactctaccagtggttttattaagacccaacgtcgaccaatactacagtaatgttatgagccagctgctctgtgaagataagaccgtcaataggatcgaatcgtatgacaattatttggtgataatgcataaaaaaattcaagataaactacaaaaagacgacttcatcaaagtgtcccccgcagcgcatgaaaacattcatcaaaagtttgtacaattctga

SEQ ID NO: 1139 - DNA, 558 bp, Saccharomyces pastorianus
atgaatatcagtggcacactaaatacgcttcggctgctttacaacccatcgctgtgtaagcctagtctagtcgtccccactttcaatgaactcccaataccaattcacgattctataaaggctgtggtggtggacaaagacaactgcatctcctttcctcacgataacatcatatggccggattactctcaacactgggagtctcttaaattgaaatatccgaataaatcgctcttaattgttagcaatacggcgggttccagttctgatgaagactatttgcaggccaaacttttggaagacaagaccggtgtacccgtattaagacattctacaaagaaaccaggttgccacaacgaaattttggattatttttacgagaacaagattataacaaacccaaaggaggttgccgttattggagataggcttttcacggacattctgatggcaaatatgatgggctcatatggagtatggatcagagacggcgttaaaatatcttctaatcctttatccaaattcgaaaagaaattgtatgatttttttggattttga

SEQ ID NO: 1140 - DNA, 3225 bp, Saccharomyces pastorianus
atgatggccaaaccgcaaaatgggaagcagggcctgtctgaaggggagatggacgtgagctcgctgtttaagaggacggaagttgttggacgagggaagttcggtgtagtttacaagggctataacgtgaaaacaagacgagtgttcgccatcaaagtactaaatctagactctgattcggacgaggtagaagacgtgcagcgggagatccagtttctggcgtcgctgaagcaaattcccaatatcacgcggtactatgggtcgtatttgaaagataccagtctttggatcataatggaatactgcgctggtgggtctcttcgttcgttgctaagaccaggcaaaattgacgaaaagtacattggggttatcatgagagaactgcttgtggctttgaaatgcattcataaagataacgtcattcatcgggatattaaagctgctaacgtattaatcacaaacgaaggtaatgtcaagctgtgtgatttcggtgttgctgcacaggtaaaccaaacttctttgcgacgtcaaaccatggccgggacgccatattggatggcaccggaagtaatcatggaaggtgtttattacgacaccaaagtagacatatggtctttaggtataacgacatacgagattgctacagggaacccgccatactgtgacgtagaggccttgagagccatgcagttgattataaaatcgaaaccaccgagattagagggcagatcgtacagctcctcgctgaaagaatttattgccctttgtctcgatgaggatcctaaggaaagattgtcggcagatgatcttttgaaatcaaaatttatcaagaaccataaggctactccgacttctattttgaaggaactggtatcaagatatttgcttttcagagacaaaaacaaaagcatgtataggatcgaggggagtatgccagagagcgaactattgaaaccgaccgaggctcaaagttcatcacaaaccagtgggggtaatgaagcacaaagaccagcgaaatcatctgagtatgaactcaagatggcgaacgaaggagacgtggaaaccaaatgggatttcgattccttgagttcgtcggattacattatcgagaataacatcaatctcgatgttcttgctgaagatacgaacaacgaatgggcgactgcacaacacgatcagtttaactatgcgtaccccgacgaagattcttattacttcgacccaacaaatcataataccagaccactagtttatcaagggactaccataggcaaaggctattctggtacaatagcacagaactccactctaaacgctcccgtaacaactaattacacaaattcaaaatacccttccaagatggtagctggaactacaaacacttctggaactcacactaatggtccgatgacatcttccaaaaaactagagaataaagctccaaagcagttgctcgagcttttcgaagacaacgacatcattactggtgaaaatgatatgaacgccgaagctcctaaaatgaacaagtctatttcttctttgaatgccggtaacaattcgagagaagatttcgtaccctccaatgaggtcaacgggaatatgaatagcaacaagatacggccgcatctcccacctttatcaaatgggaataactattacagccaaagtactcctgctttgccactactccaaacaaagtttaacaagacatcaaaggggcccccaacaagcgggttaacaacagccccaacatctattgagattgaaattccagaagaactaccggatagtgccttaccgacacccgtaagcgctgatccggtgttaattacaagcacaaaggcaaggtcctctacaatgacagctggtacatcaccgtcctccacctcagcacaatataagccagtcccaagcgtgtcgaggcgattgacagtaagtactaataggccagatcatagtccaagcatgataggaggtcagaaattaaccgcaacggcctccaccactgcaatcagcacgcttgctactagcagcagcatctacaacaacagtaatagtgccgatgatgaaacatcaagaggaagcagcggtagtaatactgcaaacagcatacagatgagcataagtaactcaagtaatacaacaaagttgttaactcataaagcttcgtctccttcaagaccgctactgggaacgggtacttctcccaataggaaaccagcaaattcgcctacacaaaatatcaatcataacggtattcacacaaatcttggggttcctcctacgatgaaaccgatggtcaatagcaaggatagcaaagatattcttttacaacctttgaatagtataactagctcttctaccatcaacaccactaatagcaatggtggtaatagcacgacgagtttgaatcatttctctaacgaaaaggaaaattcaagagttaacggcgacttcaaacgtaataacccaaacttaaaactacaaatgccattacctacgcctgttgtaagaaacaaattactggatccgaatacagcagctccatcgaataccaatggtatgccaggaagtgctggcatatgtacgaacgaaaacattaatcagtttggattcaacacaagtagcgcgtccaatattcctgtgtcaatgactccaataagtgaaaagcatattgattttggaagcaagattaagagaagtcagagtatctccaataggaagaactcttctgcttcggaacaaccattgaatatccttaactcaactgttcccggcaatccctgtggcaccaataacaataacaccggcgctaacaacaacatttctcttgctattaacacgggtgttgctggaaccaacactaatgccactgccgccaccattccaagttctaccacagctgccacaactgctccaatttctcaacagagtattcaaccgggaacccaatccaatcatattttgaattctactactgctgttgcgaacccaacaaatttgctaggcctagcgatgtatcctccaccacagagtttacaaatggagatgtttttggacttagaaacgagtctatcaggaaaacaaagacggatagacaggaaacctcaagttctgaaggagctagaaaatcttttacagatgtttgaggagggactcccttgtatcgaacatgctttgaaggagcaactcacgtcaacgctcatcaaggacaatgaccattag

SEQ ID NO: 1141 - DNA, 2553 bp, Saccharomyces pastorianus
atgacttcgattcaagaacggagcactaaagctcatcttcattctgttaaagagggtgaagttaccggccatcctaatgagatgttactcaagcaaaggaacttagtagggtctcacatccaatgcccatcatcccagacggctttagggagatctagggctggcagtaacacgatgaataaagtttcaggcttagacattgctcgaaggccaagtgaaaatttactattgaacatgcacagtaataatgacgataatgagggaaaaatcctgaactcatttgttaatacggctctaccaccaccgaaagtgaatggtgttcaaacgagacgtgaacgccccgcttccaatagctcaattggtaccaagactaccgaagtgttttcctccacttccggatcctcctccttggaagatactagtgatgagggagacaatcacgatgccgagaaatgtaggctaagtggtatgtccaacattttaatggacagggccacccaaggtatacgtaccgctgagaatgaaacgagaagggcaagtagccagtctagtatagaaacaactactgatagtgttaaaactgcactacagaaaagcatatccttagatgaaactgcaatggaaacatccctaaataactctagacgatcttaccaagaacaattttatgcaaagaaaaatcaagcatcgatgcttaacagcaaacaaagaacacgtgctaaatcgcaaaccttttcttccataggccataagaatccctattctcccttacaaacatttggtatagcctccaaattttctaattcaactagtcggttagaggcctctccactcgaatctaatattccatcacaaaaacccttgaatggcaaggcattaaccccatctcaaaagtatagacttcgtaaagagcagtcagaaacgaacttaagaaatactatcaaaagaagagagaaattctatgaaagtcaagaacagatcattgaattacaagaaggagacatagacgactcattgatttggaatgtccctatggcatcatactcgacaaattcttttttggcatcagcaaaacctgaagatatgaatcacttgaccgccaataatgtcccatcagaattttcggaagactctatgaacgataatactgacacgaaacaatcatatagacattcaaacatatcgtttgcgagcacaacctcaaatgcttctctgttagattacaatgaaatgcctacatccccaatccctgggttgaacaaagtatctgatttccaatttattcaagacacaacaaaaagtttagcttctgtttatttgcattcttctaataggctttcaagaaccaaactgtccgacagaaccaaatcatctgaatttttaccactagagttaaaagaagctcaaaatcaaggtatggaagatctaatactcatatcagaaggcaaactggatgcagtaagtcactcaaggccaagttggctacctcctaaggaccgtcaagagaaaaaaattcatgaaaagcaaatcaacaaaagcatgagtgttgcgtctcttgatcaattagtgaagaataaaggtaaagaagaaaaattgattagagacgacacaaatagacagaaatatgtgctattattggacagagacataacaagaaactcctctttgcaaagcctatgtaaaatggtttgggatactccatttagtgatgacactagatcatcaatatacagcgaaattcttcaaagtaaggctaaatttattaccaggaattttatccaaccatttagcgagcttcaggacctgttaacaagaatgggagatttccccaaaaacaaagaagttgaaatctcaaaaattattgaaacaagtttaaagcgaaaagtgaacggcttggatgacatatcaccgcagttaatgctaatgttgaaattaaaatccatctcgtcacagggtatagttactggtgacgaactcttattccatcacttcctcgtgagtggatcatttcagggcttaggacttgaggaaatttggaacatcgtcaatttggtgcaaatgacatgtttcaacgatctatgtaaagagaaattcgattctaagatcctagaacgtaagggcgtggccgccggatacttactgcaaaatgatgaattcaaaaatgaatttaatacagaatgtatcaacttcaacacgtggtggaacatcttggaacgcattgatcacaaacttttcatgtgggtcatggatatcatagtagtgaacaattctcagagttacaaaaatagcaccatcaatgaaaacgaattttccagcagggattgggaatattatcgttccaaaaaagttgtgactaactacaagatcttggtttcatttgcattgaatgtattattgaactatcattttgggttcagtgacttaaaaagcctttgtcacgtaggtgaccaaaggttttgcatccccgtattcatcgacgatgaactagtagacacagataccgttaacgacgtgtttataaaaaaatgggcccactattacaaaaagttttga

SEQ ID NO: 1142 - DNA, 984 bp, Saccharomyces pastorianus
atgtcatcactagtcactttgaacaatggttacaagatgcctctggtcggtttaggatgttggaaaatcgacaagaaagcctgtgcaaaccaaatttacgacgctatcaagctcggttatcgtttgtttgatggcgcttgcgattacggtaacgaaaaggaagtcggtgaaggaatcagaaaggccatatctgaaggtcttgtcactagagaagatatatttgttacctccaaattatggaacaatttccatcatcccgaccatgtaaaactagccttgaaaaaaacgttgagcgacatgggcctggaatacttggacttgtattacatccacttccccattgcctttaaatacgttcctttcgaagagaagtacccaccagggttctacacaggtgcggaggacgacaagagaggtcatataaccgaggctcatgtccctattatagatacataccgtgctttagaggagtgtgctgacgaaggtttgatcagatctattggtatttccaatttccaagggagcttggttcaagatttactacggggatgtagaatcaagcctgtggctttgcaaatcgagcatcatccctacttgacccaagaacacttggtggacttctgtaagatgcacgatatccaagtcgttgcctactcctcctttggccctcaatcgttcattgaaatggaccttggcttggcaaagagcacaccaacgctgtttgaaaatgacctagtcaagaaggtttctgaaaaccacccaggtagcactacctcccaagtgctcctgagatgggctactcaaagaggtatcgccgttattccaaagtcctccaaaaaggaaagactattgggaaatttggaaatagaaaagaaactcactctaaccgagcaggaactcaaagaaatttcttctttgaatgccaacatcagattcaatgacccatggacttggttggacggtaaattccccatttttgcctga

SEQ ID NO: 1143 - DNA, 1764 bp, Saccharomyces pastorianus
atgtcacatccacactctcatagtatatacctgtccgaggctcccgttaggagaccacaggccatgggcaattcgcttctaaggaagattcaaagagcctgcagaatgtcattagctgaaccagacttgggattgaatctagatattgctgattacatcaatgagaaacaaggtgccgctcccagagatgcagccattactcttgctaaattgatcaacaatagggaatcgcacgtggccatattcgccttatctttattggacgtgttagtcaaaaattgtggatatccgtttcacttgcagatttctagaaaagagttcttaaatgaattggtcaagagattcccaggtcacccaccattgcgttactctaagattcagagattgattttgacagctatcgaagaatggtatcaaaccatttgtaagcactcgagctataaaaatgatatggcctatatcagagatatgcatcgtttattgaagtacaagggttatgcattccctaagatcagcgagtctgatttggcagttttgaaacctagcaaccaattgaagaccgccagtgaaattcaaaaagaacaggaagtcgctcaagctgccaaactggaagaattgatcagacgtggtaagcctgaagatttaagggaagctaacaaattgatgaaaatcatggctgggtttaaagaagacaatgtcgttcatgctaaacaggccatctctaatgaattgaacaaattaaaacgtaaggcagatttgctgaatgaaatgttggagtcaaatgacttacagaattgggataatgagactacgcaggaactccaaggttcattgaaagctgcccaaccaaaatttcaaaaaattattgaagaagaacaggaagacgatacattagtgcaagatatactgaagtttaacgatacggtcaaccaattgttagagaaattcaacttattgaaaaatggtgagtccaacgctgcttcacaaatccatccaagtcatgtttctggtccaatacagcaatcttctggggctctaaccaatgaaattaacctagtcgattttaacgatttagacgaaacaccctctcaaggaaacaacactagtgctgcgggtacttcaggagaagtagaaacatctgccaatgatttattaggtgatctgactgacttatccatttcaaatactccaagcggtaaccaaacagcttttggtcttggaggtgacattgtattggggtcttctcaacctgcacctccagttaccactaccacaaattcgaataacgacttggatcttttgggactttcaagccctcaaccaacaactaataaccaagcattaaacggtggcgggtttgacattttggctggatttagcacaacatcaagtacggttgcctctctaccaaaccttgcaagaaccttggttaatgagtcatccaatttgagaattgagttcgaaatcatcagagagtccgattctgtcataaggataaaatccttttttacaaacttaacctcgtcgccaatctcaaatttagtcttcttattagcagtaccaaagtcaatggcattgaaattgcaaccacaatctggtaatttcatggctgcaagtgctaaagacggtatcacacaagaggggattattgaaaatgctccaattaacccttcgaaatctttgaaagtcaaatggaaggccacatattctgttaattccactccagccgacgaaacagctatttttacagtacctaatgtataa

SEQ ID NO: 1144 - DNA, 639 bp, Saccharomyces pastorianus
atgaaacatattctagtgtttggaatttatctgatctttgcgcttgtccaaagagtggaaggtgttcatttttacgccagacccggagaaactaaatgtttttatgagcatttatcaaaggggaacttattaattggcgatttggatatatatgtagaaaagaatggtatgtctatggaggacccggaagccagcttggccataaccgtggatgaaacattcgataacgatcaccgtgtcctgaaccaaaaaaactcacacacaggtgatttcagtttcacagctttagacacaggggaacataggatgtgcttcaccccgtcgtacaacaagaagtccactccagtaagagtgttcattgaactagaaatcggcaacgtcgaagcgcttgatagtagaaggaaggacgacatgaactcactcaaggggagagtgttccagttgacccaaaggctatcttcgattcgcaaggagcaagacaatatcagagaaaaagaggcagagttcaggaaccagagtgagtctgccaacagcaagataatgacgtggtccgtacttcagttcttcatgctagtggcagcgtgcgtcttccagctacgctacctcaagaatttctttgttaaacagaaggttgtatag

SEQ ID NO: 1145 - DNA, 1323 bp, Saccharomyces pastorianus
atggctgaacatcaacagggaagtacagaatctgagctggaaacattaaggttggagaatgccaaattaagggaacaactggctcgggtgcaagacaacaagaaggattacccattatctttggaggaataccaacgctatggtaggcaaatgattgtcgaggaaacaggcggtgtcgtgggccaagtcaaattaaagaacaccaaggtcttggttgttggcgctggtggtctgggatgtcccgccttgccgtatctggcaggcgctggtgtgggtcagatcggtatagtagataacgacgtagtggaaacttccaatttgcacagacaggttcttcacgattctagcagagtaggaatgttgaaatgcgagtcggccaggcaatcgattacgaaactgaatccgcacgtcaatgttgttacttatcccgttagactaaactcaactaatgcatttgagatatttgaaggttatgactatgtattagactgtaccgattctcccctaaccagatacttggtctctgatgtagctgttaatctgggaataacggtagtgtctgcatctggtttaggtacagaaggtcagctgaccattttgaactttaacagaatggggccatgttatagatgtttctatccaactcctccaccaccaaatgcagtgacttcatgccaagaaggtggtgtgataggcccatgcattggattggtcggcacgatgatggccgtcgagactctaaaactcatcctaggtgtctataccaatgaaaatttcaagcccttcttgatgctatattcaggcttcccacaacaaagtctgcgtacattcaaaatgagaggcagacaagagagttgcttgtgctgtggcaagaatcgaaccataacaaaagagaccattgaaaagggtgagattaattatgaacttttttgtggctcgcggaactataacgtttgtcagcctgatgaaagactaagtgtagaagcttttcaggatttatacaaggacaatgaccgtaaaacgaaccatatcttagtggacgttagaccatcccaccactacgaaatatctcattttcctgaggcaatcaatcttccagtcaaaaagttgagagatatgaacggtgatatcaagaagttacaagaagagcttcccactgtaggaaaggacaccgatatagtggttctctgccgttatgggaatgactctcaagtagcgacaagattgttgaaggacaaatttgggctctcgaacgtaagagacgtgagagggggctacttcaaatacattaacgatatagaccaaaacattcctaaatattag

SEQ ID NO: 1146 - DNA, 1137 bp, Saccharomyces pastorianus
atggttgatttgtcaacagctttgattcatggcgacgataaagacaacagagttactgacgttgcgcccccaattaatgtatccacaacgttccgttacgatgatgacgatttgattccatggacagagcgtgaaaatttggactttatggaaaagagacccgtttattctcgtctggcacatccaaacagcaccagattagaaagtgtcttttcagacatactcgatgggtatgctgttgtttattcttctggattagctgcgttcttcgcggcgatggttcactacaatcctaaaaagatctttataggtcaaagctaccatggtgttcgagcaattgcaaatatattgacccgtaattatgatatcaaacaatatccactagaagacattgaaaaatatgcaggtgaaggcgatattgttcatctggagtcgcctgtaaacccatatggtacgtcttacgatattgaaagttttgctcgcagagctcatgcaaagggcgccctactagtactagattccacgtttgcgtctccaccattgcaatatgcatggaattttggagcggatatcgtcttgtattccgctaccaagtacttcggcggtcactctgacttattgagtggtgtcctcgtagtcaaagatgaagctgtttctcggcgcctaaaggacgataggatttatttgggtaccaacgttgcaaatttagaaagtttcatgttattgcggtcactcagaacttacgaactgagaataaacaagcaatccgaaagtgctaccaaaatagttaaattcttgtttgatcatcagtccaaatttgataaagtactgaaaacaatctatcactcatctttacagaccgaggaatttgttaaaaagcaactagtgggtgggtatggtcctgttttcgccatcactctacataccaaggagcagtgcaagatatttcctctcaagttaaaatactttcaccatgcgacctctctgggtggcattgaatcccttgttgaatggagagcaatgacagacccatacatcgatcagactttgataagagtgtctgtaggatgcgagtccgccgatgatttaatcagggatttggcttcgacactgcaggagctgcaagatgctgcttga

SEQ ID NO: 1147 - DNA, 1473 bp, Saccharomyces pastorianus
atgttcaggatacaattaagaactatgtcaagcaaaacagctaaaaacgattacccaaaggagtttgtaaatttcttgaacagctctcattccccctaccatgccgtccataatatcaaagaacatttagtgtctaaggggtttaaagagttgagcgaacgtgaatcgtgggctgatgaagtcgcactcaaaggcaagtactttgtaacaaggaacagttcttctattattgcttttgctgttggtgggaaatggaaacccggcaacgccatagccatcacgggtgctcacactgattctcccgtattgaggatcaaacctatctccaaaagggtcagtgagaagtatctgcaagtgggagtggaatgctatggtggggccatctggcattcgtggtttgataaggatctgggcgtcgctggtagagtcttcgtaaaggacgccaaaactggcaaatccattgccaggttggtagatctaaacaaaccattgttaaaaattcctactttggctatccatttggatagagacgtgaaccagaaatttgaattcaacagggaatctcaattgctaccaataggtggcctacaaaaggataagactgaagcttctcctgcaaaagagaccgatgagtctggcttctcctctattaaaacaatagtggaaagacaccataaagaactattggagttagttgccaaggaactggccattgatgcaattgaagatatcgaagacttcgagttgattctttacgatcataacgcgtccaccctcggtggcttccacgacgaatttgtcttttcagggagactggataatttgacttcttgtttcacatcaatgcatggtttgacgttggcagccgacacagaaatcgatcaagaatcaggtattcggttgatggcgtgctttgatcatgaggagataggttcgtcttctgctcaaggggcagattccaacttcttgcctaacatcttggaaagattgaccattttgaaaggggacggttctgacgtatctaaaccattgcctaactcatcgattttggaaacctcttccaaatcgttcttcctatcttctgacgtcgctcacgcaattcatccaaattatgcaagcaaatacgaaggtcaacacaaaccactattgggcagtggtcccgtcatcaagataaatgctaaccagcgttacatgaccaattcacctggcctagtcctggtgaaaagactagcagacgccgctaaagttcctctgcagctgtttgtcgttgcaaacgactctccatgtggttccacaatcggtcctatcttagcgtccaagacaggtatcaggactttggatttgggtaatcccttgttaagtatgcattctattagagaaaccgctggttctgccgatttggaataccaaatcaaattatttaaggagttcttcgagcgctattcttctatagaatccgagattgttgtataa

SEQ ID NO: 1148 - DNA, 1251 bp, Saccharomyces pastorianus
atgtccatcaatactgccccctcgtcgccccccagccaggcgtctcccgcagcagcagcagcagccgctgctgctgcttcgcacgaccacaccaaatttaataatcccatcagattgccgatatccatctctctcaccattaatgatacgcttaatcacagcagcaataacaatggcggtaccaatggtttgggcattttgccctcgcgcacggctacttctttggccatggtgaacggtaacagtgtcaatgctgctactgctgctgccgccgccgccacagagacaagtgcagtccccgctgtggccagcacgaagagtatccgccatttcgtgtatcctccaaaccaagtaaaccagatcgacttctcgttagacatacaccccccaccaaacacctcgctgcccgagcggatagaccagcccattttgaaacacagaatggacaagcacgggctcttcagcatcaggctgaccccttttatagacacgtcatcctcttcttcagccaaccagggtcttttcttcgaccccatcataagaaccgcgggcgcaggctcgcagataattattggaaggtataccgagagagtaagagaggccatttccaagatcccggatcagtatcatccagtggtcttcaaatccaaagtaatatcacggacccatggctgtttcaaagtcgatgatcagggcaactggttcttaaaggacgtcaagtcctccagtggaacgtttctgaaccaccaacgcttgtcgtcggcctccactacctccagcgaccaccttctacacgatggcgacatcatacagcttggcatggactttcgcggcggcacagaagagatataccgatgtgtcaagatgaaaatcgaactgaacaagtcctggaagctgaaggccaatgcatttaacaaagaggctttgaaccgaataaaaaacctgcaaaaactaaccacgggtctagaacaagaagactgctccatttgcctaaacaaaatcaaaccttgccaagccattttcatatctccatgcgctcatagttggcatttccattgtgtgagaagactagtaattttaagctatcctcaattcatgtgccccaactgtagatcgaactgtgacttagaagccactctagaatccgaatctgaatctgaatctgaattcgaatccgaaaacgagtcagacatcgagatgaatatcgacatggatacgaataacaatttaggcgttcgcttaatagattaa

SEQ ID NO: 1149 - DNA, 1929 bp, Saccharomyces pastorianus
atggccgaaaactcgttctcgaagttcatcgcaaggaacaagctagccattgtggccacagtctctgcggggaccgctgccgtaggtgcctacgtgtactaccatcagctcaagcaacagcagcagcagcagaaacagcaatcgaagggcactaaggaccgccagcgccagggagaggtatgtcctggccaggacgaagacgaggtagaattgaaggaggacggcagctccactgctggtagcaacaagaagaagaagaagaacaaacggaagaggaagaataagctcaaatcagcggaagagttcgagtaccccctcttgcctgacggcgagcccgacatggaccgattaagaggtctgcccgtcccacagaggcaggcgtttgccgtgcagttgaaagacaaaggtaatcacttcttcgccggtaaaaacttcgacggtgccatcaagtactaccagtacgccatcgagctggacccgaacgacccggtgttttactctaacatatctgcctgctacatttccacgggcgatctggacaaagtcgtggagtacactacaagggcgctcgaaataaagcctgaccattccaaggccctgttgagacgtgcgtccgctaacgagtcgctggggaattttaccgacgccatgttcgacctgtctgttctgtccctcaacggggactttgatgggacctccattgaacccatgctggaaaggaacttgaacaagcaggcaatgaaagtgctaaacgaaagcctaaccaagaacggcgacgacaaggactcgcaaatactaccttccaacacgtctttagcatcgttctttggaatcttcaaccctgacttggaaacttcccgtgtcaacaccagttcggttctggacagtgccagcgccacgttgtcggaggccttgcaaagcttatattccgctacaagggaaggctatctgatagcagacgatcttcttacaaaggccacagatgcataccattctctgatctgtgccaacaaggaggattccgctataagggaaaatgctgcattagccttttgctacgcaggcattttccaattcttgaaaaatgatctgttgaatgctcaagctctcttgcaagaagccatcaaccttcatccaaccccaaattcgtacgtgttcatggctttgaccgtggccgataaggagaactctcaagagtttttcaagtactttaaaaatgcaatcgacttggaccctgagtacccgcccacttattaccatcgcggccaaatgtactttatcctacaggagtacaccaacgctaaattagatttccaaaaggcccaaagcttaaaccctgggaatgtctacccctacatccaattggcttgtttgttgtacaagcaagataagttttccgaagctgagtctcttttcaatgaggcaaaattgaaattccccattttacctgaagtacccactttttacgctgagatcttgactgataaaggcgacttcaatactgcgatcaaacaatacgacattgccaaaaggttagaggaagtgcaaaagaaaatacacgtaggtattgggcccttgattggtaaggccactatcctagccagacagtcttctcaagacccaacccaactagatgaagaaaagtacaatatggccatcgatctattgactaaagcatgtgaattggatccaagatccgaacaggccaagattggtctagcccaactagagttgcaaatggaaaagattgacactgccatcaaattgtttcaggagtcggcaactttggcaagaaccatggatgaaaaactgcaagcaactacatttgctgaagccgcgaagatacaaaagcgtttgagagcagatccaatcattagcgcaaagatggagcaaacattggccaattatagggctcaaggaatgatgtag

SEQ ID NO: 1150 - DNA, 3258 bp, Saccharomyces pastorianus
atgtctggttactacagaagaacgcatccatcatctgggcaatataagcaccctcaagagcagcctaagtattcacgtcctggccaatatcggtacccaaatgaccaaacataccaacagtatcctaaccaatacaatcaacgtcgacactataatcacaatgaaagctcaaggcgacgttatagtgacgatcgcccgcatagctcaaatattaccaatacacgacattcatattacggtaataacgacaaccaaagtggcacatatgtaaataataaatctgacgttaataatgtaagaggtttgccacagtcacgctactcaaataccagtgctaatactgcatcaacatccccgaatacgcctctactcacaaattctgccttacttctacaacaaagaccaccttcagttttaaaatataatacagacgtcttgatgtccaagttccattacttcgaccctataaaaggcgaattctccaataaagacaaaatggtttcatggagggctacagataaagaatttgcggaaaccggatattacgtagttaaagagctacaagatggacagttcaaatttaaagtaaaacacaggcatccggagattaaagcatccgacccacgtaatgaaaacgctactataaccaatggaaaagttgcgagccatagaaaatgcaggaaatcgttagtcttgctacctcgcatatcatatgacaaatattctttagggccacctcctccatgtgaaattgtaatatatccaacgcaggattcaacaaccactaacattcaagatgtatcgataaaaaactattttaaaaaatacggcgagatctctcattttgaagcatttaatgatcctagtagcgctttacctttgaacgtctatctcataaagtatacaagccctgatggaaaacttaatgatgcagccaaatcagcctttaatgctgtaaggaagcatgaatcttcaggttgttttatcatggggtttagcttcaacatcgttctgaacaaaaatactatcttaaacaacatcattgccaaatttgtcgaaacaaatgttaaaaacttacaaaagttgcaagaagacctgaaaaaagccaaggaaaaggaaatggagaaagaaaaggtgaaggagacccaaagtaaagaaattaatttgccgaaggagcctaaggtagacacattatcgcatacatcaggatatgaaaagaagatcccctacgatcttttgggcgtagtcaataacaggcccgtcttacatgtctcaaaaatatttgttactaagcatgggtttcgagttgaggactttaagtataaattaagaggctacagatgtgcacgatttattgaccatccaacgggtatatatataatctttaacgacatcgcgcatgctcaaacctgttcaaacgcagaatcaggcaaattgacaataatgtctcgtagtagaagaatgcctattctaatcaaatttcacctgattctccctaggtttcaaaacagaaccaggtttaatggacccggcgcatcgactacatctgaacatgtacccgtggaatatgagtctaaagaagagtttattgacgccactgctaaacaaatactaaacgatctagagaaagccttgcatgtggatatcaagaaaagattaataggacccacagtgttcgatacattagatcacgcaaactttcctgaagtactagccaagagagaattacgggaaaaagagagaaaacaagaaatagcctctaaaattgctgaaaatgagttaaaacgtaaaggggaagctaaacgggactttgatttatttggtttgtatggtggatatgcaaaatcccaaaagagaagtttagatagacacagttcgcttacaatggaccgtacatctttgaaaaggaagaagttatccaagggcatcaaaccaatggcgcacttgttaaatgaggaaacagattccaaagaagctactccatataatgatggcggaactcctttctcaaatgatcgtttctcaaaagaagacgagaatatgacatcttctaattcatcatcatccgaagaggaggaggaggaaggaacagataagaaattcaagagtgaatctgagccaacaactccggagtctgatcacctccatgccattaaatcattgctgactgatgaaaacggatcccttgacatcttggatacacctttgatgtataagcctacagctaccgaaattcccgagcctgtatatccacctgaggaatatgatctaaaatatagccagacgttatcacccttggacctgcaaaatgctatcaaagatgaaaaagatatgctgattttaaaggaattgttgaaatcatacactgtcacttcttcttcttcggaatctggtgcgctcttggagtacaagacttggaaatctcgtagccaaaaggtcgaagaagaaaaggcatctgactggcaaatcaaacttaacggtactttgtttgatagtgaactacaaccacttagttccttcaaagctgaaggctttagaaaaattgcagataaattgaaagttaactacttaccccatcgtcgcaaaatccaccaaccgttgaacactgtgaatattcataatgaaaagaatgaatacactcctgaactttctcaaagagaagaatcttcaacaaaagagccttcggactcagttccccaagaagtctcatcttcgagagataatagggcgtcgaacagaagattccagcaaaacatagaggcccaaaaggctgcaattggtactgaatctgaactgctgtcactgaatcaattaaataaaaggaaaaaaccagtcatgtttgcacgttctgcaattcataattgggggctatatgctctggattccattgcggcgaaggaaatgattattgaatacgttggtgaaagaatcagacaacccgtagcagaaatgagggagaaaaggtatttgaagaatgggattggttcaagttatctctttagggttgacgagaacacggttattgatgctactaaaaaaggtggtattgccagatttatcaaccattgttgtgatccaaattgtacggcaaagattataaaagttggtggaagaaggagaattgttatttatgcattgcgcgatatcggggctaacgaagaactgacctatgattataagtttgaaagggagcaaaacgacgaggaaagattgccctgtttgtgtggcgcccctaactgtaaaggtttccttaactga

SEQ ID NO: 1151 - DNA, 2874 bp, Saccharomyces pastorianus
atgaatcctttgtttagagtaccgaaagtatatctaccaatttgtagagcctcaatacgatattctagtaatgcaaccgctcaaccaaaaattgcaaagctcaaaatcaccttgaacaaagctgccgaatcgagtagtgagaaaacagacacatatgcaattgatacagatagttgccctatagcacagcgaaatggtaaggcagcatcctctcaacccccgaaaccttctttgcctccatcgttgcaatatgtacgtgacttaatggatttgtataaaggacatgtggttctaacacagatggggtcgttttatgaactatactttgagcaagcagtaaaatatgcaccagagttaaatatagcattgacaaatagagcttacactcacggtaaagttccttttgcaggattccctgttcatcaattaagtcgacatttgaaaatgcttgttaataattgtgggtatagcgtaacaattgccgaccaatttaaaaagaatgatgtggcagataacgaaaccaacaaattttatagaagagtgaccaggatagttacgccaggtacatttatcgatgaagcgtttgagaatttaagagaaaatacatatttattgaatattgaatttcctgagaattgcatgagctcggtggcagatgcgagcctaaaagtcggtatatgctggtgtgacgtgagcactggggaaatattcgttcagcaggtatatctgaaggatttagtttccgccataacaagaattcagcctaaagagattctattggatgaaaagttgttggagttccatattgagtccgggacttggtatcctgagcttgttgaatttaagaagttctttatcaaatatcaaaaaatgcccagccagcatcgcactatagaatcgttttatgggctgttcaatctgggtgaaagagaagcaacagatagacaactgagaatccaatttcaaactttcacccagaaggagttggctgctttaagaaacactctaatttacgtaagcgaccatctacccaatttctccattaattttcaaattccccagagacagttggcaacagccataatgcagattgactcaagaaccagtactgctctcgagctacattcgactgtaagagacaacaataggaagggctccctgttgtcatctatcaggagaactgtgacaccttctgggacgagaattttaacccaatggttaagcggaccctcccttgatttaaaagaaatcaagaaccgccagagaattgtgggatttttcaaaagcaatgttgatatcactgaagacttacggttgatgttaaagaaagttcatgatctctctcgtatattgcaaaaatttagttttggaagaggtgaggcactagagctcattcaaatggcacgctcgctacaggtatcacgagaaatactggattatatattagaaaatacgtctttgatgagagttacgttgaagagccaaataatgcagctgattaaaactttggactttgaaaagaaattgattgatgatatattgaagtttttgaatgaggaggaactggttaaatcgcaagatattaagcaaagtgatgatttgaatgtgatccttgagacggacttaaagggaaagaaagcgtgtagaaaagatgaagttcctgaattgacaggatttattgtaaatccttctttcaacgccaaacttgggaaactgcatgatgcttatcaaaaaattgggcagaaaaaagtagaattaaacgcttcgctaaaggatctgtttattggcaaactaggcgccaaaacttttgctttgaaggaaaggcagaatggcgaatatgcactacatgtgacaggaacagcttccaatttgaaaaaaatcaatgaattaaccagtgaaagcgattttaatggaagcaagtttcatattttacagcaatctagccagactcgctggttgagtcacaaatcctggacagacttgggccatgatttagagctactggctttaaagatcagaaatgaagaggcgaatattattgattcatttaaaagaaaattcatcgataaaagcaacgaagtcagacaagttgcgactactctaggttacctggatacgttatcgtcatttgctattttagctaatgaaaaaaatttggtttgtcctaaggtggacgaaagtgataaactggaagtagtgagtggaagacatttaatggttgaagaagggctttccacgcgttctttagaaactttcacagccaatgattgtgagttggcaaaggacaacttatgggtaattactggaccgaacatgggtggtaaatctacattcttgaggcaaaatgcgatcatagtaattttggcacaaattggatgctttgttccatgcagtaaggcacatgttggtattgtagataagcttttcagcagagttggttccgcggatgatctatacaatgagatgagtacattcatggttgaaatgatagagacatcatttattcttcaaggcgctaccacacgatcactggccattcttgatgagattggacgtggaaccagtggcaaagaaggcattagcattgcatatgcaacactaaaatacctgttagaaaacaaccaatgtagaactctctttgctacacattttggtcaggaactgaagcatatcatagacagtaaatgcacaaaaagtttacgtgaaaagattaaattttatcaaagtggcattacagatttaggaggcgaaaatttctgttacgatcacaagttaaagccaggcatttgcatgaaatcagatgccattagagtggcagagttggccgggtttccgaccgaagcattacgagaagctcgagaaatattaggttaa

SEQ ID NO: 1152 - DNA, 564 bp, Saccharomyces pastorianus
atgagtgtcagtcttgagcatacgctcggattcagaataaaagtaacgaacgtgttggatgtggttactgagggtagattgtattcgttcaattcatcgaacaataccctcactatacaaacaactaaaaagaaccaatctcctcaaagtttcaaagtgatcaagtgtacattcgttaagcatttggaagtcattggtgacaaaccttcctttaattcattcaagaagcaacaaattaaaccctcatacgtgagtgtggaaagggttgagagacttctaaaggataaaataatagcatccaaaaagagtgaacttttgaaaggcaaaggagtgagtgtggaaggtcaatttatttttgatcaagttttcaagactataggtgacaccaagtgggtcggcaaggatatcgttatccttgatgacgttaaggtgcaaccaccatatacggttgaagacatcaaagttttacacgaaggcagtaaccaatccattacattgattcagagaattgtagagagaagttgggagcaattggaagaagacgatggtagaaaaggtggatag

SEQ ID NO: 1153 - DNA, 693 bp, Saccharomyces pastorianus
atgtctgaatttttgaacgaaaatcctgacatactagaggagaaccaacttcctaccagaaaagaagatagagccaaggaccttttgctaggcggttttagtaatgagactactttagagaggaggaggctcttgctgaagatagaccattctcccaaatctcaagtgttgcaagatatagagctattggacaaactactctcgattcgagctccacccgaattgacttccgatgaagatagtttgcaagaaagcgaggaagaattcatgacaagtcaaaacgatgaagaagaagagctagattttattgatgctcaagaaatatacgatttgattgcgcatatttctgatcctgaacacccactgagccttgggcagctttctattgtaaatttagaagacatcgaagttcatgattcaggtaagcagaccgaaatggcggaagtcatgatcagaataacgccaaccattacacactgctctctagctactttgattggtttggggatacgagtcaggttggaaagatctcttcctcctagattcagaatcacgattttgttgaagaaaggtactcatgacagtgagaatcaagtaaataagcagctgaatgataaagagcgtgtagcagctgcttgtgagaatgaccagttgttgggtgtggtctctaagatgttagtaacttgcaaataa

SEQ ID NO: 1154 - DNA, 1887 bp, Saccharomyces pastorianus
atgaacgaaatagaaaatgagagtccaattttggagaatgagctcgtatctaaatatgaaaaagaattgagtacagaacaagaagaagatgggcctatgatccttacgcagttgaatgaagacggcaccacttctaattattttgataaaagaaagcttaagattgcccctagatcaacgttacagttcaaagtgggtccaccatttgaattggttcgggactattgttcagtagtagactctcaaagtggaaaggaattgcaattgcggattattccaagaatcgacagaggattcgaccatattgatgaagaatgggtaggttataaaagaaattactttactctagtatccacgtttgaaacagttaattgtgactcagattcatttttaaagggtgtttttgacctgcagtttgaagattcttcgttagacgacaaagtaagagtgcagtattttgcgatcaagataagagctaagaatgacgatgacgacacagaaattaatcttgttcaacacacagctaaacgtgacaaaggaccacaattttgtccctctgtatgccccttaattccttcccctttaccaaaacatcaaattattagagaggcgtcgaatgttcgaaatgttgctaaaatgaagaaatatgattctactttttatttgcacagagatcaagttgattatgaagaatacagagtcgattctttattattttcttacccagaaaattctattcaaaaggttgcccgttatgaaagagttcaatttgcttcttcaattagtgtgaagaaaccatcccaacaaaataagcattttagtttacatgtaatattaggtgcagttgtagatccagatagcttccgtaatgttaaacccggaattccttacgatgaattggccttgaaaaatggatcaaaaggagtatttgtatatttgcaagaaatgaaaacaccccctctaattattagaggaagatctccgtctaattatgcgtcatctcaacgaataacagtaaggactccctcgagtgttaattcttctcaaaacaacactaaaaaaagaatggcctcaacaacacctcagccattgaaagaaagctgcttaaatgcaagacccgcgaagaggcgatccaaagtaacggtagatgtattgaactcaggtatatctagctcgccgattaaatcgcggcaatcaactccagaagaagcttcaaaggaaaacgaggatccgttcattaggccaagaagaagggtagaaactcttgaacatatcgaaaataaattgggtggcttgaaaactcaatatccagattcctctttaaaatatccgagctcctcttcaagggatgtagaagaatctctagaaaatgaagatttggcatattcgagcagtatttctgttaatatgaagcaaattgaactaaaaccagcatacacctttgaacatgaaaacgtttttagagttggttcgctagcattcaaaaaaatcagtcaactaccgcatgaaaaatacgatattacaaaagagaaaaaatgtatcgagcagaattattcaagaattgaggtatattcacgatctgagtgcaaaactagctctgggaacgaactctctcttccaaatatctccttttcgatattacctaactcagcagaaaatttccatttggaaactgcacttcttccagcaatggaagaggacgtaccaaggaccttttcaagaatactagaaacaggttcatttcaaaattattatcaaagaatggaagcagaaaacgtggatcgactatgttctaaaggtgtcaagttagtagcgagtggtactctaccatctcgtacatttactagcgaagaattatttgaagaagatagtttctataagcattaa

SEQ ID NO: 1155 - DNA, 768 bp, Saccharomyces pastorianus
atggctaggagcaagacaaacagcaagaagaattctgcgggtaaacgtttaatagacagggtagttcccatggacagaataaaaaaagttggtacgcataaaaaaacacctgtaaagcatactaaagagggatttagcgtagtaaacggtaaacttgttagcagtaatgacatcggggtacttttgagagaggctcaaggagccatagacaagagaaataatgtttcgcaaggaaaaaacaagaaaaatggcataaggactaataataagagtaataataggcaccaaatcaatgttaacaccagccctggctggggtgcccgcgaagaaacagaacgcgggccttctagcaaaagaagatcccagaaggccagcagtacaaataacatgaacatctcattgggctccaatactctcaatggcaagaaacagcgacaacaatttgacggagaaatgggaagtggcagccagctcgttatctcaaccaattcagacgcatcagataaattattgatgctgttcaatctgacattgggtgtaaaccacgaaaacttaaaaaacgtcctacaaaatctttcacaagtgcagatagctcacgttaaagtgagggatttgccttctggatccgctactgcaaaagtcagactagcatatcctacgacacaatctctagaaaaagtaaggaaattgtttcatggagctctagtggatggaaggcgtatccaagtggtgattgcatccgaagaatcgacacacttatcgtattag

SEQ ID NO: 1156 - DNA, 1155 bp, Saccharomyces pastorianus
atgaaccaattgagtgatagtgatgctttgtacaatcagccgatagtaatcgacaatggttcgggcattattaaggcagggttcagcggtgaggaaaaacctaaagctttggaatactctctcgtgggacatgcgaaatatgataaagttatgcttgagggccttcaaggagatacatttgttggaaataaggcgcaaagactgcgcggtttgctcagactacaataccccattgagcatggtgtggtcgaagattgggattcgatggaacttatatggtcacatattctaaacgacgtattgcaattgcaaaatataaaagagcatcctttgttgattacggaagcacccatgaaccctttgaaaaatagagaagttatggctcaagtgttgttcgaaacgtttaatcttcctgctttatatgtttcgaaccctgctgttttatcgttatatgccagcggaagaactacaggctgtgtggttgattgtggtgaaggatattgtagtacggttccgatttatgacggtttcgcattacctgcatctatgatgaggatggatatcggcgggagagatatcactaaacaattgcaatttcaattgcgaaaatcagctggcgtttctttattttctagtagtgaacgtgagattgttcgtacgatcaaagaaaaagtttgctatatggcgacagacattaagaaggaagaaaacacatatttgcaagaatctcaggattcgacatctgtattcaagctacctgacgggaaatgtatagaaatcgggaatgatcgatatcgtgctccagaaatattgttctctcctcaaatcgtcggctcggaatatgacggattatcggatatgtgcatgcaatcgatttggaaagtcgacttgaacttgaggtcaactttgctttcatcgataattcttagtggtggaaccacaactcttcgagggttcggagatcggatgttacacgatttagaagcttttactaaaggagcatctaagataaaaataatagcacctccagaaagaaaatacactacgtgggtaggaggttctattttaacagggttatccacctttcaaaggctttggaccaagaaatctgattggctggaggataataccagtgtatattccaatctaatgtag

SEQ ID NO: 1157 - DNA, 396 bp, Saccharomyces pastorianus
atgtcagaggatctttcacccaccagcagcagagtggatttgagtaacccccaagggtttactaaagacggagtggatttatcgaagttgacaccacaggaattgaaattatacaaaatgtatggaaaattgccatctaagaaagatctgttacggcacaagatgcaagaccgtcagtattttgacagcggtgattatgcgttgaagaaagcaggtgttattaaatcggacgatgttattgtgaataattctagtaataatcttccagtcaccaatcccagtggcctgagggagtctattattagaagacgtatgagtagtagtagcggtggcgactccatttcgagacaaggaagcatctcaagtggacctccaccaagatctccaaataaataa

SEQ ID NO: 1158 - DNA, 1647 bp, Saccharomyces pastorianus
atgtctaggcccatggtaagcactactctagcagtcaacaacctcaccaacacgaacgcaaacgtgaacgtgaacgctgccaagcacctctaccaccaggccgtcgactcacccgcaagatcctcaatgactgccacaaccgctatcaactccaacggcaactccgccagagacgactcgaccattgtcgggctgcactacaagatcggtaaaaaaataggcgagggctcgttcggtgtcctcttcgaaggtaccaacatgatcaacggcgtgcctgtcgcgatcaagttcgagcccaggaagactgaggctcctcaattgcgagacgaatacaaaacctacaagattcttaacgggacgcccaatatcccatacgcgcactacttcggtcaagagggcctgcacaacatcttggtaattgaccttttgggcccctccttggaggacttgttcgactggtgcagcaggaagttctccgtgaaaactgttgtccaagtcgctgtgcaaatgattactttgatcgaggacctgcacgcgcatgatctgatctaccgtgatatcaagccggacaacttcctgatcggtaggcccggccaacccgatgcgaacaacattcatttgatcgacttcggcatggctaagcagtaccgtgacccgaagaccaagcagcatatcccgtacagagagaaaaaatcgctaagcggtactgccagatacatgtccatcaacactcacttaggaagggaacaatcaaggagagacgatatggaagccttgggccacgtttttttttatttcttaagaggccatttgccttggcagggcctgaaagcaccgaacaataagcaaaaatacgaaaaaattggtgaaaaaaaaaggtccaccaacgtgtacgatctagcccaaggtttgcccgtacaatttggaaggtatttggaaatcgtcagaagtctttccttcgaagaatgtcccgattacgaaggctacaggaagctactactctctgtattggatgacttgggtgaaacagcggacggccagtacgattggatgaaattgaatgacggccgtgggtgggaccttaacataaacaagaaaccgaacctacatggttatggtcatcctaatccaccaaacgacaaatcaaggagacatagaaacaagcagcttcaacttcaacagcagcaacagcaacagcagcagcaacagcaacagcaactagagcagcaacaacaacagcagcaactagagcaacagcagcaacagcaacagcagaatgctcagaaaaatgatgctgatttacgcaattctcaatataaaccaaaactagaccccacctcttatgaagcataccagcatcagacccaacaaaagtatttgcaagaacaacagaagagacagcaacaacagcagcaacaacagcaaccacagcaactacaacagccccgtgttccaggccaacctcaacctcaactccaatcccaaccccaaccccaaccccaatcccaacaattcggtgccactcgctaccaaccgcaacaacaaccctccgctgctcttagaacccctcatcaacaactgaatgatgatagttcaagcttagcagcttcccgcaagggcttcttccaaaagttaggttgttgctga

SEQ ID NO: 1159 - DNA, 1110 bp, Saccharomyces pastorianus
atgaaattcacatcagtcttcaccttttttctcgctgctttaacagcttctgcaacaccactagggctttacaagagacagactacaaatgtatccagtaacagttctagttctggcggcggtacagttccagtaatcattactggaggttctgctgtatccagtagtagccagtctaacgtgaccaccactactctattcaattctacttctacattaaatgtcactcaactttaccaaattgcctctcaagtcaaccagactttacaaagtgggtcttcttctggtattattattgttactaactggcaatccattgaaactctaagtttcttctgctcaattgtttttgatacatccaagaccattgtcattactgaaaattacttgtggggtgtaccaatcttaagcagttcgcaagcacaaggtagaggtactttggttgctggcagcgataatgttatatactctggtgttttcgcaccatataccgttcccgtgggtgtttcaagccaaaagcaagttcagtggttctacgacgcatgtcaaccaaccttgattgctagtaactctactatcagacttcagtattctaacttcaccaacacacagatatctagctccactagtaccagtagtacttcaggtggtgctggtggtggtgcttcaaacagctctagcaattcttcctctaccgcatctaactcatctactgcagctgggggggccgggtcgtcatcttcgtcttcatcgtcatcttctggtccattggttccaattatctacgaagaaggcaactctcaaactttgattcaatcgttaggctccaatattcagggtctagtcgtgatcagttctggtacgagcggtaacagtactacaacatcatgggcgtcggtccccttcccagttgtttatgctattgatgcgtcttccagtcatgatggttcgagtattgggttcttgagcaacacaagcgtcccacaaggcgcagtctctgccgggtacttatcaccaattcaagctcaaactttgttgtctatcgccatcaacaacaaggttacaagtgccagtgacttacagaagattttcccagcaagtcaacaataa

SEQ ID NO: 1160 - DNA, 951 bp, Saccharomyces pastorianus
atggcatttagtgattttgctgccatatgctccaagactcctctaccgttatgttctgtgataaaatcgaaaacgcatttgatactatcgaacttgactaccatacacgattttaatccatccaatttaaatgttggtgtactgccacgttgttatgccagatcaattgatcttgccaatacggtcatctttgatgtcgggaacgcatttatcaatattggtgccttaggtgtcatcctaatcatactttataatataagacaaaaatacactgctattggcaggtctgaatatatgtacttcttccaactgactttattattgatcatatttactctggtagtggattgtggagtgtcgcctccaggttctgcgtcatatccttacttcgtggccatacaaataggatttgctggcgcatgttgctgggctttattaataaatgggtttttaggcttcaacatctgggaagatgggactacaaagtctatgctattggttcgaggagcctccttattgggatttgtagctaacttcctagcttctattttaactttcaaagcatggataactgatcacaaagtagcgtcgatggatgcttccgggatgattgtcgtcgtctatataatcaatgccattttcttggcggttttcgtcatctgtcaactactggtttcattaatagtggtccaaaacctatgggctacaggagcaattgtattggggcttttcttctttgtagcaggacaagttttagtttatgcattctcttcacagatatgtgaagggttcaagcactacttggatggcttattctttggaagcatctgcaatgtttttacatttatgatggtgtataagacttgggatatgactaccgatgatgacctggaattcggtgtaagcgtaagcaaggatggcaacgttgtgtatgataatgggttcatgtag

SEQ ID NO: 1161 - DNA, 213 bp, Saccharomyces pastorianus
atgtctcgcgaagggttccaaattccaacaaatttagatgctgctgccgcaggtacctcccaatccagaaccgctactttgaaatatatttgcgctgaatgttctagtaaattatccttgtctagaactgatccagtccgttgtaaggattgtggtcacagaatcttgttaaaagccagaaccaagagactggttcaatttgaggcaaggtaa

SEQ ID NO: 1162 - DNA, 948 bp, Saccharomyces pastorianus
atgcttgtcggagtgagcggtacaaagttttgtgggtgcgaagacgtgattaagatattagccaataattttgattttgaattactcaatcatcgtgacaatcctgatgatattttagactatgcgaccaaaaattacacaagaaacttggtcgtgcctctagaaacattatcattactggagaaactggagaaacggcctttttttgttcacctttccatcgatgcttcgatcactacaagagttaaattatacaggacactgaataaagtggaaaatttgtcactggagcaaatagttcaagccattgacgaacatgattttcaagctgatggtatcaagttaagggagagatcgcatttgaagtttaaaatagtcaataaagaccgtgaccaaattaagcaacacttaattgatagtattaccatccaatttaagattcttaataacggcaaacaagcaaatacagaaatggtcccaccaatgagacctagttgggatagctatttcatgaagctggccacattagcggcatctcgttctaattgcatgaagcgtagagtcggttgtgtaatcgtaagggagtgcagagttattgccactggttataatgggacgccccgtcatttgacaaattgtttcaacgggggttgtccacgttgcaatgatggtgactccaaaaacttacacacttgtctctgtctacatgcagaagaaaatgcgttactagaagccggtagggaccgtgtaggtcaaaatgcgactttatattgtgatacttgtccctgcctaacatgctccgtaaagatcgttcagacaggaatcagcgaagtggtttatagccaaacatacagaatggacgaagaaagcttcaaagtcttgagaaatgcaggaatcactgttcgacaatttagtttcatggaagaaccaaggacagtgatggtttga

SEQ ID NO: 1163 - DNA, 645 bp, Saccharomyces pastorianus
atgtcatttattcaaaagagattactgtcgcagactaaattattacgctcccatgtggggtcactaccgctttacacatcgccagaagttcaggtttccatgagtacactgtctataccaaggattattagaaagggaagagcttcattgaatatatcacagaacattactgtagagggtcccaaaggggaactatccattgaagtccctgatttcttgcagttggatagggatgaaaagcacggtaaaataaatgttgtgattcaaaatgcagaggataagtaccagcgttccatgtggggtacggtaaggtcacttataaataaccacatcattggtgttactgaagggcatcttgccgtcctcagattcgtaggaacagggtacagggcccaattggaaaacgatgggaggtttgttaatataaaggtgggtgcgtctattaaacagggattggacgttcctgaaaatattgttgtcaaatcacctgctcctacatctctgatcatagaagggtgtgacaaacagcaagttcttctctttgctgcgaaattgaggaagttccatccaccagaaccatataaaggtaaaggtatttatgttaatggcgaaacaataaaattaaaagataagaaaatcaaataa

SEQ ID NO: 1164 - DNA, 552 bp, Saccharomyces pastorianus
atggttagaaaactaaagcatcatgaacagaaactgctgaaaaaagttgatttcctcgagtggaagcaggaccaaggtcatcgcgacactcaggtcatgagaacatatcatattcaaaatcgtgaagattatcataaatacaatagaatttgcggtgatattcgtcgcctcgctaacaagttatcattgctgtctcctactgatccatttcgtaggaaacacgaacaattattattagataagctatatgccatgggtgttttgactacaaaatccaagatatctgatctagagaataaaattaccgtcagcgctatgtgtagaagacgattgcctgtaattatgcacagaatgaaaatggcagaaaccatacaagatgcagtcaagttcattgaacaaggccatgttcgtgtaggtcctaatctaataaacgatcctgcttaccttgtgacaaggaatatggaagactacgttacttgggttgataactctaagattaagaaaactgtgttaagatacagaaaccaaatcgacgattttgacttttcgtaa

SEQ ID NO: 1165 - DNA, 1587 bp, Saccharomyces pastorianus
atgtggatactcctatacctttttgtcatatggtcctcactgcgaacgttcgtcactgcttcagactctacggcgacgatcgaaaatgttaccgtgacgagtgaaacggtttcaacgtcgctctggtccacgatgttcccccaaatgactgtggcctttaggtctcagagagacattatggggaaccttaccgttgaccagttaccatatgttggcgtgaatctgcgacgggtcttgctgaataacgaaactagcatggtaaatgacggcaacaatacgaagatacttaccttgatcaaatctatgttagcttccgaggccaacgtttttgttctggatttgaaacagcataataatgatctgatggtggtagattccacactgctgttcagcgacgttctgtccactttacaatcttttattgttagcacgcagaacaacctttacgcagacatgatcgtattattcttgaacatatctaccactgagcaaggttataccgcagacgattaccagatacaaacactgaacactaccttcttactagacaagaatttggggagcatgtacatttacaggcctacagatttacaaaatgacagagcaaagaataatgcttggaatgtctacggcaaatcttccacagatggctggcccacactaggctccgtactgttcgagcaaaaaaagagactaatcatcggcgagctgacccatgtcttcaatgaaactactgcaccatatattttctcccatgatgtgttccattatgaacaggggaattccacgttaggttgtccatccacagtggacggcctcactaatttatcatcagtccaatggagatttttggattcgcaattcaccgctggcgacatcaaagagtatatttcatgtgggttatcgccaataataagcaatccatctaacataaataatgtaacccaactgtcgggaataattcacgaaggcagtatctggtcatgggacaacaatcaaccatcgatcacccagtcaacttctaagtccatgaactcggccggcacgctagaggcttacaattgcgtcctcttgcactatttcgccaataatgggacagcgacttggcgagtcgataactgttataattccgatgttggactttgtagatatgagaattcggcattcaaatggttggtgagaacaaacaaggcttcgtattttgatttcgatagttataaggggtctaaatgtccggatcagtatagcttcaatatcccaagaacaccattggaacaaagatcgttgatctcttatttgcaaaacgagtccttccctgatacggaaatgtggatcgatttaaattcaatatcagtgagtaactgttgggtcagtggcggtccgtatgcaagttgtccgtaccaaaaagtcatttccacaaggaatttcgtgacaatgatggttcctgcatcggtttgttcctttgccctattatttattgttgtttacttgagtgtgttgagagtccctatttatgataacaggaaaaattggagaagagttatcaataaaatttctaagtcggaattagaaggtgtaccttcctga

SEQ ID NO: 1166 - DNA, 513 bp, Saccharomyces pastorianus
atgtcaagcaagacaagtgaccaatcagcatacacggtttccttccttaagactgataacaccagaaaaaacaatgccactaccgacaataacaacggcgacagtaacaacaacaacaacaacggcaacaatgcatccgcagagactgaaaaagacgctaataaggagaacatacctggtttagagggggaaatcacagcattccgaattttcaaaaagaagagcacgtcaagctcaaagacatcacatactagtagtaactttataaaaaagactatattcaaaagggacctcttgaagcaggattcgaagagaaaactacagctgcagcagaggtttgcatcaccgactgatagactagtatcaccatgctcgcttaagttgaatgagcataaagtgaaaatgttcggaaagaaacagaaagtcaacccgatgaaacttaacttcaagggtcatctcgaggccgattcggaagatgtagaaattgacgaagatgaggagttcttctactag

SEQ ID NO: 1167 - DNA, 1059 bp, Saccharomyces pastorianus
atggaatatatgcaaagctcgaactttttgaaactaaaaaggaagaccaatcaagttgtgagtgatgaagaactcgacgatgagctttataataaaaccaaaagacatagaggtagtgaggtaaaaatggcggagtatgattcagattctagtgtcgaggactcttcggatgacgaaaatggtgagaaagagttgaatatgaaggccaatgtgaagaatgagaaagaaagtgaagatatgtttctgtcagatgttgacgatgttggtgcccaaggccataagaagcatgaaaagtcaaagatccaacttttggatattgcagagtttagaaaggaaaatctggttgacctggacgttacggttgataacggcaaagtgcaagaagaagaaaaaattgtggatatagagccattcaatatcgatgatgaagtgcaacacggtgtatttgacaaagatggcaattacataaaagcagaggacaatgcagatgatgaaccgcaagacaacgaagaatggatgaacgacgtcatagatgcagaacaagcaaacagacttgaaaggaaacaaaatacaagggttcagaattcaagacactatatggtacatgaggcattagttattttcaagttttttcttactgatgataaagaaacagcgctagaagccctggcaaggttaaacaaactgcgaaaaatagccatctccaaaaagagtgattcagtaaaatacatcatccacgggatcgaactgttgtccgacttggccaacatactggaaaataaaggattcaacggaatttacgaatataatcgtaagaaaattcaggatgccattgaagaggagttgttcgatgatgcctctgcgataaataaccagaagacaaaactatggagttttagatggttgaataaacctggtcaaactctcggacaattcacgaattatgaaatgtcgtactggcaaaacacctacttccaaaacaacgtcattgtgaaatttcgcgaagaattggatcaagatgaaaactggatacatgtatcatgtctgaaatttatgtaa

SEQ ID NO: 1168 - DNA, 558 bp, Saccharomyces pastorianus
atgtctacgaacaaggaagaagaacatcagattgtttgcacacaggactttcttcgacaatattacgtatctgaaagtgtaagtattcagtttggattaaacaacaagactattcgaacgataaatgaagaagaatttaataatgcagcaatgtgcatcatgacacgtacgaactatcctgaatcaactttaaaacggtcagcttcaacttaccttttgaacagttatcacaagaagccagcgactctatctcttccttttgtctttggcgacactataaacctctcagaagacatggaggataacaacgaaaataatctattgtacagcgacacattatacggcgacgactcattgacacaaagaggtgaccaggtggtgtataaaatagatacacaagaagaagattctagctttacattgttacaaagtgaggccaatgaaacgaggccgctgtcttcgtctagcaccccacaaatactgcagtccgattattctgtcgtaatgcaagagggacagacatcaaatggaagcatatttcagtttagcagtccctga

SEQ ID NO: 1169 - DNA, 849 bp, Saccharomyces pastorianus
atgaacactggtcaatgccaaaccaacgcagtgcacacgtttgttaatagagcggaaaagggcgcgtcgtcaggctttgagaatgcgtcttcgtccaacagaaccaagagtattcaaggtccatcagcgacctgtacaattaacgttgagcagagatttttccggtattcaaacacatttgatcattcgccgtcttacagggatgcgttttctaggactacagaggatccaaaccagaaattctcagcgccaaaaatagactgtagaggaacttcctgggctacagatttcaaacgtaattacactagccaaatggaaatccctctgcgaaacgaattaaataatctcaacttaagtacagaaatacgctcgcctcaggcagcgccatctttagggttttcacgccatactatggacatggcttcgttttccacgacagatcatcaattaccgaaggcaaggaacctggaacttcctataaatagttgttttgactctttaatcaacgcagagttcttgaaactagaaggtaacgatttacacgaagaatccaatacaggcgaaataagtccaaacgcggggttggaaaaggaagaagctgccatgaaagggttggcttccgatatagtggatttttgtgatagcaatagcacggatgataacctaaaagaaagactagcaagttcaaaatttgttggactaatgggtaatattagtgatggctctgtgattttgaaaaaagatgaaggtacaaaaaaagattgtcgaaaacatgtaggtttttgttttgagggtactgaaagttgggctggcttcgaattccatgatgttgaagacagaattgcgtaa

SEQ ID NO: 1170 - DNA, 1890 bp, Saccharomyces pastorianus
atgacgacatatttcagattggtgaagggtgctaccaagatcaagtcggccgcgcccaaacagaagtatttggacccgatcttgttggggacgggcagcgaagaggactttcacgagatcgtgaaggctttggattcccgaattaatgacaccgcatggaccattgtttacaagactttgatagtggtgcacctgatgatgagggagggtgataaagacgttgcgttgcggtactactccaggaggctggaattcttcgacattcataatctccgtggctctaatggcagtgcgtctgcagatatgagggcgcttgaccgttacgatagctatctgaaggtcagatgtagagagtttagtaaaattaaaaaggactacgtgagagacggctaccggacgctgaagttgaatggcagcaactacggcaactccaaaaacaagcaacaatgtattgacgttgcgctagatcatgtggagtcgttggaggcgcaaatccaggccttgatcaaaaacaagtacacgcactttgatttgaatagcgaattgatcatatgcgggttcaagctgctgatccaggacctattggctctctacaatgcccttaacgaaggtataataacgctattagagtcctttttcgaactgtctcatcataacgcagaaaggactttagatttatacaagacgtttgttgacttgaccgaacatgtggtgaggtacttgaagagcggtaagagtgcgggcttgaaaattcccgttatcaaacacatcactacgaagctggttagatccctagaagagcacctaatcgaggacgataaaacccacaacacttttgtaccgatcgacaattctgaaggcagtattggctcagcggcgcccaagtcaattgcgcaggcaaggctggaacaaattcgcgaacaaaagaggatattggaggcacagttgaagaatgaacaggtagcgatatctcctgccgtcaccacagcgacgacagcccaaccatacaacccattcgggacagacccctccatgcatgctaagatgcaaatggcgggagctaatcaagtccaacaaaccgtcaacaatccgtttttagttcaaacgcaaccacagccacaagctgcccgcacagaacctgtaactctcaacgctacacagtatgtaatgactcaacccattatgaacgcgactccggcacaagaatctggtgtaagcgcacagcaaacaggctattattctatcaataaccacctgacccccacattcacgggtgcaggatttggagggtattctgtttcgcaaggcacgacctctggtcccaatcaacaagtcgttaaagcacaaactggttcgaacaacccatttgcactacacaacactgcgaccgtcgcagtgggaaactctacacaggaacctactttgccaaatctgttttcgcaaaacactgatctaccactacagcaacaagtaataagtaatcccttccaaaaccagacccaacacatccagcagcagcagcagcagcagcagcagcagcaacaacaacaacaacaacaacagaaaatacctccgcacgcaataaacaacgttatgacgactccgacgagcatgcaggggtctatgaacgtattacaacgttttgataatgcggaatctttgcctcaatacacccagcaaccgctacagcaaccgctacaacaaccacaacagcagcagggctattttgcacccgtaaactccactgtcaatcctattctaaataatgcgggtattgcccaaccgcagactgttccattatacccctcacagcaacagcagctgcagcaaccacaacaagggttgcgaaaccagtacacgagcagcaactttaatctaattgatatgtga

SEQ ID NO: 1171 - DNA, 390 bp, Saccharomyces pastorianus
atgtctacatcctcggtacgttttgcattcaggccgttctggcagagcgagacaggccctaagacggtccatttctgggctcccactttgaaatgggggttggttttcgctgggttcagcgatatgaagaggcccgtggagaaaatttccggtgctcaaaacttgtcgctgctctccactgcgatgatttggacccgttggtcgttcgtcatcaagcccaggaatatcttgttggcctcagtcaactcgtttctttgcctaacggccggctaccaattgagtagaatcgccaactacaggatacggaacggtgattccatatcgcagttattcagctacatcctcaggggtgccgacgaaagcacaaaggaaattactacaggcagataa

SEQ ID NO: 1172 - DNA, 4533 bp, Saccharomyces pastorianus
atgccaggaacgccacagaagaataagagatcggcgagtatatctatttcgcctatgaagactgcagaggagaaagagccacctcacaatgattcaaaagcaacaaagttaaaccaaacaaaaagaaaaaaaaagtacgcatttgctcctataaataacttaaatgggaagagcagtaaaatacccaatgctggtgtgttaaaatcaatatctgtttcacaagtacgaaatacagcaaggaccaaagaaacaagcaaaacgattagcaaaagcacaaagtcactaccgagttcgcaagctaaactcaaacgtgaagtctcaaatatgaccaagtatcacgacttcagtcatgatgaagacggccctatggaagaagtgatatggaagtattcgcctctacagcgagatatgtcggacaaaacaacgagtgccgccgaattttctgatgactatgaagatgcccaaaatccctcttcgactcctatagttcccaatcgtttaaaaaccgttctcaattttacaaatattcacgtacccagtgtaaacgaaaatccaatcacacaagaaaatgcagacgatcaaacacgatctagaccaacgaacatctcaccaaggggttcttttcgtaacatagatgacattctggatgacatagagggtgacttaactttaaaaccgaaaatgacgaagttcaacgatttgccttcttctcctaccaaagcacctgatgttgcacaaccagaggtgattgtcgaaagagcggataatgtaaataccacaggtgatagtaacgatggcgatgattctttaattgatattttaacccaaaagtacgttgagaaatacaaggatgttggtgaaagccaaattgcaaatcaaagcagcggagacgatcgactaagtgaagaaagtgaagaaaatgaagaaaacgaaacaaaagaagccaataaagtcaacgaactcaataagagtcaagcagatcacacatgtctaaaaattcaagaaaccgaaagaaacggggagaatttatcagacgaattttcagacgattcgttgatagaactgttaaatgtaaatgaaacgcaaacagcaccaaatgtcattgagcaagagattgaaaaggtcgaggaaatggtatctcacgatttgaaagtcgattatgataccgatttatctacgtatattctcaaagctaaatcaggtgcaccaagaaagggggtggtacgattggtagtaaccagtatacgtactgtagagctgccaaaaatcggaacacaaaaaatactggaatgcattgatgctaagggcgaactaagctctgttgtcgttcggcatccttgggtgtatttagagtttgaagctggcgatgtaatacatataatagaggggaagaatattgaaaacaaacgacttctttctgatgataagaatcctaaaactcaattggcgaacgacaacctactggttttaaaccctgatatattattttcagcaacatcagttggaagttcagtaggatgtttaagacgtgcaattctacaaatgcagttcaaagaccctcgtggagaaccaagtctagtcatgactctgggtaatatcgtgcatgaattactacaagattcaatcacgtataaactttctcacagcaaaatttcaatggaataccttgtgcaaaagttagattcactattggaaacttactcgtttgcaataatgatttgtaacgaagaaatccagtatgtcaaagagttagttataaaagagcacgctgaaaatattctgcattttgtcaataagtatgtgtcaaagaacaactatggctgctatacatctgtctcagggaccagaagaacacagccaatatcaatatcgaatgtaattgacattgaggaaaacatttggtctccaatatacggccttaaagggttcttagatgccactgtagaagctaacgttgaaaataatcaaaagtgtatcgttcctttagaagtaaaaactggtaaatctagaagtgtttcatacgaagtccaaggccttatatatacactgcttttaaacgaccgttatgaaataccaatagatttttttctactttattttacaagagaccaaaacatgacaaaatatccatctattttgcactctatcaagcatattctgatgtcccgaaacagaatgagcatgagcttcaagcatcaacttcagaaagtttatggtcaagctccatcaaagtttgaattaccacctttattacgagattcatcttgtgacacatgctttatgaaagaatcgtgtatggtactgaataaattactggaaaatggaacctcagaagaaagcggcctgattgaaggagaattcgatactttaacggagcacttgttgccaaacctcaccatttataaggatttctttacaaaatataacgatctcataacgaaggaagaatcaagcataacgtgcatcaataaagagctttttttattggacgggtttacgagagaatctagaagtgggaggtgtctgtctaatttagttgtgttagagatgattgatcatgaagaaaaggaaggcacgtatttatattgcttccaaagacacggtaaagataacgacacacaatccatgttatcttcgcaaatcacagtaaatgactttgtaattattagtgatgaggaaggccacttttgtctatgccaaggtcgtgtacagtttataaatccagacaacattggaatatccgttaagcggaaattattaaacaaccgactcttagataaagagagaggagttactaccattaaaagtgtagttgactctgatttagatctttctaatcttgtcgccactcaaaatctagttacttataggatcgataaaaacgacattcaacaaagtttgtctctagcacgcttcaatcttttgagtttatttctcccagctgtttcacctggtttggatatcattgacgaacgtagtaaattaacccgtaaaacaaagagatctgatggaggtaacgagactctacgaactcttctcgttgataatcgggcaccaatatttagaggtgtaaatgatgaccctgtaataccatatgacttaccggcggatatagctttaaacgtggatcaaagactagccatagataaaataatgagagccgaagactatgcattgatattaggaatgccaggtacaggtaaaaccactgtcattgcagaaattattaagattctagtctccaaagggaaaagtgtacttttgacatcatatactcattctgcagtggataatatcttgatgaaactgaataatactagcattaacataatgagattgggattgaaacaaagagttcactctgatacccagaagtatgtgccaaactatgagtcagtgaagagttacagtgattatctagctaaaataaactccgcttccgtcgtcgctaccacgtgtttgggcataagcgatgttctatttacactgcatgaaaaagactttgactatgtgatcttggacgaagcaagtcaaatatcgatgcctgtggctttgggacctttacgatatggatgtaagttcattatggttggagaccattaccaattaccaccattagttaaaaatgatgcggctaggttaggcggtttggaagactcgctattcaagaccttctgcgagaagcatccagagagtgttgtggagctcacttatcagtaccgtatgtgtggcgatattgttaccttgtctaactttttaatttatgaaaataaattaaagtgtgggaataacgaagtatttgtacagtctctggaattaccaattaaaggtgcattgtcacaatatagaagtgaatcgattgagtctaagaactggcttgaagatatactagaacccaacagaaaggtcatatttttgaattatgacagatgccccgacattatggagcaaagcgaaaaggataacataacaaatgtaggggaagcagaattgaccttgcaatgtgtagaaggaatgatgttgagcggtgtgccatgtgaagatattggcgtaatgacgttatacagagcgcagttgaggttactgaaaaagaaattcaataaggatgcttacaaagggctagagatcctgaccgccgatcagtttcaaggtcgtgataagaaatgtattattatttccatggtcagaagaaactctcaattgaacggggggtcattactaagagaactaagaagagtcaatgttgccatgacgagagccaaatccaaactgatcatcatcggctcaaaaagtacaattggttccgttcccgaaataaaatcgtttgtgaacttgttagaggaacgcaattggatttatacaatgtgcaaggatgggccatataagtacaagttccctgagagattggtgaacagtgagatggcatataaaggcttcaagaaaagaacgggtgccaaggctatcacgtctcaatccaaactcgttagcgacaaacctatcataaaggaaattttacaggagtatgagagttaa

SEQ ID NO: 1173 - DNA, 7254 bp, Saccharomyces pastorianus
atgagtggaataccgccgcctcctcctggctttgaagaacacgaagacttaccaccaccaccacctccgccacctggatatgaacttgaagaaccaaacaattcttcaatacagccaccaaatagtgatggtatattcttcccacctccccctcctcctcctccaccacctccaggtgactttgaagtacctatcgagccacctttagaggctgctttgccgccaccaccaccgcctccctcagacatcgatggattcgagaacaccaccacaattaagaaccagctacacgggaaaaggaaattgaacataatgaaggggtcgtctattactagtaaagaaagaaaacgtcagaaaaaaacggccaaaaaggctgtcaaaagcagtttatatactcccaaggccgaaatgcctcctgagcacttgagaaagattattaacagtcatagtgaaatggcttcaaagatgtacaatacggataagaaagcctttttaggcgccctgaaatatttaccacacgccattctaaaattattagagaacatgcctcagccatgggagcaagccaaagaagtaaaggttttataccatacctcaggagcaataacctttgtgaatgaaacaccaagagtcatagagcctgtatacactgctcaatggtcagccatgtggatagcgatgagaagagaaaagcgagatagaactcacttcaaaagaatgagattcccaccctttgatgatgacgagccacctttgtcatatgaacagcatatagaaaacattgaacccttagaccccataaatcttccattagactcacaggatgatgaattcgtcaaagattggctctatgattcccggcctttagaggaagacagtaacaaagtcaatggtacatcctataaaaaatggaattttaaactacctgagatgacaaacttatatagactatcaacgccattacgagatgaaatcacagataaaaactactattatcttttcgataagaaatcctttctaaacgggaaagctcttaataatgcaattcccggtggccctaaatttgaaccattatatccaagagaggaagatgaagattacaatgaattcaatttgatagatagagtgatatttagagttccgataagaagcgaatacagggtagcatttcctcatttatataattcaaggcctcgttcagtgcaaataccgtggtacaacaatccagtatcctgtactatccagaaccatgaggaccataatacacccgcattcttttttgatccgtccttaaatccaatactccttcatggcgacaagacatcaaatttcagcaaagagttaaacgcaaaagagattgaaagtttttctctaccagagagtttcgtacctattatggctgaggaagaagagcttattttgcctactacaaaagatgccattgcattatacaattcgcctttcccttttaacaggactcaagggaagatggtaagggcacaagatgttgccttggctaaaaagtggtttttacagcatccggatgaagaatatccagttaaggttagggtatcctatcaaaaattattaaaaaattacgtacttaatgaattacacaccacaccgcctacaaatcacaacaaagttaaattattgaagaacctaaaaaacaccaaatattttcaacaaacaacgattgactgggtagaagcagggctccagttatgtcgccaaggacacaatatgctaaatctgttaattcacagaaaaggcctgacttatttacatctcgattataatttcaatttaaaaccaacgaaaactttgacaacaaaagagcgtaaaaaatcaagacttggaaattcattccatttgatgcgagagttattgaaaatgatgaagttgattgtggatacacacgtacagtttaggttaggaaatgttgatgctttccaattagctgatggtatacattacattttcaaccatctagggcaattgactggcatttaccgctataagtataaagtaatgcaccaaattcgtgcatgcaaagatctgaaacacgtcatatactacaaattcaataaaaatatgggtaaagggcctggatgtgggttttggcaacccgcgtggagggtgtggctgagcttcttaagaggtaccatacccttactcgaaaggtacatcggtaacctgatcacccgccaatttgaggggcgttccaatgaagtagtcaaaactacaactaaacaaagactcgatgcatattacgatcttgagttgagaaactcggtcatggatgacattctagaaatgatgcccgagagcattcgacagaagaaggcgagaactattctacaacacttaagtgaagcttggaggtgttggaaagctaatattccttgggatgttcctggcatgccggctccaatcaaaaagataatcgagcggtatataaaggccaaggctgatgcatgggtatctgcagctcattacaatcgggaacgcataaagcgcggtgctcatgtagaaaagactgtggtcaagaaaaacctagggcgcttaacgaggctttggatcaagcatgagcaggaacgtcaaaagcagatacagaaaagtggtcctgatataactcccaaagaagcgacagctatcttttctgttatggtggactggctggaatcgaggagtttttcgccaatcccatttccacctctaacttacaaaaatgataccaaaattttggttcttgcattagaaaatctaaaggacgtttatgcatcaaaagtacgtttaaatgcatctgaaagggaagaactggcgttaatagaggaagcttatgataacccccacgatactttgaatagaataaaaaaatacttgttgacgcaacgtgtttttaagcctgttgatttgactatgatggaaaactatcaaaatatatctcctgtttatgcagtcgatcccttggaaaaaatcaccgatgcatatcttgatcagtatttgtggtacgaagccgatcaaaggaagcttttccccaactggataaaaccaagtgattcagagataccacctcttctggtatacaagtggtctcaaggcataaacaatctatctgacatttgggatgtctctaaaggtcaatccacagttttgctcgagaccacgttaagggaaatggctgaaaagattgattttactttgttaaatagattacttcgtctgattgtggaccccaatattgctgactacattactgcaaaaaacaatgttatgatcaactttaaggatatgagtcacgttaacaaatacggtctagtacgcggattacagtttgcctcttttatattccaatattatggactagttgttgatcttttgttgttgggccaagaaagggctgctgatttggctggccctgccaacaatccaaatgattttatgcaattcaaaagcagagaaacagaaaagacacatccgatcaggctctataccagatatttggatcgcatttatatggtctttcgctttgaagaaagtgagggaaatgaactgacagatgaatatttagcggaaaacccagatccaaactttgaaaatagcattggatacaataacagaaaatgctggcctaaggactcacgcatgaggctaatccgccaggatgtaaacttgggacgtgcagtgttttgggaagttcaaggcagagtgcctacttcaattacatccataaaatgggaaaatgcatttgtttcagtgtatagtaaaaaaaatccaaaattattattctctatgtgtggctttgaggttaggattttaccaagacaaaggatggaagatgtaatttccaatgatgaaggtgtttgggatttaatcgacgagaaaacaaagcagagaacagcaaaagcgtacttgaaggtatctcaagaagaaatcgataaatttgacagcagaataagaggcatattaatggcgtccggttccaccactttcaccaaagttgcggcaaaatggaatacctctttaatatctcttttcacttacttcagggaagctattgttgccacagagcctctattagatatacttgtaaaaggagagacacgaattcaaaacagagtcaaactaggtctaaactcaaaaatgccaacaagatttccacctgccgttttttacacaccaaaggagctgggtggtttaggtatgatcagtgcttcccatatcttaattcctgcatcagacttgagctggtcaaaacaaactgatactggaatcacacactttcgtgctggtatgacacatgaggacgaaaaattgattcccacgattttccgttatataactacttgggaaaacgaatttttagactctcagagggtatgggccgagtatgcaaccaaaagacaagaagctatacagcaaaatagaagactggcttttgaagaactagaaggatcatgggatcgtggtataccgcgtatcagtacactatttcaaaaagataggcacaccctggcttatgatagaggtcatagaatccgtagggagtttaagcagtactcactagagagaaacagtccattttggtggacaaactcacaccacgatggtaagttgtggaatttgaatgcgtatagaaccgatgttatccaagcgcttggcggtattgaaacaattttggaacatactctattcaagggaaccggatttaattcatgggaaggtctgttttgggaaaaggcttccggttttgaggattccatgcaatttaaaaagttaactcatgcacaaagaacaggtttaagtcaaattccaaatcgtaggtttactctatggtggtctccaactatcaatagagcaaacgtttacgttggtttcctagtacaattagatctgactggtatattccttcacggtaaaattcccacactaaagatatctttaattcaaatatttcgtgctcatttgtggcaaaaaatacacgaaagtatagtttttgatatttgtcagattcttgacggggagttagatgttctacaaattgaatctgtatcgaaggaaaccgttcatccccgtaaatcatacaaaatgaactcatccgctgctgatgtcaccatggatagtgtttatgaatgggaggtctcgaaaccttccttattacatgaaactaatgataacttcaaggatgtggttaccaataagatgtggtttgatgtgcaattgagatatggtgattacgattcccacgatatatctcgttatgtgagagcaaaatttcttgattatacaacggataacgtcagcatgtatccctcaccaactggtgttatgattggtatcgatctggcctacaatatgtacgacgcttatggtaactggtttgacggattaaaacctctggtacaaaatagtatgagaacgattatgaaggccaatccagcattgtatgttcttcgtgagcgtatcagaaaaggtcttcaaatatatcaatctagtgtacaggaaccgtttttgaactcttcaaactatgcagaactgttcaataacgatataaaactttttgtggatgacactaatgtttatagagttactgtccacaagacttttgaaggaaacgttgctacgaaggcaataaatggttgtattttcactttaaaccctaagactggccacttatttttgaaaatcattcatacttctgtatgggctggtcaaaagcgtctgagtcagttggcaaaatggaaaaccgccgaagaagttagcgctcttgtaaggtctctacccaaagaagaacaaccaaaacaaatcatagtcacgagaaaggcaatgctagatcccttagaagttcacatgcttgattttcctaacatagcaatcaggcctacagaactcagattgccattttctgctgcgatgtcaatcgataaactttctgatgttgtcatgaaagctacggagcctcaaatggttcttttcaatatctacgatgactggttggagcgtatttcgtcgtatacagcgttttctagacttacgttactgttgagagctttgaagacaaatgaagaaagtgcgaagatgattctactcagtgacccaacgatcacgatcaaatcgtaccatttatggccatctttctctgacgaacaatggattaatatcgagtctcaaatgagagatttaattttaacagaatacggtaaaaaatacaatgtcaatatatctgccttaacccaaactgaaataaaggatatcatattggggcaaaatatcaaagcgccatctgtcaagagacaaaaaatggctgaattagaggctgctagggctgaaaaacaaaatgatgaagaaactgtaggtgcatcaactgttatgaagactaagaccataaatgcgcaaggtgaggaaattgtcgtagtagcttctgctgattacgaaaaccaaacgtttagctcgaagaacgagtggagaaaatcagccatcgccaatacattattacatttgagactgaaaaacacttatatctcagccgatgattttgtagaagagcagaatgtttatgtgctcccaagaaatttattaaagaaatttattgagatatctgatgtgaaaatccaggtagctgccttcatttacggtaaagcggctaaagatcatccgaaggtaaaagaaatcaagactgttgttttggcgcctcaattgggtcacgtaggctccgtccaaataagcaacatccctgaaattactgccctgccagatacagagggcctggaattgctaggttgggttcatactcaaactgaagacctcaagtttatgacagcgtctgaagtaacaacacattctaaactttttgcagacaaaaaaagagattgcattgatatttccatcttttcagctccaggatctgtttcattaagtgcttacaacctaactgatgacggttatcaatggggagaagagaacaaagacgtaacaaatatattatccgaagggtttgaacctactttcagcacacatgctcaattactactttctgaccgtatcatgggtaactttatagttccatcaagaaacgtttggaattacacatttatgggcacagcctttgatccagaaggcgaatacaatttgaagtatggtatacctctggatttttataacgaaatgcatcgtccggtgcactttttacagttcaacgagctggcaggtgatgaagaattagaagccgaacaagcagacttgtttagctaa

SEQ ID NO: 1174 - DNA, 1881 bp, Saccharomyces pastorianus
atgaatgacgagggccaagacaaaatagtacaagacatacgtatacaactacgaaaggctgtcacagaattgtcacgatggaagatgtacggctcctcaaagtgggcagcggaggcactagtggggctcgtcgaacctatggatgtcgatcaatcacggtccttaatggatgaatctccactgagaaataagctaagtgtaccgaagcaaagctttcaaataccacaaaacgggtttgggctatcagagtccgagtacgatctctacctcctcggttctgcattatttgacgctaaagagtttgatcgatgtgtttttttcctaaaagatgtttccaatccatatctgaagtttttgaaattatacagtaaatttctgtcatgggataagaaaagtcaagagaatatggaaaatgtcttaactacggggaaatttgctgacggaacgtacagggctgataaagatggtgatggtaatggtaatgacgatatgaaccaaggtggacgtcaacgtagcaattctgggatgattaccagtgagcatgagacacaatcaaatatatcatcgattttaaaggagataaatgcgtttctggaagtttatgaagtgaaaatagacgatgacgaggctgacttgggactggcgctattatattacttacggggagttacgttaaaacaggaaaaaaacacttctaaagccatgtcatctttcctgaaatctctgagctgttattcatttaactggtcctgctggttagaattgatggactgtttacagaaagtcgacgatgcattgcttctaaataattatctatatcagaatttccaattcaaatcatcagagaatcttggtagccagagaacaatagaatttaatataatgatcaagtttttcaaactgaaagtatttgaagaactgaatggccaattggaagactactttgaggatctagaatttttgttacaggtattccccaatttcacttttttgaaagcatataatgccaccattagttacaacaatctggattatgttaccgcagaaggccgattcgatgacattgttaagcaagatccataccggcttaatgatttagaaacatattcgaatattctttatgtcatgcaaaaaaattcaaagttagcatatttggcccagtttgtctctcaaatagatcggtttagaccagaaacatgctgtatcatagctaattattacagtgctcggcaagaacatgaaaaatccattatgtatttccgtcgagctctaacattagacaagaaaaccactaacgcatggaccttgatgggccacgaattcgtcgaacttagcaattctcatgctgcgatcgagtgctaccgtcgggcagtggatatctgtcctcgagactttaaagcatggttcggattggggcaagcctatgcgctcttggacatgcacctatactctctttactatttccagaaggcgtgtacattgaaaccatgggatcgtcggatttggcaagtgttgggagaatgttacaataaaacaggaaacaaactcgaagctataaaatgttacaagagatccataaaggcttcacaaacggtcgatcaaaatacttcgatatattaccgattagcacaactatacgaagaacttgaagatctgcaggagtgtaagaagtttatgacaaagtgtgtggatgtagaagaatttctggaaggtgtagtgacagatgaaaccgttaaagcaaggctttggctggctgtgtttgaaataaaagcaggcaactatcaactagcgtacgattacgcgatgggagtgtccagcggaacgtctcaggagattgaagaggctcgcatgctggctcgagagtgtagaaggcatatgtaa

SEQ ID NO: 1175 - DNA, 1563 bp, Saccharomyces pastorianus
atggattttgcgcctgttgatcagcaccagcaccagcaccaaaatgctgctacgcttctatgttgtaactgtggtaccccgattgatgggtctaccgggttggttatgtgtttcgactgtatcaagttgactgtggacattactcaaggtattcctagagaggctaacatttcgttttgtagaaactgtgaaagatttttgcaaccacctggacaatggatcagagccgaactagaatctagagaattgttggctatttgtttgcgtcgtttgaagggtctgaccaaagtcagattagtggatgcttcctttatttggacagaacctcattccagacgtatcagaatcaagcttaccgtgcagggggaagctatgacaaatacgattattcagcagacttttgaagtggaatatattgttatcgctatgcaatgcccagactgtgctagatcctacaccacgaacacgtggagagctaccgttcaaatcagacaaaaagtggctcacaagaggacatttttgtttttggaacaattgattttgaaacataacgctcatgtggatactatttctatcagtgaagctagagacggtttggatttcttctacgctcaaaaaaatcatgctgttaaaatgatagacttcttaaacgctgttgttccaattaagaacaaaaaatctgaagaacttatctctcaagatacccataccggtgcgtctacttataaattttcatattctgttgagattgtcccaatctgtaaagatgatttggtagttctacctaagaaactggctaaatccatgggtaatatctctcaactcgtcttatgttctaagatttccaacactgtccagtttatggatccaacaactttacaaatcgcggatctgtcgccatccgtgtactggagaacaccatttagctccttggcagacgtcacccaattagtcgaattcatagtcctggacgtggattctacaggtataagtaggggtaatcgtgttttggcagatataacccttgctagaacttcagatttgggtgtcaacgaccaagtttactataccagatctcatctcggtgctatttgccatgcaggtgatagtgtcatgggttatttcattgctaattccaactacaattcagatctgtttgatggattaaatatcgactatgtgcccgatgtggttcttgtgaagaaattgtaccaaagaaagagcaagaagagtagacactggaagttgaagagaatggctaaggaacacaaggatattgacgcctctctggattacaactcgaaagcccaaaagcaagaaatggaacgtgccgagaaagattacgaattattcttgcaagaattggaagaggatgctgaattaagacaaagtgttaacctatataaaaaccaagcaccagctgcgcctactgaagagcatgatatggatgaagatgaagacgaagatgctccacaaattaatatcgatgaactactggacgaattggacgaaatgactttggatgatggagccgaagctgcccccgtagaagctcagcaataa

SEQ ID NO: 1176 - DNA, 2472 bp, Saccharomyces pastorianus
atggaaattaaagaagtagatgacagggctgaactactgaaatataccaacaatattcccttactcggcaaactagttaaccaccagccattgtggagtaccaatcctaagctgaagtccttttctttggaaaaactttcagctccggaccaaagacgtatacaagaggcactagttgtgaaagaccttttgaatgtattaattggacttgagggaacgtacatcagatatttcaatgagtacgaacccagtgatgcggaaacattaatcgaattcaagattgcgaagaaaatggacccttctttcaaaacattcagtagaagaatagttaggtacggtaagcaatacatgatattaacgaaggcgtatgaaacttggtccgacacgacttttggaatggtcttgcaaagattcggttatgaaataagaaaatttttagaagatgtttacctgaaaattttggtagaaaggctcgaaagggatttcaataaggtacctaatttttccattagagaactggagcagattatcaacgaaaccgaggtaaccaaacagatggaattgctttacaatatctacgaggaagtttgtaaggagatagaggaaagaagaacaaatcactcttcacaagatgacttcaataatttcatggacaatatgaaaaatgaaagtagtttacatttgaggttgatggtggcgttcgatacaacgatctatccagtacctaaaggtggcgttattataaaaatttttcagcgaaagatactcgaaaacatgggtgatagatcaaacgtgatatttctgaagaagctactaaataacataagccaggactattgtacgatgttatatgagtggttaacacagggctcattaaacgacccttatcaagaatttatgatttatgatgatttagaaggaaaaacagaaaatatatttgacgcaagagacagagcttgggatacacaatacttcatcagaaaagacgtcttattgcgggattgcgactcacaagaagataagaacctactattcaaaatcctaagaaccggtattctactcaaagtagtacgagctagcttacagatatctactataccttccaacaacggtgatgcacccattcaagagatccaagattttgctgagttgatggaaggtaccaatttagaactttatgttgagaaatgttacaatagagctaacaaaattttcttgaagctgttttttcagggctatgacctagtcaatgtctcaaaacagttacaaaaaatcttttttggttatcagtatggccataatgttttaaagtttttgaataagaatatgggcgaattgaccaagcattataaaaatatcaacagtgcaagtcacgataagctgatgcagaatttcgagttagatagacaatcggaacatccaaacaatctgatgaggcaactcttgaccatacagcttgatagggaagcacttccgcaagttttatcacattatcttcagatttatccagagttacctgaaaactactccatgaacgatgacagtgacccattgatgcaagcgaataatttcaaaaatatgaatgctattctatttgacgaactaagtaaaagaggaaccgatgccagtcatgaacccaacccggaactagatatgtccagaagtgtaatctatcacttgaaatttgacgttaacataccgtatccactgaatatcataatcagcaggacatgcatgataaaataccagatcatatcccgctaccaacttgtcttgcaatatcattcaagattgttagacgacacttggatggatctgaataaaaactatatttggaagtacaggggttattcaagtactgtgaaaaaggggattataagaaccacaagagtactacatggcaagatgaaccatttcatcaaagccatcatggagtacttcaaccaggacgtaattgacaaagaagtgcggacactgggaaaatcctataatagtcccatccttgccgttgatattcagaatgatctagaggggggactgacaaacataatgacaaatcgttgcttatctgacttgattcccctacaattgcaaatatttgacattgtgtacaagttctgtaagttcatcaaatccataagaacaaaattatgtcaactagatcccgtactctatgaaaagcatagaatcgtatcgataaaatcaccaaacgaagaatatcgtacatataatgacgaccaagaagatgccggctaccaggaagatactgccttggagctcatgcagagactgatggactatatcagcaatgcttccagaaatttcgaccagtgtctcgcgaggtttgcccaagagttgaatacccaaaaattcgacttttacgacagttcgagtgccgatgctgcaggtatagaacgaattctcttctctataacgccatctcatttagcaccagcttcatctcaaaagtga

SEQ ID NO: 1177 - DNA, 2256 bp, Saccharomyces pastorianus
  modified_base (644)..(685): a, c, g, t, unknown, or other
atgaatgatgctacttttgcgcagcaatctggaaggtcacaacgaacaactgaactctactcgtgcgcacgttgcagaaaattaaagaagaaatgtggtaaacaagtaccgacgtgtgggaattgcgataagaatggagcacattgtttgtatccaggtagagctccaaggcgtaccaaaaaggagttagcggacgcaatgctccgaggagaatatgtccctgtgaaaagaaacaagaagacaggaaaaagtcctctgagcaacaatagtatgagctcgtccagttcagcatcaaccaatggcgctatcacgcccgggttttcaccttatgaaaacgatgactcccacaagatgaaacagttgaaaccgacggatccgataaaccttgtcatgggggccagtccaaattccagtgaaggcgtctcatcgctaatttcggtacttacatcattgaatgatagctccaacgcgccctcccatctttcttccaatgaaaactccatgattcctgcgcggtcattgcctgcttcagtacagcaaacttcgacagcttcatcctttgggtcatatagtacgccttctccgctaatatgtggtccggcgcccgtgaatgcccaatctgtaccattacaacacaacaacannnnnnnnnnnnnnnnnnnnnnnnnnnnnnnnnnnnnnnnnnacaacaacaacaacaacaacaacaacaacaacaataataataataatagtacaccacacctgaacctgagcacatacgcaaacaactctgcttcaaatggcagatacgattctgtacctgtcgatgcatcctcgattgaatttgaaactttatcttgttgctttaaaggtggtagaacaacatcatgggtcaaagaagatgggtctttcaggtcaatagaaagatctttactggacaggttcatcgctgcatatttcaaacacaatcatcgtttatttcccatgattgataaaatagcatttttaaatgacgcttccacaatcacagattttgaaacgttatgtgacaacaaggactaccctgacagctttgttttcaaagtttacatgataatggcgattggctgtacgactttacaacgtgctggtatggtttctcaggatgaagagtgtttgagtgagcacttggcttttttggccatgaagaaattccgcagcatcattatattgcaagacattgaaacagtacgatgcctgttattattgggtatttattcattcttcgagccaaaaggctcttcatcgtggacgatcagtggtatcatcatgagactaaccataggcttaggactaaatagagaactgaccgccaaaaaactaaaaagcatgtctgccttggagacagaggcaagatatagagtattttggagcgcctattgtttcgaaaggctagtatgcacttcacttgggcgtatttctggaattgatgacggggatattgccgtacctttaccaagagcgctgtacggggatgaaagagatgatttggaaatgacccagctgatgatttcactaaggaaaatgggcggtcgtatttataaacaagttcattctgtgagtgcaggacgacaaaaattaaccatcgagcaaaagcaagaaataataaagggattgcggaaggagctcgatgaaatttattctcgggaatccgaaagaaggaaactaaaaagctcgcaaatggatcaggtagaaagggacagccattccactgccaatgtgatatctttccatagctcagagatttggttagcaatgagatactctcaattgcaaatattactgtacagaccatctgcattaataccgaagccgcccatcgactcactatccacattaggtgagttttgcctgcaagcctggaaacacacctacaccctatacaagaagcgattattgccattaaattggattactcttttcagaacattgaccatttgtaacactattttgtactgtctttgccaatggagcatcgacctaattgaaagcaaaattgaaatccaacaatgtgtcgagatactaagacattttggcgagagatggatctttgccatgaaatgcgccgacgtgtttcaaaatatcagcaacacaatcctagacattagtttaagccatggcaaagttccaaacatggaccaattgacaagagagttatttggcgcaagcgattcgtaccaagatatcttagatgagaacaacgtggacgtctcatgggtcgacaagctcgtataa

SEQ ID NO: 1178 - DNA, 687 bp, Saccharomyces pastorianus
atgctattagaattagtttcttatgcagggaccattttagggtttctgtttttaacactttcaattgcatcaggtttatactatattagtgaactagtcgaagaacacacagaacccacaagacggtttctaacaagggcaatttatggcataattttgttactagtactacttttgctactggatggattcccattcaaactcacacttttttctattgcatgttatatagtatattatcaaaacttaaaaagcttcccctttatctcattaaccagcccaaccttcctactaagttgcgtatgcgttattttaaaccattacttttggttcaagtatttcaatgacacggaaattccaccgcagttcagatatgatccgaactatatacctcgtaggcgtgccagttttgctgaggtggcctcattttttggtatatgcgtttggttcataccatttgccctatttgtttccctatcagctggtgattatgtcttgccaacaaccagtgaacagcatatggctaagaaaaatgatgacgctattacaagtaaccagccaagattacgtaaaagagccgttggtttggtccgtgtagtgatcaattcggtaaggaagtacatttattctgtagctcgtgtatttggctacgagatagatcctgattttgacagactagctgtttaa

SEQ ID NO: 1179 - DNA, 2358 bp, Saccharomyces pastorianus
atgtctgccgaagaacacaatgatgaaagtgatcccggtgatcgtcttgaagaatcgagtcaggtctcaattgctaatgaaacggtaaaatttttatcgagaaatagatattggactagggattatacaaccggtatcaaattgttcgtcaaacacatgaggacacaaaacgatatagtggttagatatattaaattttatagtgattttactgacaagttttggaaaccagcgttaaatgatctacaaaagctagagccaaccaattcgatgaataaacaactacttgaattcataaaggaaagttttaatagaatatccccagagcaaatcgagagtgattgtaagaaaccattacagaacctgaagaatcataacgacggttttcttcgtgaagccgaaaatgatttatcatctcgttattcagtttatgtcaaagatttagtcagggtcaaagaagcgttaattgaatgtgaaaaaaaaattcaaatgtgtaagatgaagcaagtcgacactccaatagatgatcgtccccatacctctaatagcgataagaacgaaaattctttgaccagaataaaattcacatgcgaattcccttatgctttggatgagaggttaaagttcgataatagcgttcaatttatgtcatttcttcaaaacctaaaggagcatgttcatttgcagaaaagcgtgttccctgttccggggttaccaaatggaagttttcaaggccagtcagtggtcaaggaactgaagaaactggagcctaaattagacctatccttatttaatatcgatagaataggcaatgaatttactcaactaggtgtaataaaagagtattcattgagtttttattctaataagaatcctcagttcgatcaggataaatactactactggaattccgaaatcttcagcaaccaacaagagcgaaatggtgacgcggttacgaaggctaagaagtcgtatggtgatttggcagagtctgataatgtatctggtgaaaagccgaacacgtcttccatcaaaacatccatatccgattggatccgcaaagtcagtctcaatgacaatgatgaacgtagtgtatcaggaaacaaggatataaatgaaaacgattggggagctttgaaacaacaattacaatcgttacaagacaacttcttttccaggtgttgtcaattggaatattccaaagtacagttagagaaaactatttatgaatactgtaaaaactactctcgaatggagaacgaaattgagcaaagtctaaagtcatcggataagatatttcaacagagttgtgaatcattcaccaaatcaccgattcccctcccacaagaagacgtcctaccatgtaaaggtaaggacgtagaaataagaggatttttcctcagggacaatggtataccgttccgcaagtggaataccatagaggagaaagacccagtcaagtcctacagggaaatttcaatcaaatgcgagaagtttttctgtggtagcgagataaacaatgatctgactttcctagatactttggaaactataaagatcatattgcagcagatcgaaaaagaaccaaatgcaaacaaaatcgtacgaagttggcacgacgatatagattttgtaagggtctcgaacctgaagagagacctaatggggaaattcaaagaatcgaaaaccattgaaaatacgaattcaaccataacagcccaatttttggaaaacctgcatacatttgtgacgaacgattttgttggactcattaaattgtggctactcgaactgcccgatagcatagtcccttcaaacagttacgataccttggtcaaaacaaaagagccgttgatttcgttgtgcgggaaattccccacgaacacagtaagattcctacaagagtttacaaggcattttcaagtgctcagccgcaagtcgtcactcccaccacgaaccgtgtgcgatttattcatagaaaacagtgacatagacatcccattagcacaccactttttaagaagaacagggttacaagaccccacagacataaagatcttgtcgccagcgttgtacacattctttaccaatcaagatacagtaaacatattgcaagaactaatcactacctccgccagcaccagctccaccactgtccttcaggaaccaccaaagattgtcataaaggacaccgcctcaaccgcatcctccacgcccaacccaccgctaggagaccaaaatggcccgttcattccacggcctttcaagactagttccacaccgacaaccccagagagaacaaagcgcaagagcggcctgtttcttcctgtcaacgtcaacgaccggcctcctacataa

SEQ ID NO: 1180 - DNA, 1470 bp, Saccharomyces pastorianus
atgtctgctgatttcggtttgattggtttagccgtcatgggtcaaaacttgatcttaaatgctgctgatcacggtttcactgtttgtgcttacaacagaactcaatccaaggttgaccatttcttagctaacgaagccaagggtaagtctatcattggtgctacttccattcaagatttcatttccaagttgaagagacctagaaaggtcatgcttttggttaaagctggtgctccagtcgacgccttgatcaaggaaattgtcccacttctggaaaagggcgacatcatcatcgatggtggtaactcccatttcccggactctaacagacgttacgaagaattgaagaagcacggtattcttttcgtcggttccggtgtctctggtggtgaagatggtgcccgttacggtccatctttgatgccaggtggttctgaagaagcttggccacacatcaagaacatcttccaatctatctccgccaagtctgacggtgagccatgttgtgaatgggtcggcccagccggtgccggtcactacgtcaaaatggtccacaacggtatcgaatacggtgacatgcaattgatttgtgaagcctacgatattatgaagagattgggtggatttaccgataaggaaatcagtgaggttttcaccacatggaacaagggtgtccttgactcttttttgatcgaaatcaccagagacatcttgaaattcgatgatgtcgacggtaagccattggtggaaaaaatcatggacactgccggccaaaagggtactggtaagtggactgccattaacgccttggacttgggtatgccagtcactttgatcggcgaagctgtctttgctcgttgtctatctgctttgaagaatgaaagagtcagagcttccaaggtcttgccaggcccagaagttccaaaggatgccgtcaaggacagacaacaatttgtcgacgatttggaacaagctttgtacgcttccaagatcatctcttacgctcaaggtttcatgttgatccgtgaagccgctgccacatacggctggaaactaaacaaccccgccatcgctttgatgtggagaggtggttgtatcatcagatccgtcttcttggctgaaatcaccaaggcttatagacaagaaccagacctagaaaacttgttgttcaacaagttcttcgccgatgctgttaccaaggctcaatctggttggagaaaatccattgcattggctaccacatacggtattccaacaccagccttttccactgctttgaccttctacgatgggtacagatctgaaagattaccagccaacttactacaagctcaacgtgattacttcggtgcccacactttcagagtcttgcccgaatgtgcatccgaaaacttgccagaaaacaaggatattcatatcaactggactggtcatggtggtaacgtttcttcctcaacataccaagcttaa

SEQ ID NO: 1181 - DNA, 1719 bp, Saccharomyces pastorianus
atgaggagttcaggtacatatgaggatgagccatctcaggaaacaacttcttctcctccaaagcaaccgcagcagaaaaagccaactaaatttagagaaagaatgcggaagtggttacaaagtgggaaaaataatggttaccaggacaaaaaagatgatcccaaaatatttgacagaattctttatcaacaaggagatatgactgcatttaacaataatgaaaatggggcaggtcaggatataacaaacaacttttttttaccagatgaagatgagtcgtgcccagtgcaaagtagtgttaagaccttcctgaccggaaataatgacgataatacagacttacagtctcaagatcatacaaatcaaaaccagaaacagaccaccgaacttccaagattaccgtatcagcagaggagtccacaagaagtaccatcgttgaaggaccttttcatcactaacaaatatgatgatccttatttaaactcttcaacaaaatttggtaacataacatcaactttccccagcagtctatctttaaggactgttaccttacaaactataaaaagaagaatcgattatatttcagccaaaaagaaagaggtctggaaaacagaggagaagtttttgaaagacatattgatgtggctacaaagctcaaattttgaagatcctgacacgatatcgttgatccatgaaattgagaaagtttttgaacaagatatactttttgaacagaatatttcagattgtctaagagacatttcaaataatttcgaatatatttgcgtgagagaaactcaattgattaatgaaggaaatattttaaagaatgacctgaaaaaatactcaaaatcaagagagcataaaggcgaaaaacatgaagatacagaggtatttagagagaaagtgatatcatcacaaaaatcgtttgacgtagtgaagcgacactacaagcacgcaatatcaataacaacaagacagctatttatgaacctcgcttttgaatactatgagaattgttccgatatgaaggatgtttcaagaaaatacttacaagaatccttgtcaactttacaaaccatagacactttaggattttcagaagaattagaaagaatcaggaaaagaaggtttgacaaattttgggccaaagcaaatccagacccgacaaataatattcagaagtttgttaatatgagaacaggtgtagccggattcaatgattcgttgatgaatcatttgtatggtaaactacgcttcggagtcgcgccacttgaggaagaactgcaaaatcagcaacctgagctcattggtatgcaagagaatgtttggaacgaaacactctctgagtataattcagtagatggtaatcccattacttcaaataagttcttatctgctaaagaagttgagtcagatcagctagtaagaacattcagtcaaaacgacgaagcaaaggataatattccgccaattataagtgttcaacaggtatcaacacctgaaggaaagaaagaaaatttagaaaacaatgaccctttgatattgagaagcgcaaaaagaaatgtaaatatcaatgctgctagtttaaggaaccttgccatcaaaaaatctcaagttaaaccggaatctgcgaatgaagagagtaaaatcttcgctgcagcattgaatgatgcaagacaaaatttggacgaaaacgtttggaagagtccaatttag

SEQ ID NO: 1182 - DNA, 4674 bp, Saccharomyces pastorianus
atgccagagatttatgggcctcagccgttgaaaccactgaatacggtgatgagacatggatttgaagagcaataccagagcgagcagctgttgcagtcactcgcaaacgattttatattctattttgatgataaacgacacagaaccaacgggaacccaatccctgatgaggataaacaaaaagatgtgaatcgttattaccagccgattacagattggaagattatgaaagacaggcaaaagacggtaagtgctgccctcttattatgtttaaatttgggcgtcgaccccccagatgttatgaaaacacacccgtgtgcaagggttgaagcatgggtagatcctttgaatttccaggactcaaagaaagcgatagaacaaattggtaagaatttacaagcgcagtacgaaacactgtccttaagaacacgttacaagcaaagcttggatccctgtgttgaggatgtcaaacggttttgtaactcattaagaaggacttctaaagaggataggatccttttccactataacgggcatggggtacccaagcctacgaaatcgggtgaaatttgggttttcaacaggggatatactcagtacattcccgtttcattgtatgatttgcaaacttggttgggtgccccatgtatattcgtttatgactgtaatagtgccgagaatatactaattaacttccaaaagtttgtacaaaagagaatcaaagacgatgaagacggaaaccacgatgtggccgcaccatcgccaacgtcagcctatgaagattgcttccaactagcttcttgcagatcagatgaacttttacttatgagccctgaattaccagcagatttgtttagttgctgtttaacttgtccgattgaaatcagcattcgtatctttctcatgcaatcacccttgaaggattccaagtataaggttttcttcgaaaatgcaacttcaaaccaatcgtttgctgatagtagaaactcattcaagtccaaaatacccaacgtaaatattcctggtatgctatcagacagaagaacaccactgggtgaactaaactggatcttcacagctataacagatactattgcatggacctccctccctagaccactttttaaaaaattattcagacatgatttaatgatcgctgcactttttaggaattttcttttggccaaaagaataatgccgtggtataattgtcaccctgtgtccgatcccgaactaccagatagtataactacacatccgatgtggaactcttgggatttggccatggatgaggtgctaactaaaatagtcattgaccttaaaaatgcgcccccagccactgccttagaaagtcagatgattctacaacaacaggaaacgttgcagaatggtagcagttcaaaacctaccccccaagaaacaaaggctggaagtatgcaaactcaatcaagattcgcagtggcgaatttaagcacaatgtctttggtgaataaccctgcggctcaatcgagaaagtcgatatctctgcaaagttcacaacaagcacagcagcagcagcagcagcagcagcaattcacaggtttttttgaacaaaatctgaccgcttttgaattgtggttgaaatatgcttcaaatgttaggcacccgcctgagcagcttccgatcgttttacaggttctgctttcacaggtacaccgtatacgtgcgttagtacttttatcgagatttttagacttggggccatgggcagtttacctgtcactttctattggtatcttcccctacgttttaaaattactacaaagcccagcaccagaattgaagcccattctagtatttatttgggctcgcatcatgtcaatagattataagaatactcaaagtgaattaatcaaagaaaaaggatacatgtactttataacagtattggtaccggattggggagtaggtggaccttcacctacgaatggctcaactatgatgaatggcggaaatccactaacaatgactgcatcgcaaaatataaatgccccaagatcgagatattatgatcagcaacaggccaatagaacaccgaatatgggccatagtagtctaccattctatcattctaacgacaccactgatgaacaaaaggctatggctgtgttcgtgttggcttctttcgttagagattttcctttggggcaaaagaattgttttagtttggagttagtaagcaagctgtacttttatattgaaaactcagaaattcctttattgagacaatggtgcattattttacttggcctattgtttgctgataaccccctgaacaggtttgtctgtatgaatacaggtgctgttgaaatattgttgaaatctttgaaagacccggtatcggaagttagaacagcttccatattcccattgaaacatttcgtatctggatttcaagattcagaggtgattttgaggttgcagcaagaatttgagcaacaatatcaacaattgcattcccaattacaacatctacaaagccaatctcatgttcaacaacagcaacagtcccaacagcaacagcagcatcttgaacaacagcaaatgaaaattgaaaaacaaattcgtcattgtcaagttatgcaaaatcaattggaaaatatcgatttgagaaaattgaaaagacaagaaattgctgatctaatttcgattctacccttaatcaatgatggatcgccgttagtccgtaaggaacttattatatacttttctcttatcgtgaaccgctattcaaattttttcatcgtcgttgtattcaatgatttgttggaagaaataaaacaactagagaaaacagacatcaatacacggaatgcttcagataagtattcggtaagtcacggttcaattttttatactgtttggaaatctcttttaattttagcagaagacccctttttagagaataaagaattatccaagcaggtgatcgatcatattttgctcgaattgagcgtccataaagaactcgacggcacctttgaagtcatggaaaaattcttattgaaaaggagttcgaaagccaacgaaagtggtaaatttggattcaattcttctcaagttcaatttgtgaaaagttcgttgaggtcattttcaccaaatggcaggacagatactaatgcgcccaaaaaggaacaacaacaacgtgacccaaaggtatcccatccaatacaaatgtctataactaagctttttcaaagtcttggtttcagcgaatcaaatagtgacaatgacactctatcgtcaagtgcatccattgaatccaatggtacaaaaaagggccctccaggcctatacttgtcgaatggcaataacaatctttatccaactgccagcactccaaggtttcgtaggtatactgaacccttaagtatgccattacagagcacattcctagattactcaattgagtattttcaagagccacaaatgagaaagcaagaagcggatgaacctggcagtgttgaatacaatgccaggttatggagacgtaatagaaatgaaacgattatccaagaaacacaaggtgaaaaaaagctatcgatatatggaaattggtcaaagagattcatcagtttgaataacaaaagccaaccaaaattaatgaagtttacccaatttgaagaccagcttgttacggcagatgataggagtacgattacggtatttgattgggaaaaggggaaaactttgtccaagttttctaatggtactccatttggtacgaaagttacagatttgaaatttatcaacgaagatgattcggctcttttgttggcaggctcctcggatggggttattaaaatatatagaaactatcatgatatcgataattttgaaatcgtatccgcctggagaggtttaactgatatgctgttaactcctagatctactggtttattgacagagtggctacaaataaggggttcattattaacgactggtgatgtgaaagtcatccgtgtttgggatgcgcatactgaaactgttgaagtagatattcccgcgaaaacatcctccttgattacttcactgacggctgatcaattggctggtaatatctttgtagcaggttttgcggacggctctctcagagtatacgatcgccgtttagatccaagagattctatgatacgtcgttggagggcaggaaacgagaaacaaggtgtttggatcaataatgttcatttacaaagaggtggctacagagaattggttagtggggctaccaatggtgttgttgagttgtgggacataagatctgaggatccagtggagtcgtttgttgaccagaatgtggcttcccaatacggatcacaacaaaaaccgaccacaatgacctgtatgcaggttcatgagcatgctcctatcattgcgacaggtaccaaacagatcaagatttggacaacatctggcgatctcttgaactctttcaaaaattcgcatactaatggtgtaactagtacgttagctgctactggtattccaacatctttatcgtactcttcaacatcagacgcgttcttatcctcgatggctttccatccccatagaatgatgatcgctgccaccaattctcatgattctgttgtaaacatctacaaatgtgaagatgaaaggatcgattatttttag

SEQ ID NO: 1183 - DNA, 930 bp, Saccharomyces pastorianus
atggcaagttcatcgcataatccttcgattcttttaaaaagaatcttatcgcttacggagagttctcctttgattctgtgtttggactccatggcccagacgtcatacagactaatccatgagtttatccaccagaataagagtaaaggcaacgaatgtcccgtaatatacatttcttttgaaacggttaatatgccgtcttactgtacacacttcatcgacgccactcagatggatttcgtgcatttggtgaggcaaattacatcgtatttaccgagcgctactgctacacaaactaagaaacacatggttgtcattgactcaataaactacatatccacagatcacattacaaggtttttgtccgagattgcatctgttcactgcactatgcttgctacttaccataaagatattactaacgacgatcatgtggcaatacctggtgggaatagcaattatcccgataaactggctcttttacagttcatggctactacgatcttggatattgacgcgatgttggtgggcagtctagataccgaggaggttagtgaactattgagtgaatttaggattccccgtgggttgaataacgatatttttcaattacgattcatgaataaacggaaatctggaagatcgctagaatacgatttcatgataaattcaaaaagtcacgaatacgagttgctgttgaataataaacaaggtgaggaggatggtggtagtgggctagaaactcctgaaatgttgcagggactgaccacttttaacctgggaacatccaataaacagaaattggccaaagaccaagttgaattgcccttcttagaggcacagagttttggacaaggcggtgccattgtctatgaatatgaaaaggatgatgattatgacgaggaggatccatacgaggatccattttga

SEQ ID NO: 1184 - DNA, 1836 bp, Saccharomyces pastorianus
atgattggctcgctggcgtattgtatattgggtacgttgctggtaggtgcggttgcgcaagacacgacggtgccccagatcggtgttgacgacagcttatggtatccgtacgacgaaacgctgctcttgaaaccgctgcccaacaatgatttactgctttcattcaccttccaattgcagtcggaaccgttcgacccggccgtgtcgtcgcactcgtttgatgcgtatgagtactacacgactttcccccgggccatcccacctttgttggattccactgccacgcgtcagttccatctacgcttcaccagagggttctgggatgctctgtcatggggccagttgccgcatggtgggaaacaggcaggtgcctcaggtgtggagttgtggtctttggttcaggctgctgaccaggaacaggccttccagaattggaagaaactcgctaattccttgagtggattgttctgctcctctttgaattttgtagatgagtccaggacgactttcccccgccggtcgtatgcatctggttcagcgtctcctcttttcaacgacactgaaaacctgtacttgatgagagcgtccttgcccaatgagcccatctgtaccgagaacctgactccattcataaagttattgcccactagggggcattccggtttgacgtctctcttggacggtcataagctgtttgactctctttggaacagtatctcgttggacatcaccaccgtttgcaccgaaaacggcgattcgctgtgccactatgagatggaagcacacgtcgacatggccacgcacgttccctctgtcttagcaaggaatgagagacccatccctaaacctctggacgggaactccttgcgctgtgacatggataagccatttgattcctaccaatgcttccccctaccggacccttcagagactcacttgaaactgtctcagctgttttccaagtcaattaagaacggaaatttgtttgctaataggccaacgaagatatgtgcagacgtggaccgctccacttggacagcgcacttgtccgtggatgacacaatatacagcacgcacgataattgtttcgaattgtcgaatgaccagaatgaaagtggttcaggttacgacttcattttggaatcatcggataccactcaagtctcccctgtagaccctgttcctattcatgtgggcagatccctgaccggcaacggtcaagaccgtggtgggattcgtactgccttccacaacgataacgatacccctgtaaagttgatatatttcgaatcgttgccatggttcgtcagagtttacttatcctctttgcaaatcacttccacaacctcttcacacttgcatgaggacgatatcattacggataaatactatctccaagcggctgatagacaaaggcccgctcatctggaattcacaatgttgattccagcccattcgaacatcgtcatgacttatcaattcgataaagctcttttgcagtttgccgagtacccaccagatgctaatcacggttttgaaattgatgctgcggtgattaccgtactgtcaccagaatctgaagaacctgtgtacgaaacgagaacctccactctgctgttatctctatctacaccggattttagtatgccgtataacgtcattattttaacatccaccataatggggctcatattcggtatgttgtacaacctaatggtgaagagaatagtcactgtcgatgaggctgataaaattatgttaaattccggtttgaagtataaactgttaaaactgaaagaaaagctcttgaagacgaaacagactaaaatcgattag

SEQ ID NO: 1185 - DNA, 573 bp, Saccharomyces pastorianus
atgtgcggcaaatggagattggtactgacagggataggcaatccggagccgcaatatgctcgcacccgccacaatgtcgggttgtacatgctagagctcttgcgtaagcggcttggcctgcagaacaaggcctactctcctgtgccccacacggggggcaaagtgcactacatagagggtgagaactgcacgctactgaagtcaggcggccagtatatgaacctgagtggagagcaggtgtgcaaggtttgggcccggtacgccaagtaccaggctcgtcacgtggttatccatgacgagttgagcgtggcgtgtggcaaagtgcagctgagggcggccagcgccagcatcagaggccacaacgggctacggagccttgtgcaatgtagtggtggccgtgtaccctttgccaggttggccgtgggcatcggcagggacccagggtctaattctagggaccctgcgagcgtatcccgatgggtgttggggactctcaccccacaagaacagcacaccttggtcacagagagcgaacctgccgcttggcgtgccctagcccagtacatttcatag

SEQ ID NO: 1186 - DNA, 1335 bp, Saccharomyces pastorianus
atggggaaactattgcaattggcatcacatccgatcgagttgaaagcagctttgaagctgaagttttgtagaacaccgctattttccatttatgaccagtccacgtcgccatacctattgcgctgttttgagctattgaacctgacctccaggtccttcgctgcggtgatcagggagctacatccagaattgagaaactgtatcactctcttctatttaattttaagggctttggataccatcgaagacgacatgtccattgaacacgatttgaagatcgacttgttgcgtcatttccacgaaaaactgttgttgaacaaatggagttttaacggcaatgcccctgagatgaaagacagagctgtattgacagactttgaatcgattcttattgaattccacaagttgaagccagaataccaggacgtcatcaaagagatcaccgataagatgggtaacggtatggccgactacattttggacgaaaactacaacctgaatgggttgcaaactgttcatgactacgatgtctactgccactacgtggccggtttggtcggcgatggtctaacccgtctgatcatcattgccaagttcgccaaccaatccttgtactccaacgagcaactttttgaaagcatgggtcttttcttacaaaagacaaacatcatcagagattacaaagaagatttggacgatggcagatccttctggcctaaagaaatctggtctcaatacgttcctcaattgaaggacttcatgaaacccgaaaacgaacaactgggtctgcagtgtataaaccaccttgtcttgaacgcattggatcacgtcattgatgtgttgacctacttagccagtgttcacgaacagtctactttccaattctgtgcaattccacaagtcatggccatcgccactttggctttggtgttcaacaaccgtgacgtgctacacggtaacgttaagatccgcaagggtaccacatgctacttgattttgaattccagaactttacgtggttgtgtcaagatctttgactattacttacgtgacattaagtccaaattggccgtgcaagatccaaactacctaaaattgaacatccagatctccaagattgaacagttcatggaagaaatgtaccaagataaattacctgccaacgtgaaaccaaatgaaactccaatttatttgaaggttcaggaaagatccaagtacgatgacgaattggttccaacccaacaagaagaagagtacaagttcaacatggttttgtctatcattgtttccgttcttcttgggttttattatatatacactttacacacagcttaa

SEQ ID NO: 1187 - DNA, 402 bp, Saccharomyces pastorianus
atgcccagcgtgaaaataggtactgctcaatggcagaagctgacacagtcccaggagaaacaaaccactgtgataacaccgctggggatgactatgctggagattcaaggtgatctggaattacctaaggacttctcgtcgctggcacagggagattcccactatgaagcaaggttcagcaaacaggacggtaagaacgtaatacggtttgggctattacagcttgacggcgagagagctactctgtttgtcggtaagaaacagcgtttactggggaaagtgacgaagttagacgtgccggtaggtattatgcatttcaattcaagcgataataaagtcgaactggtggacgtggtgaaatataaaattatctttaaagatagacctttacctattatgtaa

SEQ ID NO: 1188 - DNA, 1758 bp, Saccharomyces pastorianus
atgttgctttttgccaggcctcttcttaggaggtgccggccgtttgccgtgccaagatatgtgtactgggctagaagtgcagttcttcgaagaaacctggggatcccgccaggaacagtaacaagaaactcgtcattggtactgctagctccgtctgcgagggcatactctaatgagccagaacatagacgggggcctcctcctgaggtcaaacgcaacttgaaatatatcaccgagagggattcgctgctggtgcagaccaataacatcttcaccaaattgaagatcaacatacgatggttcttgaaaaaatccacccggccgttcaattcagacgatataagcgcgttcatctcatggatcctcgtcagcaacattttcattttcatcttctggacgaccacattcgtgtctttggttctgtatttggtcaataccgtgtttgcgcaggaatatctcgcgagcaagatcggtaagttcatcaccaagaatgactcgttgtcgattgtgtttgagactgccattgtgccggactggtcgtctgggaagatcagcttccaaaaggtcttcgtgtccagaaggcccaaggtgtcgcatgggtttaccaagggctcgcagcaggatgcgttgcaaagagcgaaactggcccttagcgaaaaaattctggtcaaccagcaggacttcgataatgggaactacacgcagttcgatctgaccatcgaccaggtggatatatcgctgaatttcagaaaatggatcaatgggaagggcatcctggatgaagtgaccatcaacgggcttaggggcgttatagacagaacacacgtgacgtggaagaaagatgatgacccaaagaactacctgaacgtatatcaaccgggagatttcgaaatctcaaaattcacaatgaacgacgtcctttgcaccctgtaccagccaaacgggttccggccgttccaaataagcatattcaactgcgacctgccgcagttgaggaaacattggctgttctacgacattctaaacgccaacaatattaatgggacctacgataattccatgttcaccattcacaagaagttcaggaccgatgaccaaaatcaggactccgcgtcgctgtggaagcaaatgacaaggttcagggtggacaacctggacatcgaccatctgaatgccggcatcgaggggccctttggatggatcaacgagggccgggttgacatggttggcgacgtacttttgcccgacgaagatgcagcttcagattctttgcaactaactgaaattctcacagagatcggggaccgcctgattagggaagccaaaagatacacttcgtccttccccctggtccggccaggattctcccacaccgtcgacgaaattgaccccatcgactacttcattatggacttctccctaagactttacaacgtcaaggccgagattcccctcttcacttcgggactgacgtatattaatagcgcattgatccggcccattgtagggtacatcaattctcacagaacttacattcctatcaagtgccggatcgtgaagaagaaatccgactttgaaggctcatggaccatctacgattcctacttgatgcgagatttgagcgcagaggtgtacgacgcctttgctaactacgccgctgacgatgaaaagagatctttgcgcttgagaagggtcggcttttggtcgctacaactcgttctgcaagtgatcctaatgagtctcggtgcaatcgcatga

SEQ ID NO: 1189 - DNA, 963 bp, Saccharomyces pastorianus
atgacacgtcctccagtgatgcgaggggcattttcagtaggcctttctgtagcagtattgaaaggtgtcaaaaagacagttcgtaagcatttggaaaggcgagggtggctagaacctcataaagtagactacgagttagtctttacgatagacaggttgaaaaacttggtagacgagaagcatgattctgtcttagcagtcgggcagcacgatgccggtgaattaagctggcggaaagtgttcaatttcatctcaagacagtcgagcgaactggatacccgaatatacatctttatattgctgctatgccttgtagttcctgttgtctggactgtactggacggcgatcatgataactcgctggacgacaacgacgactatgaggacgcaagaaggctgaaacactatggtgacggtgaaagagcagtgctacaattcggtaaaaataggtctgaacccatcatactgagctataaagatatggacgttccagaaggggagcgtgagtttaccgccaagagagaccataacagtagaagcttgacaagcaagagcgaggacgcattggatggactgaacaacgaagacacgcttagtgaccaacctgaggagcaggtggaagttgacataggatgcgatgagaacgaattaggggaagaaacaaatactaacgatattgacgaccaggaaaaggactgctgttccagtccagaagtagaaccgcacgacgaattcaacgaagacaacccaacggagccagagttcctcacgcgggacaccaaaacgacatcttcccttaagtcaagcacatcgtttccgttatcattcaagggctcaatagacctcagatccatcaaccaaccctcctctctattacacatccaggtgtcccccacaaaatccaccaatttggatgcccaagtaaacactgaacaggcatattctcaaccgttcaggtactag

SEQ ID NO: 1190 - DNA, 1728 bp, Saccharomyces pastorianus
atgggctcttcttttgatttggtagcgagtttctcgcatgactccacacgctttgcatttcaagcaagtgttgcacaaaagaataacgttgatatatatcctcttgatgagactaaggattatgttgtgaacagctccttagtgaaccatattgattatgagacaaacgacatgaaagtttctgatgtggtcttctttggatggtgcagtgacttggtggatacacaatcattgaacatcaagagaaaattagatgaagatgaagagagtactgaatccaccggccaaaaatacgaaaacttttttgtaaatggattccctgatgggaaagtcgttgtttactcttccaatggtaaagatattgttaacatcatcaagagtaagaaggaaattttgggtgcagacacagatgaatctaatatttggattttggacagtgataaagtagtcaagaaactacaatacaataactccaaaccaattaagactttcactctggttgatggtaaggaagatgacatagttcatttccaaatcttacatcaaaacggtaccttagtagtatgcgttatcaccgagcaaatggtttatatcgtcgacccaacaaagagaagaccctctacgaaatacaagtttgaagtaccaggtgctgtcacatgcgaattttcctcggatggcaaatatttgctaattgcggatagagaaaaattagctgcttatgatttgagcggtgattcaaaccctgctcaagtatggtctgttcaagtgaaaaaattaaggatttttagtgacttgataatggctttaaccgctgacgggaagatgttttttttcaaaattagtgaggccgataggatttgctctataaatgtcaacgaagacttagaaatcattgattttacacctataagcaagaagcaaaaaatcttaatatcttggttgaatgtcaatgaacccaactttgaatccatttccttgaatgaaatcactactaagaaaaatattaccatcaatgaaggaaaagaaaccaagcttgatgaatcagaactaaaacaaccagaagtagagaaaattgagccagaagcacaagatgagaaggcgaaaaccgaaaccaagataaacaggaaagttagtaaatcagaacaagcagaaatctccaatattcttttgtctcatttagaatctaactcaacagaattattggacgatctggcttccgaaagctggacagaatctgaaatcaaaaagttcattcttacaaatattaattcattggaccatttgagcagaatattttcaacagtatcagagccaataacacagaatccatggaatgagcaacgtctgcttccgttgtggcttaaatggttactgactttgaagagtggagaactgaattccataaatgacaagcatacaaagaaaaaccataaacatttaaaatcagcattaagatcttcagaggaaattttacctgttttacttgggatacaaggtagactggaaatgttaaggaggcaagcaaagctaagagaagaccttgcacaattgaccatgcaaaatcaagacggcgaagatgaggaaatagaagttatagagcattcaaacgtaattaataatcctttgcaggatcaaacatcatctgttaaaaagcctgaacaagactcgatcgtttatgccaacggagagagtgacgaatttgtcgatgcatctgaatatagagattga

SEQ ID NO: 1191 - DNA, 933 bp, Saccharomyces pastorianus
atgagtttgctcagtaaggtattggtcagaagaagctgcttcgatgtgggcatgagaaggaccccacaatggcacccccactactctaccacggcgggcaacaccagcgtgaacaagaagggcagcaaggtagtgcccgtgttgacggcgttggcattagcatcgattttcgtgaagaagtggtatgaggactcgaagatcaagaaggcagacgccaccagcgttacggtggacccggccatctctgccttcccgaagcggatgggccctccacagtggccatttgcgacgcagtacgggttgcttgggaagggcgtgcggtgtgtgtcctccatcactttcaaggcctacggcctgggcatctacgtggcggcagaggacaagcacttggtcgccgaggtgctggactcgaagttcctgtctcaggcgtttatcgacatcgcggctccctcattgccggcaaagacacaccaggagaacctgcgtacagccttggacgaccctgccaaggccccggtcttgatcaataacctcttggacagtgggatcaggctcatggccaaaaacaccccaataaaggcggggtctttcaaactgctaatggacggcaccaggaagagcattctgaagaacccggactcgcagacccaggacaaggaacgactggaggccgggtttcaagaactacacgactgcttcaggagtgtgaaggggcttgtagctcgggacgacgacttcttcattgagttgaacaaggactgctctctgagcctgtcctactacaccaagaaaagggacgagttcgtgatactgggtactgtcaaagaacctctcatcgggaagctcttattcgcccactacctagccggcgtggaccctccctccctggaagttaaacaagaggtggcggacgcgctcgtatccttggcctag

SEQ ID NO: 1192 - DNA, 798 bp, Saccharomyces pastorianus
atggtattggaagctacagtgttgataattgacaattcagagtactctcgcaatggggactttcctcgcacacggttcgaagcgcagatcgactccgtggagttcatattccaggccaagagaaacagtaatcccgagaacacagtggggctcatctctggtgcaggcgccaaccctcgggtgctgtccacgttcacggccgagtttgggaagattcttgctggtttgcacgatacgcaggtcgagggcgagctgcatctggccactgcgctgcagattgcccagctgactttgaagcaccgtcagaataaggttcagcaccagagaatcgtggcgttcgtatgcagtcccataagcgacgctcgagacgaattgattagactggccaagacgctgaagaaaaacaacgttgctgtggacattatcaacttcggcgagatcgagcacaacacagaactgttggacgagtttgttgccgcggtgaacgaccctcaggaggagactagtcacttgctgaccgtggtgcccggccctagactgctgtacgagaacatcgcgtcctctcctataattcttgaagagggctcctccggcatgggcgcctttggcggggctggcgctgactctgacgctaatggcacgttcatggacttcggtgtagatccatcaatggacccagaactggcaatggccttgcgtctctccatggaggaagagcaacagagacaagaaagactaagacagcaggagcagcaacaagaccagccggaccagccggaagaacgccaagacaaataa

SEQ ID NO: 1193 - DNA, 1815 bp, Saccharomyces pastorianus
atgataccaaccttcgtgcattcgttggcacttctatcagggctagtctttacgaagccacttcagcatcaacaggcggtttggagcccatcacaagacgtacaattgagagacctccatataggagatataaattttgtccatacaacagatacacatggttggttgggttcccatttgacacaaaccaactatgatgctgattggggggatttcgtttcatttgtagatattttcaggaacaaattgacacagctatccagggacctaatagtcatcgatactggtgacaaaagagacggtaacggtttgagtgacgctacttggcctcccggcttacgcagctcgaaaatattcaatatgctggactatgaccttttgaccttgggcaatcatgaactgtacacagctgaaagtgctattttggaatatagaggaacttcacagtccactaaattcaaagacaagtatgtgtgtagtaacgtggagttcattgaagacgatggtaagagagttccctttggaaataaatttgtcacctttgagactcccatacaaaaacaaagaattttagcgatgtcgtttttgtttagtttccaaagagctaataacagagccattgtaacacccccattggaagaaataatggagaagggctggtttcaaaatatggtcgagacaaacaaggagggcgatattgacttgattgttgtttttggccatttgcctgctactgatcccacagagcgtgaaatgcataagatccatgctttattaagaacgcactatccaaacactgttatacaatattttggaggtcacactcatatcagagatttcgtgcaactggactcgaagtccacttgtttgcaaagtggtagatttgcagaaaccgtcggattcttatcaataaatacgacaaatgcaatggacgaggataatcctagtttcacaagaagatatatcgattttaataaagactcattcgaacaccatttgagcaaagttgcaacggacgtagatacctcagcatcattaaaaaaaggcgaaacaatttcgcgactaataaatgatctacgtcatgaattaaacttgaatcagaaattggggtatatacctgaaacctattatgtggcaacaagacccttggactctgaaaagaatctttatcacttgattacccataaaattctgcctaatttgataccctcgaaaaactatgaaccctttatgagtcgattcattttgataaacactggttctgtaagatatgatctttataaaggcccattcacaaaagacacagaatacatagtaatgccgttcaataacgattggcatttcatcacagtaccattggtagttgcctccaaggtcgaaaactatttaaataagggcccggttatcgcttcgctgggcataccatcatctctccatcaacatcaacagtttaaccgtttccaaaagtgcccgtttattgaaaatccaaacttaagtgaaggctacactacggaagatgattttggctgccatggtgatgacacgcctcataactcacagcgggaatatgttattcccaacgtggttcaatgtgaggacatgaagaagtcaaaagaagaagaagaagaagaggatccattgaaaatggtacacgttatcttttacacatttatggagcttgacgtattgaacgccgtaaattctatcatcaataatttagacctacgcatgaagaacctgaccgccaacgactgttctcattatggcggcgaatccaccaaaaaattgctgcgtgattactttgctcaattctaa

SEQ ID NO: 1194 - DNA, 2391 bp, Saccharomyces pastorianus
atggtttcttggttatggctgttacaagtatcattccttcgaatagaacaagtagcgtgctacgactatgcttattcattcactgctaaagaactcaaggcttacaagcaagaggtgaaggagttattctattttgggttcgacagttatttggagcatggatatccatttgatgaggtgaggcccatttcttgcgtgcccaagaagagaaactttgaggaccttaatgaccacgtgaccaacgatatattgggcaatttcactatcacgctcatagactctttaacgactatagctgtgttgcaagacatgccacggtttcgggaagcggttcgactcgttgaaagaacttttccaaacggggagttcgatgtcgattctacggtgcaagtcttcgaaactagcatacgtgttctcggatctctgctttcttcacatctttatgccacagaccgcacaaaggcggtctatctaggccatgaatatgatggctcgttattgcgcctggcgcagaatatggcggataggcttttgcctgcatacttgacgtatacagggttacctgtaccacggatcaacgttaaatggaagttcaactttcccggtttcacggattctttggtgacagagaacaatgtggcagccatgtcgtgccctatgttcgaattcacaattctgtcttacctgacaggtgactccaaatatgaaaaagtgaccaggtatgcctttgataagatatggtcgctcagaaccgatttggatttgctgcccatgtcatttcacccggaaaagttgactccatatacatccatgaccgggataggtgcttccatcgactcatttttcgaatacgccttaaagggtgccgtactatttgatgatgcagaattaatgaatgtctggaacgtggcatacgaatcgttgaaaacaaattgtagaaatgattggctttttgccaatgtattggctgacacgggccaaatatttgtcccttggatagactcgctaagtgcatttttccccggcttgcaagtccttgctggtgatttggatgatgccatcgctaagcatttactgtttctaaagatatggaacacttttggcggtatccctgaaagatggaacttcagccccacagaaatctctcctccactttcaccaacggaaccgctatcggttacgttgaaggctatccttcccttggaatggtacccgttacggccggagtttttcgaatcaacctacttcctatatagagctactaaagatccattctatttgaatgtcggtgtgcacttattaagggatttaaaacagcggttcaagtccaagtgtggatttgcaggtttccaaaatgtcatcacgggcgaactacaggacagaatggaaacatttgtcctgagtgaaactttgaagtatttgtatttgttatttgacgaaggcaacgaattgcataagagcgggagcgatgtagttttcagtaccgaggcccatcctatgtggctgccccaagaggtgagatccaagtataagcgggacgctaagttcagcgactctacttattcgtcacacttaaaaacctgctataaaagagacagagagcttcaagctaaagaaagtacactaagccaaagaattgtgggatttgccagatcagtgttttcacaacaaccggaagaggaacttgcaaacttgacccgtaataacaaaaccaactttgaagctcccggcttatgtccgataatgccccgtcctagaagtgatcacgacacctggtattctccgttgctgagtaaatacagccggctgttcgagatcgatagccggtacaatgctacattgataaagccttcacacatgcaacactatcgtgccattgagctagaacctgcgttctatagcagatggtcaaatccgcagttcagtacgtgtcagatcgagcccaccactgaaatattcgaactgctcttcgaccttcctggagtacacgaacagaatccttcaattgctgacaacggaacgatcacgtatggagcatttggaagtaggtcgaggttaaagatcgaaaaactacaaatctaccaaagtgactactacggcgacctagtcactgcatcaacgttccaagacatctcccgccgagacacctactcccacatgtgcgataccacggcggatttgtattcttccgtgtttctctaccgggtggtggccgtcaacggacgtatagtgccccgacatggaactgtccaaattgagaaacacaactttatgcatgtttccaccgacatagaagagcaaggcacactcataatagggggcataggggtcaacgaccaagcacaactcatgctagagtgcacacccatcttaaacctcctccttatataa

SEQ ID NO: 1195 - DNA, 2448 bp, Saccharomyces pastorianus
atgatgaatttcttttcttcaaaatcatcgaaccaggagaattccggtgccggtttcggccctcaacaccaacattcaaatggcccagataatgggaataacaacagcagcaacactggtaatatcaacggatacccaagtaagctagtgccaactggcaccggcacgtcgtcaaatagcggcacccttttcacgaactttactttgcaaacagcaacacccaccacagctattagtcaggacttatacgcgatgggcactacggggataacttctgaaaacgttcttttccagatgaagtcgatgaatgatggtatttcgtctgccaacaacaacaacagtaacaataacaacgcccccacgattattacaactttacaggaggaggccaacgctgggaatgcaaccgctagcacgggtggcaattctgaagatgataattattcttcaagctctaccacaaaatgcttactgtcttccacttcctcattatcaataaatcaacgagaagctacttcaggctacggtccagatactgatgttcccagaggtaaactagaagttacaataatagaggctcgtgacctggttaccagatcaaagagttctcaaccttatgtcgtttgtacctttgaaagttcagagttcatttccaatggtcctgaatcattaggcactagtcataacagtatcaataacccaaacaagcataatccaaaccagcataataataacgataataatcagcatcataataataacagtgggtggaacggttctaagttaccgtcaataaaagagcatttaaagaaaaaacccctttatacacacagatcatcctcccagctggatcaactaaactcttcttccacggctgttgattccaacaagcgctcctctaattcctcctcgggttcctcaaacgacccaatgactgataattcacatccaatatggcatcacaaaacgacgttcgatgttctggggtctcactcggaactagacatatctgtttatgacgctgctcacgaccatatgtttttaggccaagttagactgtatccgaaaattcataatctggcacacgcttcgcaaaaccaatggcatattttaaagcctcgtgttatcgatgaaaacgtgtcaggagatatcttaattaaatggacctacaaacaaacaaacaaaagacattatggtccacaagattttgaagttcttcgactactgggtaaggggacgtttggccaagtctatcaggtcaaaaagaaagatactcaaaggatttacgcaatgaaagttctttcgaaaaaagttattgtaaaaaaaaatgaaattgcccatacgattggcgaaagaaatatcttggtcaccaccgcatccaaatcatctccatttattgttgggttgaaattctcgtttcaaactccagcggatttatacctggtcacggattatatgagtggtggagaattattttggcatttacaaaaagagggccgcttttcagaggatagagccaaattttatattgctgaattagtcttagccttggagcatttacacgataatgacattgtttacagagatttaaaacccgaaaatattctattggatgcgaacggttatatcgctctttgtgattttggtctttccaaggctgacttaaaagatagaactaatacgttttgtggtaccactgaatatttggcaccagaattattactggacgaaactggttacaccaagatggtcgatttctggtctctaggtgtattgatattcgaaatgtgttgtggctggtccccattttttgccgaaaataatcaaaaaatgtaccaaaaaattgccttcggtaaagtcaagttccccagagacgtgttgtcacaagaagggagatcctttgtcaagggcctattgaacagaaaccccaagcatagactgggcgccatcgatgatgggagagaactgcgcgcccatccgtacttcgcagatattgattgggagtcattgaagcagaagagaatcccaccaccttttaagccacatttggtttcggaaacagatacttcaaactttgacccggagttcacgacagcatccacctcgtatatgaacaaacaccagcccataatgacagctacgccactatcgccggccatgcaagccaagtttgccggattcacctttgtcgatgagtctgccatcgatgaacacgtcaataacaaccgcaaatttttgcaaaactcgtactttatggagccgggctccttcatcccaggaaatccaaacctacccgcagacgaagatgtcatcgatgatgatggggacgaagacatcaatgatggattcaaccaagagagaaatatgaacaacagcaattcacacatcgattttgatggcgaccaacacatggatgacgaatttgtcagtggcagatttgaaatatga

SEQ ID NO: 1196 - DNA, 1851 bp, Saccharomyces pastorianus
atgagtttttccaccataaatggtaacatcaataagaatgctggtgatagcaacaataacacgactgagaacagctcgacaacggacctcctaggaatggatctgttgcaacatgcgccccgtttgatgagtactatgcagccgaacaattcttctgacatgttgcccatggctaatggaaccaatcttgttcaagagtccgctgcaaacaataatagcagcagtgccaataccggcacaaaggctccggcaaacgagtttgtgagaaagcttttccggatattggaaaataacgagtatccagacatcgtgacctggactgaaaacggcaagagctttgtcgtattggacacagggaagtttacgacacacatacttcccaatcatttcaagcactccaatttcgcttcttttgtgaggcagctaaacaagtacgatttccataaggttaagagaagcccggaagaaagacagaaatgtaagtatggagaacaaagttgggagttccagcatccagaatttagagttcactacgggaagggactcgataacattaaaagaaaaattccggcccaaaggaaagtattgctagacgaatctcaaaaggctcttttacattttaatagtgaaggcgccaacccgaacagttcttccggggccctcttgaatgaatccaccacagaactgctattaagtaatactgtaagtaaggatgcatttggaaatttgagaaggcgggtagacaaactgcaaaaggaactggatatgtccaagatggaaagttatgctacaaaagtggaattacaaaaattgaactcgaagtacaatacggtcattgaaagcttaataacattcaagacaatcaacgaaaatctacttaacaacttcaacgctctgtgttccactttggcaaataatggaattgaagtcccaatattcggagacaacggaaaccaaaacccagccggcaacggtaacaacccaacacctaccaccgtcattcataatagtaacgccaacaatgcctccccaacgacatctacggtgtccttacaaatgcccaatttacccgatgagaatagcctgacccccaatgctcaaggaaatgctgtcacactacgaaaagggttccatgttctactagtggaagacgatgccgtgtctatacagttgtgctcaaaattcttacggaaatacggctgtactgttcaggttgtcaccgatggtctttcggctatttcaacgctggaaaaattcagatatgatttggtcctaatggacattgtgatgcccaacctagatggtgccacggctacatctatcgtaagaagtttcgacaacgaaacgcccatcattgccatgaccggtaacattatgaatcaagatttgattacctacttacagcatggtatgaatgatatcttggccaagccattcacgagagacgatttacattcgattctgatacgttatttgaaggatcgcattcctttatgtaagcagcagttaccaccgcgcaactcttcaccacaaacacattccaacaccaatactactaattccaatcctaacacaatcaacgaacactcattatctttgctaccacaagataatccgtctactacaacacctgttactccgggtgcttccatatcgtctgcgcagcacggtcaacaagaacaacagcatcaacaactgttccatgctcaacaacaacaacaccacaacaccgctagaccagacgtatccataccgagcttggaacacgaaatcaacactgtaccacattcttcaatgggctctactccacaattgccacaacctacgattcaggaaaatcaattatcataa

SEQ ID NO: 1197 - DNA, 1575 bp, Saccharomyces pastorianus
atgggtttaaccatcaagatagaaaccttgaacgatagcgatcaagctccggtgcaagaaggagtcgaggatggctccaatgctcaagacgtagcccccactgaggaagagatttgtgatgatgtagttctattgtggaaggaagagcctggaacagaagacgctacgatccagcacctttatgatagaattagagagagaaattcaacatggaaattgagcgcttcacgtttccggaatatccttaaccaacaccatctttacgatacggatttagagacagtgtcactatataaggaagatattcatttccccaaggctgtagattctaatgctaaggtcaaagtagaatttattgatgacgagcatggcaggggccttttcgccgaaaaggattttaccaagggccaaatcattttgaaggaaaataagcctatcgtattcgtcccaccattagacaagctattttttatttctaatgggaaggcctgtgctcgatgtggcaaggcgctgtacgatttgacccagcaaaaaatcatggtccattatctagattgtgaggtatgtaaggcaatttggtgcagtgataaatgtaaaaaggctcacgctcccttacatgaactcttgtatcattcatggagatcaaatagaattgatattttgcatgctggtaactggaaaaggtttgtaaactattgtgagaagtactgttttacagcggccttttccattggtcttatatacgggtcgatgctgttagattccacaggagaagtcaaagagcaatgggatgtattagcaagcgtctcacaaagagtcagaatcaaactgagggacgccagtggtattggcagtacgtttaacttgatgaatggtacaatagctcacaccgaagacggttctgataatggcgccaaaaaagacgatgacgaaaatgctgatgacgagattgtctgggaaaaatgctatgagttattctgtggtgctttccctaaagcttctgaagaaatagatttggagcaatttttaaccatgattgggacgttcaacattaaccaatataatggacaaatatatcattggcactcattcatgaaccacgattgtgaaccaaatgcttatattgagcaggcagaagaacatgaggaattgaagttacatgcaagaaaaccaatcaagaaaggggagcaagtttgcgtcacttacgtaaatcccttacatggggtcagattaagacgaagagaactaagagttaattgggggtttttatgtcagtgtgaccgttgccgaaatgagttgtctactttcgaaagagttccgaattcagacaaggaaagtgtgaccaccaatttggctaaggttgattctgatgacactagtgacgatactcctggtagatcaacagataatcgaaaatcgtctatgcgggaggctcagccggatttaaaagaaattttaaaaaatgggaaagaattcgaattggatattccagaaacggttgatacgcaaggtaacgtgaggaagacttcagttagatttgattcaaatgtttttgttgcagtagacgaaagataa

SEQ ID NO: 1198 - DNA, 1182 bp, Saccharomyces pastorianus
atgttacaaaggaattctttgaaatgggggaaattctccatcagaacgctagccactggtgctccattggatgcctctaaattgaaaattacaagaaacccaaatccttccaagccaagaccaaatgacgaattagtgtttggtcaaacattcacagaccacatgttgaccattccatggactgccaaagaagggtggggtgttcctcatatcaagccttatgctaatttatcgcttgacccatcatcttgtgtattccactatgcatttgaactgttcgaaggtttgaaagcctacagaacccctcaaaataccattaccatgttccgttctgacaagaacatggttcgtatgaacaaatccgcagctagaatctgtttacccaccttcgactctgaggaattgatcaagcttactgggaagttgatcgaacaagataaacatttagttcctgaagggaatggttactctttatacatcagaccaacaatgatcggtacctctaaaggtttaggtgtcggcactccttccgaagctcttctttacgtgatcacttctccagttggtccttattacaagaccggtttcaaggccgttcgtcttgaagcaacagactatgccactagagcttggccaggtggtgttggtgacaagaagttgggtgctaactatgctccatgtatcttacctcaattgcaagctgctaaaagaggataccaacaaaacctatggttgtttggtcctgaaaaaaacattactgaagtcggcaccatgaacgtgttcttcgtcttcctcaacaaagtcaccggtaagaaagagttggttactgccccattagacggtactatcttggaaggtgtcactagagattctgttttgagtttggctcgtgagaaactagatcctcaagaatgggacatcaacgaacgttattacactatcactgaagttgctactagagctcaacaaggtgaactattggaagcattcggttctggtactgctgctgttgtctcaccaatcaaggaaattggctggaaagatcaagatatcaatgttccattattgcctggtgagcaatctggtgctttgaccaagcaagtcgcccaatggattgctgatattcaatacggtagaactaagcacggtaactggtcgagaactgttgctgacttgaactaa

SEQ ID NO: 1199 - DNA, 879 bp, Saccharomyces pastorianus
atgcctaaaaccagttacttggagaaaaattttgaatcctcacactacaataaagtacgtccctcttatccacaatctttggttaatgaggtattagccttccataggggcccggacaggaatttagtggatgttggatgtggtacaggaaaggcgacatttctctttgagccttattttgaaaatatcactggcattgacccatcttccgccatgctctcaattgcagagaaagaaaaagctgaacgtaaattgggagacaatgttaaattcattaacgcccttggtgaagacttatccagtattgaatcaggaactgttgatatggttatcagcgcggaggcaattcattggtgtaatctagacaagctatttcaacaagttacgtctgtattacgcagagatggaacttttgcattttggttttatattcaaccggtatttgtggattttactccagaagcgtcaaatgtatactacaaatattgttggagtaaggattacatgggcaaatacttggatgaaaaccaaagggaagttttattgaattatggcggtgaaatgctacgttctttattaccagagatatttaaagatgtcgaggtctccatttataacccttcagacccagatacatcaacagttacggctgaagaaaataaatttctctggcgcacaactatcactttgacacaattaaagcagtttgtaaaaagctggagcatatacgcttcttggattagagatcatcctggtgaatcagatatagcggatatctttatagatgaaatgaaagaggcttgtcattgcgataacttggacttacctttgaatgtagagtggtctacattctattatctttgtaggaagaaggattaa

SEQ ID NO: 1200 - DNA, 1629 bp, Saccharomyces pastorianus
atgtccgaacagaaggaggaatacgttgttttaaaaaagactcaattgtctgtatccacacaaagtttaacttcggatccagaaagccagttgcaaaacccatttgaagattttgatgaggctaagcgctggagaaaagtttacgagtccagtggctatgaggggttgtctaaatttgatcccgagttttcttggagtaaggatgaagagagaagggtagtgagaaaaatagatttgaagattttcttgtgggtctttatcatgttttgttttctggatctgataagaaaaaacattgccagggctgtctcagataacatcattaccgatttaaagatgaatactaatgactacaaccttgggcagactgtttatcttgtgttatttctggtgagcgagctacctggtaacctgctgtctaaaagatttggtccagaaagagtcataccaattcaaattgtcctctggagtatcatctgtattacacaggcaggtttgaaaaataaagctcagtttattgccactagatgtttattaggaatcgtgcaaggtggattcatcccagataacatattatacttgtcttattattataccggagccgagcttacttttcgcttaagtttcttctggtgtgctatcccccttttccaaattctaggctcactctttgcttccggtgttttagagatgcgaggaattcatgacttggctggttggcagtatttgttcattattgaaggatttatatccctagccgttggtgtggcatccttttatttgatgcgcaggggccccactcaaactggtgagtctgcattccataaggggaaatcgcttttctctgagtatgaggagaagattatgattaatagaattttaagagatgatccatcaaagggcgatatgagcaataggcaacccgttacttttaaggaaattttgtataccttaacagaatttgatctctggccactattcatacaaggcattacaggatttatatctttacaaaccgttacaccttacatgtcgctgatcttgaaaagcatgaatttctccacctttctttcaaatattttggcaattccaggtcaagctttgctattaattaatctaccattagtggcattgctatcacgcaaattaaaagagaaatcactttgtgtaggaattgcgaacgtttgggtgcttccttttattgtttctttagtcgctttgccaacagatacaaatccatggataaagtacgtactactcactggtgtacttggtcttccctacacacattccattcttgcaggttgggtttccgaaatttcaaattcggtgagatcgcgtgcgatagggacagcattatacaatataagtgctcagattggaacaattattgcctctaacttgtacagaaatgacgataaaccttactatgtcaagggtaacaaggctcttctaggatttgcttgtttcaacatttgcatggcagttgccacaaagttctactatatcagcagaaatagatataaagaacgcaaatggaacttaatgacaaaagaagaacggaccaattacttggacactactactgatctaggaatgaagcgccttgactatagattcatccactaa

SEQ ID NO: 1201 - DNA, 1254 bp, Saccharomyces pastorianus
atgtcgcaaagattacaaagtattaaggatcatttggttgagagcgccatggggaaaagtggaacaaaaaagaaaaacttgttgttggaaaagagaccagacgatgtagttatagtagctgcaaataggtctgctattggcaagggcttcaaaggtgcttacaaggatgtgaacacggactacttgctatataatttccttaatgaattcattgggaggtttccggactccctaaggacggacttgaagttgatcgaagaggttgcctgtggtaacgttctcaacgtgggggcgggggctacggaacatagagctgcgtgcttggcgagtgggatcccatactccacgccgtttgtggctttgaacagacaatgttcttcagggttgacggcggtaaacgatattgccaacaaaatcaaggtcggacagatcgatattggtctagcactaggcgtggagtcaatgaccaataactataaaaatatcaacccattgggcatgatttcctctgaagagttgcagatgaatcgtgaagcgaagaaatgtctaataccaatgggtataacaaacgaaaacattgctagcaatttcaaaatctgcagaagggatcaggatgaatttgctgccaattcttatcaaaaggcttacaaggccaaagatgaaggacttttcgatgaagagattctacccataaaattaccagacggcacggttttccagaaagatgaagggccacgccctaacgtcacggcagaatcacttgggagcatcaagcctgcgtttatcaaggacagaggcactaccactgcaggtaatgcgtctcaggtctctgatggtgtcgccggtgtcctattggcccgcaggtctgtagccaaccagttggatttgcccgtgctaggccgctacatcgattttcaaacagtgggggttccacctgaaataatgggcgtgggccccgcatacgccataccaaaagttttgggagcaactggtttacaaatccaagatattgacgttttcgaaatcaacgaagcctttgccgctcaagctttatactgtatccataaactaggcattgatctgagtaaagtaaaccccagaggtggtgccatcgcactgggccacccgctgggctgtaccggcgcaagacaagtggctactatactaagagaattggaaaaggaccagatcggagttgttagtatgtgtattggtactggtatgggtgctgcagctatttttgttaaggagtaa

SEQ ID NO: 1202 - DNA, 4125 bp, Saccharomyces pastorianus
atgcactgttccccgagcaagaagatgtatcgctacccccgaaggtcactgtcactacacgcgcaagataggcctagtgaagctcgtgaattggaagatttgaatttgactgatggactggtttccgctggtttgcagttggtgggagtggcactacagaagcgagacacaggatcacacatctatatgaaacaaaagaacttctctactaacgatgtcgcgtcgtcatcagcggcttccgtagatatgacgccatcggatatggatttcaatccaaaatgcatgccccaagacagagttctcgtggaaagaatgtttgataaacttttgaaagataggacatttttttggggtgctgcgtacaagaatctacagggcatctcactgcgaaggaaatggcagctaatttgcaagattcgtacttccgaccactgcatgagaagtgatgtggctgctggtaccgctacgaaacattctgctcaattgcccaccaatgagctcgtggaaatctcgcatttcttggatggtttggtaagaaacctttccggtgagggcatgaacttgtccaagaccctttacaaattagagaagttcctgcggaagaaaaacttcttggagctttttctgaaggatgaaatatatttaacgactttgcttgagaagactttgtcactcatatccaaggaattgcagttcgtttatctgagatgttttaaaatattaatgaataacccattagcaaggataagagcactgcactctgagtctttagttcaatggtttgtggagcttttaaacgaacgggattctgacctaaaatgccaattactttccatggagttactcttattgttaacctacgtggaaggttccacgggctgtaatataatatggaatcagctttcaatatctttcaccaattggcgtgattggtttagcaaaatcctcaccgatgacgttgctgctcattcgtccttgtatttaaactgggatcaattgaagacagactattcaatgactttcctactactgataaactctattctgcaaggtttcagtaacaaaatcgcactggatatcctgaattttttgaaaaagaatggcattcataacactatatcgattttagagtcagtctatagggatagccctgaaaatgccgtcatcatggaacaaatatacttgtttagaaccaaagaatcaagtatttttgatccgatggctccacctaccgaaaatttggcctcttttcatccagtgaaaaatgcgattgaaaaaggaattcaacctgtttgtcttgaaaaatgcctattattgaaggcaaaagatagccccgtggaaacaccgataaatgaaattgttaatgctctgtggaaaattctggactctcagagaccttactcagaatccatgaaacttctgaggttgataaattctctattattttatcttattgactcttttcaagttccattaaatgcttcttttgacgaaaccttggatcaaccgcaaaatacgcgaaacgtaaattcggttttccaggattctattgataaattgctggactcattacaatcggatgacattgctagaagagcggtcattgaaattgataatttaaatggcaagatctctaccttgaatgaaagaataagccttgttgaaaaccatagtaaagaccaactattgacgaaactagatgaaagtgaaattctagtatctttgaaaacgaaggaaaacgaaaatttgaaacttcagttgaagaaaattaagaagaagctggatcaaattgctacacaccaaagactatatgaccaacccccttcattagccagcagcaacttaagtgttactggttctacaacacaaagcaatagcaatagtaatttgatttttcaaaatttagctgtcaaagaacatcaacagcaaaagatttctttacctaaacactcgacgagtatactaaagagtaaaagaattacgtccctttcatcatatcttgctgattcgaatgacgaaaatgaggaccagactggaatagaagatagatcgaaagatttgtttcaggcatctgcctctgccgttaattttaagattcgttctgtaaaaaatattacaaatttgcagaatgtttcattaaattcaatactctcagaactcgaattctcaaacgatctgaatattcaaccaaattatcaatcttctccggtattgtcttcgatatcttcatcgcccaaactattttcccaactttctgcgaaaagtcttaacaacaatattccactgttatctgaagttgataataaatttacggttcctcctccccctccccctccccctcctcctccactcccattctctctcttacctgattcggaagctactctcaaaccagagatatctgcgcctgctccaccacctctcccggatttgtttaaagttgatgatccctgctctattccacctcctccacccttgcctgggtcattatcgatgtctaatgagacttcagataatggcgtcgtgactccggcagctccacctttacccaatggtctactttcactatcttcaacgtcaatcaactcaacgactgtaaatttagtatcaagctcgtctaaaagtcgcttgaagcaaattcattgggacaaagtagaagaaatcaaagataccctttgggaagatacagcccaacgccaagaaacacttaaagagttgcaaaccggtggtatattttctcaaattgaagatattttcaagatgaaagatcccgctaaaattgcatgtaaaaaaaatggtggctcttcaactgcaatgtcttcgaataatggcaagtcttcaaatgaattaaaaaaggtttcgttcttatcaagagatttagctcaacaatttggtatcaatttacatatgttttctcaggtatctgatatggaatttgtaaagaaagttttaaactgtgataacaacattatcatgaatgtaaacattttgaaatttttctgtaaagaggagctcctaagtataccccaaagtctgcttagtaagtatgagccctattctcagggtaaaggaggaaaatcagtaagtgatttacagagggctgatagaatatttttggaattgtgtattaatttaagatcatattggaacgcaagatcaaaaagtcttttaacactatcgacctatgaaagagattattacgatttgattttcaagttacagaaaattgatgatggtattctgcaattaaatcgttcttttaaattcaagagtttaatgtttataattacggaaattggtaaccacatgaataaaaaaatggtcaagggtatcaaattgaaatcattaaccaaattagcctttgttagatccagcgcagatcaaaatctatcatttttacatttcattgaaaaaaccataagaacaaaataccctgatatttatggttttgtagatgatctaaagagaattgaagatttaggtaaggtttcattagagcatgttgaattggaatgccgtgaatttcagcataagattgaaaatgcggtcactcagtttcagacaggaaaactttcgaacgaggaaaatttggatccaagagatcagattatcaaaagagtcaaattcaagatcaatcgggctaaaacaaaaagtgacttattggtggatcaatgtaaattaacgttaattgatttaagcaaactaatgaagtattatggtgaagatcccaatgacaaagaaagtaagaacgaattttttcaaacattcattgaatttttggccatgtttaaaaaatgtgccaaagaaaatattgaaaaggaggaaatggaaagggtgtacgaacaaagaaaaaacctgctagaaatgagaacaaatagcaacaagaaaagcaacgaaaacgacgaaaacgaaggaggggaagtgaacacagatgctgttgatttattgatctctaaattgcgtgaagtaaagaaggactcggaaccattaagaagaagaaaaggtaccaaactcaacgaaatcactgtgaatgtagatgaagggaattcgaaagcgagaaagggtgaagaccacgtactgtttgagagaacgcatgctatgttgaatgagattcaaaagatataa

SEQ ID NO: 1203 - DNA, 615 bp, Saccharomyces pastorianus
atgggcgacatttctatggcagtaggtacgactgttggaattccaattggcgtgggcgtaacaatagctctgatattttggtgcattttgcaacatcgttataggaaagaagcagctcgagatggagacttggaaaagattatggcagcagaagtggctgtgtccgtatatgaaagcttcaaattagaaatgagcagttcaagcgagatatctacgataaatgaaaagaaaagcgaacaagatctcaagccctgcgaggctagacctgccaaaaatgggtatacaccggcgtataggcgacaattgaatgcaagtatggggagaatgtgtaaaaaaccacagggagccgcttatatcaatgtccctgtcattttcagcggtgagaagatgaatcatgggatggtcagagactcatcggatagattcatgtacccattgactttgacgcgcaagaacactcctagtcgtcgagctaagcccacaacaaactcaatttcaaacacgatcaataccagtctgcacgaagaggacaatttggacgacccatatgagaacaagtttacaaattatgttgcgaataaaagagaatttattgacagtttaaggccaaattga

SEQ ID NO: 1204 - DNA, 1047 bp, Saccharomyces pastorianus
atgcacaagagcatattgctgaccacgccggacggtgcgcaaacgaacctgcaccaaagcaagccggagacgcccaccaccgtggagttcgactcggaacagctcgaaaggggccacagggagagaggccgtagcaagaagaagagaggcgagcgaaacgacccatacgcaagcagcgtgtcgcggtccaggagtagggccagctcccgcagcagggtgcgggaggagcagttcctcaaatggacggtgttgaggcaggacccgtcgatgcggttgcggatcctggaccgggaccgggactctgaagacgaagaagaagaaggtgatgataacgacgactacggcgacggcgacctcgacgacgaggagtccgacgaggagcaggtcagcgacgtcgacaacgacctcgagatcgacgaggagttccactacgacctgggcatgaaagtgctccccaacttctgcacctgcatcaacgacgtgctggactccagcaagccgtggatagccaagtacgagatcagcatccgcggccacgaggacgacggcgtgtcgctggagcgactcgccggcgggtacgtcagggccatgcagctgctcaccaagggcgccggcgcagagcccggcgcccagcgctgcttcatcctctacacagacctcaccaccgagtccacctacgccctcacctacctcatgggcgccgtgctcaaccagggcgacaccctctacatcctccactgggaaccctccaccccgacagacgactcccaaatgctcgccaacgtcgccagaatccgcaaacacgtcatgcacctgttcgactgcgtcgcagccgtcctcgacgacctcgacgtcgtcatcctctccctgactcacccgtacccgaaacacctgctcaacgagatgattcacggcctcaaaccagtcgccctgtgttgctccctctccgtcatcctgggcaccttgcagaacttcgtctgctccgtccccaccctcgctgtcagaaagaaactcaagcgtgccaagcgcaagggcatcttcgagtga

SEQ ID NO: 1205 - DNA, 696 bp, Saccharomyces pastorianus
atgagccataaaagaagaggtctagtgatataccaggaccagaaacagccgcagcactcctccggccagtccataagttctctatcctggtccgcgacacaacggcaacagcaacagcaccaccaccaccctttgaaacagcaaggtaccaacagtttcacaaaaatattgtcgaaatcgtatttacaacaggatgcccagcaggataacagccacctccccatctcatcgctagttctgaagcagcagcagcagcgcaaaaatacgccatcacagagctcaggacctccgttgccaaagctagttcaagactcacagtggactagctccacaattcatcggccctcatggaagcaagagaagcaaccaaaattgttctactatacagactccagacttgtttcgcaactacatagctccgtcaaggacctggacactattatccaaacgcataagccaaggtttgacacaattattcacgacctatctcataccataatattgtcctcgaacgagctgctcataaagctcccgacgaaagacgcaataatactgcacagcagaacacccataataaatgcggaatggctgcggaataaactcagtaacgctggcgcctcactagtgatcgattcaaaatcctttttgatcctgtgtaacaatataaaatggtacctgcactggaagtttatatga

SEQ ID NO: 1206 - DNA, 3354 bp, Saccharomyces pastorianus
atggttgacataatggcgccggtgaatgatgatcctaataatgtgaccgattattcaagatccagtaacaatcctacttctgtagtgaacgacatgcgtccgacaaccacggcgcttctccaccaaaagcgacatagctcctcctcgcacaatgatacacccgagtcgtctttcgccaaaagaagagtacctggagtagtagagcctgtggggaagggatttatagatggaataagcactagccaagtactgatgcaaaacgtccccttcaaaacggatgatatttctagaagaccgagcatttctcgaaaggccatggaatcgaccccgcaacttcacgccagttctaactcggccatggacatacccaagtcaccctattacgtgagcagaacagcgattgctcgaaatatggaagtggtctctaaggacagtcatgacgaaaacgtcccgcaggcaaggactgatgattcattgactacttcaaatggtatttatgccaattcgcaaccgcagagtcagataacattgtccgacactagggcagcacccgtttctgctacttcacttccatcagtgacaagacagttaccttctgcgcaacccaatcagacattcattaagaaattacaagaaatctataaaattatagtggtacaggaaacagaattgcaacagagatgtctctttttaacaacctctcaaactacggaattgaaaagcttatgggcaatatacaaattaaacactgaactgatcaaaaactacatcaatttcatcatcactgcattattaaccacacagccgataaatgatttaattatgggccaagaaatcttggacatttacaggatagagaaaaggttatgggtatatggtataataactttcttggatgtcctgaagaatttttcaaattttatggaccctgaagtgtgttgtcaattcatcacatacgcatttatctgtatctcgaacatgcttgaagatataccgctgaaatattctattctatggagacagagactgggcgatttatcccgaatggcaatttcactgtatccatcagggtttatagattggaggctgagcgcagagtattggtacactcaatcaatgaaatacatatacgggtgtggtaagctttactatcatattgccacaattcaacagaacagtttagaggcatttgtaaacttgggcaaaagtgttttctgccaggatccctttactccgtctcaacaaacgttacaattattgattgaaaacatttatcagtccgcattcactgacagaagttctagtaataccaacaacaatgaaatcgctcataaaaattctcaattaattgattatttaaaacacactgaagtaatgttattacctagtttcctggagaatatggacttacaacatgttgtgctgctgtatttcaaagataaatttggtaaagactttaatgggaatgatgtttttagtacaaaagatatgttttgccaaaacccagagtcactacggtattattttagacatgcaccagcatttgctgaatctcaaattttacaattgattgggtttgggaatcctaaaaatccatttgcattactgtttcaattacccaaacatttgaaattgaaaaaggataaaagagagaagaagaaatccggcgcaacagaaataccgcattacaaagatccctttgatgaccaagcaagctcagaaagttattttcaaaatatcgatactttaaattccaattttgatgatcttcctaccaatatcgatatctggctggattccttaaactacataaacatgacgtcaatacaatgtagtatgcacgtattaactaaattccttcatgcacctttagcagttgctttaccgcattttttgacctggttacatttcataattgcggttcttaaaaagctggagaccattgattctaaacaagtaacttcattttggctgcattttctaagaagaacgatgccgtggaattccacggtaacttttgccaacgtcttggtgtgctacatgctagataatttacatccattcttagaaagggagttagaaaaattctattcattagaattagacgatctgattgaatattttaacgaaaatgaaaacctacccgaggtttggaaatgctgggggagcttatggtttgacgcagttaagaaatgcgatgtgatggaaattcctggcgttcgagatcaccttttttttgattctccccttgatggtatagtatttgataaaaaggatgaaattggcgagaaattctggatacgtagtgtaagaaccattttaaccttgaaagggattgccaagaagttccctgatttgggattgaaggtaaattttcaagcacctgtgttttgtcgtagaaatgacatttcaccagattatttcttgaaaaatttaacgtttaagttggatccatatgaagaggacgcttttaatgatgacaacgaactagacgagttatacgacgcaatcgaaataagcgagctgatcgaaacggataatatggacctgcgggccacaccgagattaagtgttgtttctggtgagagtatcttcgaatatactggttatacaagattgacaccagattatcattgctttgataaaaacggtggatttaatagcgcgtttatttatactcaatggtccaacgttggaaacggcataacgttagacgtaagcagcgagtcattatacgatgctagcactaacgatttgagtttacattgggcaaagattcttttcgataaagttttcacgattgggaaaaacagcgatgatgacggtaattgttcggtttactttgtcattgacgctacttcgtggttaagacatttcgcacatattttcaagttagccaagaacaatattcttaaatttgcaatttgtttaaccacgttccaagaattacgctatttgagaggctcaaaggatgataatgttgtagaagcagcaacaaggtctgtgattactattaggcaattgtatgatgaagggaaaatcattcctatgaggtttacagggaatatagccacgcatgtggaggaaaacttagaattcgaagagcaaattacttggaagacacacgttgacgaatttgtcattgatgctattgctaggctgaaccaaaatttccaaaccgaaagaacgatagatataaacaaaggccgtgccaaggaatttgcagttttagtaacggacgatgataatatgaaccaaaaggcgaaagataaaatgataaagacgtgcaatacaaaatatttattttcattgggcagcaaacttggcattaattctggattatgtaccaactga

SEQ ID NO: 1207 - DNA, 1710 bp, Saccharomyces pastorianus
atggacgatccacgtgaggttttagcggttgatccgtataacaatgtcacatcagatgaagaagacgaacaggccatcgctaaggaacttgaatttatggaacgaaagaagcaagccttaatggaacgattgaagaggaagcaagacttcaaaaaaccggaagatcctaactttgaggctgttgaagtaccgcaatctcccgctaagaaacgtacagttcagaattcccaagatgcctcaaaacaggccataaggcctgtagcttcaaacgtcaacgaattaatgctgtctcagcaatcactagaatcaccgagtaatacgaccacatattttatgcaaaaatttcagagtgcaaagagaaatgaggataagcagattgccagatatgaaggtatgatgaacgcaagggtacatacgtttggtactgataacaaagaatacaagccaataatcacaaacgagttggaaagtttttcaaatctttgggttaaaaaacgatacatgcccgaagaagatttaaagcatgctttacatgagattaagattcttcgactgaacaagctttttgctaaaattcgtccaccaaagttccaggaacctgactacaccaattgggccacagtcggcctgattagtcataaatcagaaatcaagtttacgtcttctgagaagccgattaaatttttcatgttcacaattacagatttccaacattcactagatgtttatatttttgggaaaaagggtgttgaaagatactataatctccgtctgggtgatgtgatagcaatattaaaccctgaagtactaccgtggagaccttcaagtcatgggaactttattaagtcttttaatctccgaattagtcatgacttcaagtgtatcttggaaataggctcaagcagggacttgggatggtgtcccatcgtgaataaaaagacacataagaactgtggatctcctataaatacaaatcttcacatgtgctgtgattatcatagagaagtgcaatttagagggactagtgcaaagagaattgaactaaacgggggttacgccttgggtgcgccgaccaaagtagattctcaacctagtttatacagagccaaaggagaaaatcaatttaatatagtcagaagtacccgtaaaggtctctctgaagaagaagaaagagtcaaaaagaactctcacaattttaccaatagtaattctgccaaggcattttttgatgaaaaatttcagaatccagatatgctcgcaaacttggatagcaaaagaagaaagattattgataccaagaaatccacagcattgagccgtgagctaggcaaaatcatgagaagaaaggagtcaagcggattagaggacaaaagcgaaggagagaaacaaaaaatgaagcaaaccacagagagtgctctccaaacgggactgattcaacgtctaggatttgatccgacccatgggaaaatttccaaagtgcttaagtcctctgttcccggcggagagtccaagaacaaccgcgttaatgggaagaaaactgtcattaatgatctcctacagtacaagaaggagaaagtcatcctggcaccttcaaagaacgaatggttcaaaaaacgaagtcatcgtgaagaagtttggcaaaggcactttggatcaaatgaaactgaaggagcttcggacgctagtggaagtgaccttgagattgtataa

SEQ ID NO: 1208 - DNA, 1620 bp, Saccharomyces pastorianus
atggttctggaccaccaacatagagaaaagaaaggatcatcttccaggaacatggcgccaaattcttcatcaatgaatatccgcccatgctctgaaggacaagcttgggaagacaaaggtttgctagaccctcatctatctgtgttagaactgttgggcaagaccgggagttcgccttccccgttgggacagagcttggtcacatctattgacatatcgaaccaccataacgtaatcgataatatatcaggatcatggcaaaccattcaacctttggacttaggcgcttcttttatcccagaaaggtgctcttcgcagaccacaaatgggagtatcttatcgtctagtgacacttctgaagaagaacaagacttgcttcaagcgcctgctgctgatataataaacatcatcaaacaaggccaagatggcgcaagtgttgcttcgccatcacacccctttaagcaactccatacggtaatatcgttacccatgcctcccagggagaggaccttctatggtgagcaagaagaagaagttgtttgcattgacaatgatgacgataatggagtgtatgaagaagacagcgtgacaataacaaagagtttaacctcttcgacaaattcctttgttatgcctaaattatcactttcacgaaagaatccagttttccgtcttctggtactggggagagcgggtacaaaattttatcaatcaacgcccaaagaatatcagtctctctttgaattacccaaatcgcatgactccacaatattcccgcaatatacaggtatcgtcgtagttttccaagagttgaaagaaatggtatccctactcaatagaatcgtcgaatacgcccaaggcaagcccataatacctatctgtcaaccaggtcaaaccattcaagtaaagaatgttctgaaatcattcttaaaaaatagcctaatcaaactgttgtatcctccagtggtagtgacaaatagaaaagatatgaaaaaaatgtttgagaggttacaagatctgtctttggaatacgtgcaagatgaaaataatgaaggccaggatgaagataatgatgatgaacccatacagacatattctaggtcatataatcgtaacaagagagctggaagttcaaaaaggaaatcttccaaatcaagtaaaaaatctaaaaaaaaaaagcaacgctcttcaacaaaatggtttacttggggcgtttcaatcactattgggataagttttggatgttgcgtaacatactttgtcaccgcagcatatgaccaccaaacgatcaggtccttcaattcgcaatcgtctttactagcttcttttctttctttggattcttctagagacacggttaactcggctaccactactcctgcctcttctagtgagcagtttttatggtttgataagggcacgcttcagataaacttcaattcggacggattcattatgaaaagtctcaatgtcataaaggaaacatggggtaaaatgaatgatttcttcctgaccgctctgtacaggcctttgaattttctagacaatcttaataaaaaccctgatttttccgttgatgaatctaatcggattttggcactcggttatattttattataa

SEQ ID NO: 1209 - DNA, 2535 bp, Saccharomyces pastorianus
atgacggacatcgaaagccgcgagaccaagagcaacggaaagatcttcccagatatggggggagcctttttctcgtcagatgaggattctccagctactgatgtagagaacgacgataactacgaagatggcaaggaaacgcttactgcagttggcgaggaacgggacactggtgccatggttacaggactgaagaaaatacggaagaagaccaaaagtagcaggcataccgccgcaacggattcttctatgaatcaaatggacgctaaggataaggcgctcttgcacgacaacaatagcgatataccagcagatttcgttccagattctgtttcagggatgttcagaagccatgattttagttatctgcggttaaggccggatcacgcttcaaggcccctttggatttccccaagtgacggtaggatcattttggaaagtttttctcctttggctgaacaagctcaagactttttggtcaccattgcagaacccataagtaggccctcccatattcacgaatacaagatcacagcatattccttgtacgcagccgtttctgtggggttggaaacggacgatatcctttccgtcctggataggctgtccaaagtacccgtggcagaatctatacttaacttcatcaagggggccactatctcgtatggtaaagtgaaactggtcattaagcataatagatatttcgtcgaaaccacccaagctgatattttacaaatgctattaaacgattccgttattgggcccctaagaatagatagtgaccatcaagcacaaccagcggacgataaagagcaacagatccaacaaccgggcggtaagcccgctgccaacgttaatccaaatgatgtggaggccgtgttcagtgcagttattggcggcgacaacgagcgtgacgatgacgacgacgaccttgatgcagttcattcttttgaaattgccaatgagtccgtggaagtcgttaagaaaagatgccaagagattgattatcccgttttggaagaatatgatttcagaaacgaccatagaaatccagatttagatatcgatttgaaaccctctactcagatcagaccttaccaagaaaagtcactaagtaaaatgtttggtaatggtcgtgctcgttcgggtatcattgttttgccttgtggtgcaggtaagactttggttggtattactgcagcgtgcactatcaaaaaatcggtaattgttttgtgtacttcgtcagtgtctgtcatgcaatggagacagcaatttttgcaatggtgtaccttacaacccgaaaattgtgcagttttcacctctgacaataaggaaatgtttcaaactgaagccggtttggttgtatccacttattcaatggtggcaaatacaagaaacagatcacatgattcccaaaaagtcatggatttcttaaccggtagagaatgggggttcattattcttgacgaggtccatgtcgtgccagccgcaatgttccgtagagtggtttccaccattgcggcacatgccaaattggggttgactgcgactttggttagagaagatgataaaatcggtgatttgaatttcttaattggtccaaaactttacgaagcaaattggatggaactgtctcagaaagggcatattgcaaacgttcaatgtgcagaagtttggtgtcccatgacagcagagttttatcaagaatatttaagagaaactgcaaggaaaagaatgctgttgtacatcatgaatccgaccaagtttcaagcatgtcaattcttaattcaatatcatgaaagaaggggcgataagatcattgtcttttccgacaatgtttatgctttacaggagtatgctctgaagatggggaaaccttttatttatggttccacgccacaacaagaacgtatgaatattctacaaaattttcaatataacgaccagatcaataccatttttctatcaaaagtgggtgatacgtccattgatttaccggaggctacatgtttaatccaaatctcttcgcactatgggtctcgtcgtcaagaagctcaaagattagggagaattctaagagccaaaagacgtaatgatcaagggttcaatgcattcttttactccttggtttccaaggatactcaagagatgtattattcaacgaagagacaagctttccttgtagatcaaggttacgcatttaaagttattacacatttacatgggatggaaaacattccaaacctggcatacgcctcgccaagggaacgtagagaacttttgcaagaagtcttgttgaaaaacgaagaagccgcgggtatcgaagccggtgatgatgctgacaattctgttgggagaggctcaaacggtcacaagagattcaaatcaaaagctgttagaggcgaaggttcgttggctggtcttgctggtggtgaagatatggcatacatggaatatatcacgaataaaaacaaagaattaaaggaacatcacccactgattagaaagatgtactataagaatttaaaaaaatga

SEQ ID NO: 1210 - DNA, 1584 bp, Saccharomyces pastorianus
atgagtgtacagatatttggagatcaagtgacagaagaaagagcggaaaatgctcgtttgtcggctttcgtgggagccattgccgtgggtgatttagtgaaaagcacgttgggccctaaggggatggacaagttgttgcagagtgcatcgagcaatacttgcatggtgacgaatgatggtgcaacgatcctgaagtcgattccgttggacaacccagctgctaaagtgctggtgaacatcagtaaagtgcaggacgacgaggttggtgacggtaccaccagtgtcactgtgttgagtgcagaattgcttagagaggcggagaaattgatcgatcagtccaagattcaccctcagaccatcattgaaggttacagattagcctcggcggctgcgttggacgcgttggcgaaagcagccgtggacaactcccaagataagaccaagttccgtgaggatttggttcatattgccaagactacactatcttccaagatcctgtctcaagacaaggaccattttgccgagttggccaccactgcgatcttgagattgaaagggtctaccaatctagaacacatccagatcatcaaaattcttggtgggaaactatcggactcgttccttgacgaaggttttattctcgccaagaagtttggtaacaatcaaccaaagagaattgagaacgccaagattctaattgctaatactactttggacacagacaaagtcaaaattttcgggacaaagttcaaagtcgactccactgccaaattggcagaactagaaaaggcggagcgtgaaaagatgaagagcaaaattgccaaaatctccaagtttggtatcaacactttcatcaacagacagctaatttatgactacccagagcaactctttacagatttgggtataaactccatcgaacatgcggatttcgaaggtgtcgaaagactagctttagtcacgggtggtgaagtggtgtccacgttcgacgagccaagcaaatgcaaattaggagaatgtgacgtgatcgaggagatcatacttggcgaacagccattcttgaagttcagtggctgcaaagctggcgaggcctgtaccatcgttttaagaggtgccaccgaacagatgctagacgaagctgagagatccttacacgacgcattgtccgtgctgtcccagaccactaaggaaacaagaacagtcttaggtggcggttgcgccgagatggtcatgtccaaagccgtggacactcaagcgcaaaacatcgacgggaagaagtcccttgctgtggacgcctttgcccgtgccttaagacagctgccaactattttggcagacaacgccggattcgacagcagcgagctcgtgtccaagctaagatcctccatatacaacggtatctctacttccggcctggacctcaacaacgggactatcgccgacatgagagagctaggtatcgtcgagagctacaagctgaagcgagcagtcgtgagctcagcatccgaagccgctgaggtgctattaagagtggacaacatcatccgtgccagaccaagaaccgccaatagacagcatatgtaa

SEQ ID NO: 1211 - DNA, 2460 bp, Saccharomyces pastorianus
atggtacagcttcaactttcgttattgttggtacctattatatcgctactccacctggtggtagccacgccctacgaggcatatcccattgggaagcagtaccctccggtggcaaggctcaatgagtcgttcacattccagatttccaacgatacctacaaatcttccgtggacaaaacagcccaaattacatacaattgcttcgacttgccggactggctctcgttcgatgccggttcaagaaccttctcaggcgagccttcctccaacttactatctgacgctaacactacactatactacaacgtggtacttgaaggtacggatcctactgatagcacgactttgaacaacacgtaccagttcgtagtcagcaaccgtccatccatctctttgtcgtcggatttcaacctgttggcgttgctgaaaaactacggttacactaacggtaaaaatgcattgaaacttgctcctaatgaggttttcaatgtgacttttgaccgttcgatgttcactaacgaggattccatcgtgtcatactacgggcgcactgaattgtataatgcacctttacccaattggttgttcttcgactccgatgagttgaaattcactgggactgcacccgtaatcaattcagaaattgccccagagacaagttacgattttgtcattattgccacagatatcgaaggattctccgccgttgaagtgacgtttgagttggttattggtgcgcatcaattgactacctccatccaaaacagcctaattataaacgtcacggataccggtaacgtctcatataatttacctttaagttatgtgtatctcgatgacgatccaatcgcttccgaaaaagtgggttctatagacctgctcaatgctccggattggatttcattagacaataccaccatttctggttctgttccagatgatatgctcggtaaaaactccaaccctgccaacttttctgtatccatttatgacacttacggtgatgtggtttattttaattttgaagtggtctctacaacagacttatttgctattagttctctgcccaatatcaatgccacaagaggagaatggttcagctatttttttctgccctctcagtttacagactattcaaatacaacagtctcgctggagttcactaattcaagccaaaatcacgattggctaaatttccactcttctaacttaaccttgatgggtcaagtacccaataatctcgaaaagctttcattggccttaatggcgaatcaaggctctcattctcaagagctagatttcaacattattggtatgaattcaaaaacaactcactcgaaccatagctcgaatgctacatctacaatgagctctcatcgctctacttcaacgagttcttacacaacctctacacagacccaaactatgttgacctctacagctacttcatcctcagcagtggtacccacagcaaacaagaagtcctctcacagcaaaaagacagtggccatcgtatgcggtgtagtcatccctctgagcatcattctcattgccgtcatattgttcttaatcttctggagacgtagaaaagaaaattctgacaatgaaaaatcaccaaatgttatcagcgggcctgatttagataatgctgcaaacaagcccaaccaaggaaatgccacgtctttagataacccattcgatgatgatgcctcttcatatgatgacacctcgatagcaaggagattggctgctttgaacactctaaagttggatgatcattccacgtctgaatcggaaatctccagcatcgatgaaaaaagagattcttcatcggttatggacatgtacgatgacgcatttcagtcccaaagcaaagaggaactgctcgaaaaatcaccagcacagcctgtagcaagccccttctttgaccctcagaatagatcttcttcagtttacatggacagtgagccggccgtaaataaatcctggagatatacgggcgacttaccagcagttcctgacggtgtcagagacagctatggctcacaacaaacagtggatacagagaaactatttgacttggatgtgccgccaaaacaaaaacagaacaacacattaagagacgttactttgtcttcattggacccatggaacgacaatattaatgattcctcgataaagaatacaagggcgccaacgccgaagaacaaaacaacaaatggtaaccttcccttgccagattctcgttctgtaacaaatggaagaacaccaacaacaatgtcaacctcgtcttctgatgattttgttccagtcaaagacggtaagactttctgctgggttcacagtacagaaccagacagacaaccaagcaagaaaagacttgtggatttttcaaacaagagtaatgtcaatattggtcaagttgaagacattcagggacgcatcccagaaacgctatga

SEQ ID NO: 1212 - DNA, 486 bp, Saccharomyces pastorianus
atggaaaagatcaaggagaaattgaacagtttgaaactagaatctgaatcatggcaggaaaaatatgaggggttaagagaacaagtcaaagaattagagcaatctaatactgagaaagaaaacgagatcaaagcattgtctgctaagaacgagcagttcgatcatgaagtagaaaaattagagcatcaattggctgaaactaaacaattggctgaagactcgaacaatttaaggtctcataatgaaaactacaccaagaagaatcaagacttagaacaacaactagaagacagtgaaaccaaattaaaagaagctatggataaactgaaagaagcagacttgaactctgagcaaatgggcagaaagatcgttgctttagaggaagagagagacgaatgggaaaagaaatgtgaagattttcaaagcaaatacgaagaagccaagaaggaattggatgagattgctaattctttggaaaatttatga

SEQ ID NO: 1213 - DNA, 2835 bp, Saccharomyces pastorianus
atgtccgataatctgctatctttgtcgaatcccgtagtgccatgccattacgaattgtgcctagacatcgacccgtcatcgcccaatttcaaaggtaaggccaagatcgagttgaaattcaatccgaattccacctctttagcctccatcgaggacagtttcacccagttcaaactgcattccagggacttggttgttttgtctgcgcatgccaccgttggctctgcaaaattcgatctgaaagtgtctcaagacacccaaaatcattggtcagttttccagtctgactcgccgattcaattgtccaacgaatcaccgttggtcttgtccgtccaatacgtgggtaaaatccgcagcataaagacccaccacgatgcgacttttggtattttcaagacaaacttcatggatcccaaaacaggaacttccaacaaccatgtggtggctacgcactgccaaccgttttccgctagtaacattttcccctgtgttgatgaaccttcggccaaatccactattcaattaaacattactatgaactcacagtataaagccgtttccaattcgcccatcgaggctattgagactttggataatccgcaaaaacatttggtaaaattcgccacgacgcccttgatgaccacttccgtgtttggttttgccctgggtgacttggagtttttgaaaactgaagtcaaattgcagaataacataaccatgcctgtctccatctatgcgccttgggatattgctaatgccactttcaccttagacacaatccaaaagtatctgcctgttttggaatcctatttccagtgcccatatcctctgcccaagttggacttcgtcttattgccatatttgacagacatggcaatggaaaattttggtatgatcaccattcaactaaatcacttactccttccaccaagtgccctggctagcgatatcatcagagagcaagcccagcagctcattgttcatgagctggttcatcagtggatgggtaactacattacttttgactcatgggagcatctttggttcaatgagtcctttgccacttggttggcatgccacgtcctagaacagaaaggtgatttgccccaatattggacttcagagccctatttgctacaacaagtagaacccatcatgtgcaaagacgcatctgatttcaatagcaaaagtatctcccagattgcacagcggaagactagtatgaactcacatacatccgacatctttgatcctgaggcatatgcaaaaggtatcgttatgctgaggtctttgcaattggctataggtgatactcatttacagaagggtctccagagtgtttttgaagataccaaaacattccatgaaagaagcgtcaagcccatggatatctggaatcatatcgggaagactttgaaatctcaaaatataactaattttgtttcatcttggacaagaactccaggcttacctgtcgttaaagtagaattagaacaacaagatggaaagactcaaacaaaattaacccaacatagatttatcaatcaattgtctagcgatgagaaagcccaattagaagatgtcccataccaaattcccctatttggtgtcttgccagactgtacattggataccgagaatgttttattgactgatagaacattaacgttaaattatcctgtcctggtgctcaaccattttgcacaaggttattatcgtgtctcatacgaatccaaagaatgctatacccaaatcagcgataaaataatcgaaggtacgctatccgagattgacctttggaagattttcttagacttatcgcagtttatcggtgacgaaagtttccagggttctattcatttagttggtctttgtgagatattgaacaacattgcttcatcctcttcaaaaattccatcaaaatattggggcccattatccaaggggttagaaattctacaaacaactgaccgtgccattttatcaagctctagattacagtcctttttgagaaagaagataattattccacttttcgataagattgaatggccccagggcgaatttggtgagagcacagatccctacgaactgaaggtcatgtcgcaagttttgtttttgaacaaaaactctcagaaatgtgatgaattgtgccaaatttacttcaggcatttattgcaaggtccacgttcaagcgtcccattagaactagtgaattccatccttgttgtagtgtctcaacattgttcaaacattaagcagtggaaaaagatatttgatttggtcaaacacagctcttgtgccggtatcacgaaccacattgttaacctatacaaccaaagtaatgatgaaactatcagctcaatccaaaacagtgcaattgaatctcttggattctgtctagatttagacatagtgaaaaagattctgaattttgtcacttctaacattgaatccgaggggatggaactggcgttattcgggttcaactacaactttagaaagaggttaaacaagaaggggaaaccccaagacgaagtcgttcgggaattgatctggaaatggttcacggacaatttcgaccaatgggcacggaaggctacaaggaagggcactactacaggcgaccgtctgcacaaggtgttgagaagcatttccttggtaatctttcaaatgtttgttccagatgagccagaaaggatcgaaaaattcatcaatttgaaaaaagaaaagttgagtcaacacttattatcattggatgacatctggacttctgttcaacaagatgaagtgtccagaaagactataagtaagatgctgactcccatcgtgtga

SEQ ID NO: 1214 - DNA, 1182 bp, Saccharomyces pastorianus
atgtcttcaagaatcatcgtcggtagtgcagcgctagccgctgccatcacagccagcatcatggtcagggagcagagggccaagggccagggaagagattgcagggccagcgtctgctacaacaaccaggactacggcagctcggtgcctccgcagtggggaaagctgcacaacatcaagcaaggactgaaggaggacgcattgtcgttgaaggacgccctgctaggcgtttcacagcaggccagggaggaggctcctggtgcagtcagacgtgtgatctccgcagaggaggactctcggacacgcaagaacttaagtcagaagtccaaggactcttcctcgcagagcatctttaactgggggttcagcgaggctgagagaagaaaggccatagccatcggagagttcgatgttgcgaagaaacggttcgaagaggctgtagaccgcggcgagaaggaactcttgtccactgtgatgagagagaagaaagccgccttggacagggcatccttggagtacgagaagtacgggaaggctggggacttcaacgagctgtcggacaagctggaccagcaggagagggacagcaaccctttgaatcgtttgctgaagaagaacgtgaacagcggtagtaccgaagaagctgctgcaagaagtgtgcgaggctggggtgaaactgcccaggagtttggtagagaggagatggaagaggccaagaggaacgcgtcttcgcagcctagtgaggcccaaaggcgtctcaacgaactgaagaagatcaaggagaagggctggttcggttacaacaagggcgaacaaagcgagcagcagattgctgaaagagtggccaggggcctggaaggctggggtgaaactgcggcccaactttctaaggatgaaatggatgatttgagatggaattacgaaaactcgaagaagcaactggacaaaaacgtgtcggacgcgatgacttcattgtccaaagccaaggaggacttgaagcagtacggtagccattggtggtctggatggacggccaaggtcgacaacgacaaggaagctttgaaagatgaagctcagaaaaagtacgacgaagcattaaagaagtacgacgacgccaaggacaaatttaaggagtggaccgataacggcgatggcaaattttggagctcaaagaaaaactag

SEQ ID NO: 1215 - DNA, 1293 bp, Saccharomyces pastorianus
atggatactagcaacagtaacggggaccacgactcccacgtggcagtacagacggaggacgatgatacttatatgccaccttccccctccatgagcgagagctctatgatttttgaacgaaacgtggaggacccgtcatatctctataagacggtgtcaaacaatactgcgaaccctctttccaggcaaagcagtaggaccagtttgtttaatcataataccagcaataggaatatccataatctgagccagaaatcgtctgcagtaaacctgcacctacaaccttccaggacaaatgagtccatagcatcttaccaaacgtataatcctgatttcgttgtgcagactcccctagatcaccgtcgtactttagagaatttcgtccctcctgcattagacgctggttgttctattgtcactgacgagacgactgggcttgatgacgtcgatatggtctactcaagaaggccatctacaattgggctggatagagccctgggcagaactaggagtctctcatctcaatcttttgaaaacgaaatgtcacctgcgcacccaagatctcccaacgaacacggttcaagattgctaaggttttattcctacgctgacatgctatctgatgacaacaacatcaacaacaatagcaactccacagtaacaccgtcttcagcaaaccccctgagaagaccgcctatgcaaaatcactactcgttttcgtcatcaattatgaatacgccttctcacttgccttcacccccatcagcttcggcgtcacccccacaacacatgggctttaccaaccctttcatcatatccagacgctactctaacacaacgaccaataatgccagtggggttagcagcggcggcaacagcgctggcgccgtgctatcaagatcgccatcaaaccagcaatacctgctgaaacaacagaggtcaccctcaggcaccgtccattcgagaagaaacagcaacatgccaagcagtgctacaaacatcatgactgggaagcccaaatccaagttccatatcgagtccagtggcagtgaaggcttttcgtctgaagaggaggacaacgatgcaattgtaagaggcaaacttcatctgaagcaaaaactagaatcgcagctggctccgtcaccatcaattgctgtcaacacaactaatcataataataacaacaataataataaccacaaaaacaaccctgcgttttcaaactcaaatccaagctcgaaatcaaattcgaactctacaataaccgccatgaacccaagcgcagccaaatag

SEQ ID NO: 1216 - DNA, 942 bp, Saccharomyces pastorianus
atggtagaccaatggacaccattgcaaaaggagatcatctcaggcttgaccgcggggtccataaccaccctggtagtgcatccattagatttacttaaggttcgtttgcagttatctgccacgaatgcgcaaaaggcccattatggtccacccacggtggtcaaggagatcgtacgttcatcggccaataatagatatcgtacactaaaggtgatcaatgaactataccgtggactaaccataaatctgttcgggaatgccattgcatggggggtttatttcggattatatggcatcagcaaagaactgatatacaagtcagtggcagggcccgagcaaatccagcataaaggcgctaacaatgaccacaagatgaattcgcttatctacttatctgctggcgctgccagtggactgttgacggctatcttgacgaaccctatctgggtcataaagacaagaatcatgtccactagcaaaactgcccggggctcttacacttccatatacaatggtgtccagcgattgctacgaaccgagggcccacagggactgtggaagggtattgttcctgcactatttggtgtttcgcaaggcgctttatattttgcagtttatgatactttgaagcaaagaaaattgcgacaaaagggcggcgttggcgagaataaccatttaacaaactttcaaaccattgaaatcacctcctttggcaaaatggtatctgtcactttggtctaccctttccaattactaaaatcaaatttgcagagttttagggcgaatgaacaaaacttcaagttcattcctctaataaaactgatcgtttccaatgacggcttcctgggactttataaaggtctgtctgcaaacctagtacgagccattccatccacctgcattacgttttgcgtgtatgaaaatcttaaacataggctctag

SEQ ID NO: 1217 - DNA, 2871 bp, Saccharomyces pastorianus
  modified_base (2478)..(2536): a, c, g, t, unknown, or other
  modified_base (2590)..(2637): a, c, g, t, unknown, or other
atgccggaacaagcgcaacaaggagaacagtctgtcaagagaaggagggtcactcgagcttgtgacgaatgtagaaagaaaaaagttaagtgtgatggtcagcaaccgtgtattcattgcactgtatactcttatgagtgtacatacaaaaagcctacgaagaggacgcagaactccggaaactccggaatgctggcactaggcgatgctgctggtccatcatcaagtgttgtcgtggctaccgctgctttgaatccgaataaactactttcgagtgtcaaacctgagaaacctccgttaccaggttcttcaacaatacccgcaagcagcaacatgtccaagccaagaaggtataagaccaagagtactagactacaatcgacgatcgacaagtataagcaagtccttgatgaggtattcccgcagttgcctgatatagataatctggatgtccctgtatttttgcaaattttccacaattttaaaagggagtcgcaatcattcttagacgacactgtaaaagagtacattttgattgccaacgacagttcgtctccaatccagccaatgctctcttcaaattcaaaacattcaactccagacgagtttctacccaacttgaaaagcgactcgaatagtgcctctagtataaacaaggaacctgacaatatagacacgtactccaatattccagtaggtagggaaataaaaatcatcttacctccaaaaccgatcgccctacaattcgtaaaaagtacctgggagcactgttgtgttcttcttagattctatcacagaccatcgtttattacacaactagacgaattgtatgaaacagatccgaacaattacacttccaagcaaatgcaatttttgccgctatgttacgccgcaattgctgtgggagcattattttccaaatctatagtctccaacgactcttcgagggaaaaatttttacaagatgaaggttacaagtatttcatagcggcaagaaaactaattgacataacaaatgcccgtgacttgaactccatacaggccattttgatgctgtttatatttttacagtgttctgcacgtttgtcaacatgttacacttatatcggcgtggctatgagaagcgccttaagagcagggtttcataggaaattgagtgcaaattctggttttaccccaatagaagttgaaatgagaaaacgtcttttttacaccatctataaactagacgtttacatcaacgcaatgctaggtttacctagatccatatctccggacgattttgatcaaactctacctctggatttatcggacgagaatattacggaagttgcatacttacctgaaaaccaaaatgccgtgttgtcaagcacagggatttccaatgagcatacaaaactcttcttgatcttgaatgagatcatttctgagctgtatccaataaaaaaaaccaataatatcatatctcatgaaacagtcaccagtttggagttaaagttaagaaactggttagattcattgcccagagaactaatgcctaatgccaagaatattgatcctgaatacgaaagggctaatcgtttattacacttatcctttttgcatgtccagatcatattgtataggccttttattcattatttatcgcgtaatatgagtactcagaatttagatcccttatcttaccaaagagcaagaaactctattgctgtggctagaacagtcatcaaattagcaaaagagatggtcagtaataatttgttaacaggttcctactggtacgcctgttatacaattttttattccgtcgcgggccttttgttctacattcatgaggcacaacttcctgataaggacagtgctagagaatattacgatattttgaaggacgcagaaactggtagaagcgttctcattcaattaaaggattctagtatggctgctagtagaacttataatctgttaaatcagatcttcgaaaaattgaactcaaaaactatccagctgactgcattgcaatcatctctctctagcgaaagtggttctttggcaactaatagcacctcggcccttggatgtggtccaggggaatctttacaaccgcccgtgttcttctcttctcaagacacgaagcacggtctttcgacagggaataatgatgaaagcacgaacgattacacaatggcgaattatttaaacaatacgccactctccgaaattcctctaaacgaagcgcagcagcaagatcaaatgcctcaaggattgactaatacatctaatgaaagaggttctaacagctttctttcaaccgatattgcacttgatgataaccaccaacgaaatatgcttgatgctacagatgacgttttaatcagaaacgatgacgacataacaggcaacagtgcatttgattttgacagtaataaaaacgatgtatcaaatagctccaatccagttatcacaaacgacgacgatgannnnnnnnnnnnnnnnnnnnnnnnnnnnnnnnnnnnnnnnnnnnnnnnnnnnnnnnnnnccaacaacaacaacaacaacaacaacaacaacaacaacaacaacaacaacaacnnnnnnnnnnnnnnnnnnnnnnnnnnnnnnnnnnnnnnnnnnnnnnnnaacttccgcatgagtattgacaacaattcaccatcatttgaaggctttgctcaatggcagaggccaccttcacgagataatatgagcatagaagacaaagcagatacctcacctgataccgaaattaagagtgagcaaaacggaaccgaatcaaataatattcttggcgtatttgatcagctagatgctcaactttttgggaagtatatacctttaaactatccctctgaatga

SEQ ID NO: 1218 - DNA, 3093 bp, Saccharomyces pastorianus
atgacaccagatgagctaaattccgccatcgttacctttatggccaatctgaatatcgatgattctaaagcaaacgacacggctactgtggtcacagagtccatagttcacagatcaacaaaactgttggaagttgtcgttgcgctgaaggagtattttctttcagaaaatgaattagaaagaaagaatgctttgacgtgtttatccactattttggtcaagatccctaacgaccacttgtcaaagaatgaatgttcagtgattttccagttttatcaatctaaattcgatgaccaagcacttgtaaaagaggtattagaagggtttgctgcgttagccctaatgaagtttgtctccattaacgagataacccaacttttaaggctattgctagacaattaccaacaaggccagcatctggcatccgttagactcttgccttttgaggttctaaaaaacatatttgatagattcttcgtcaacgcgtcgtcgattggacaagttaaacggatcaacgatttatttatcgaaacgtttcttcatatcgccaacggtgagaaagatcctaagaacttattactatcatttgcattgaaccagtctatcacttccaacttacagaacgtggcgaatttcaaagaagacctttttgatgttttgttttgctatttcccaatcactttcaaaccaccaaagcatgatccttataaaatttccaatcaagatttgaaagccgcgttgagatccgccattgttgcaacaccattatttgccgaggatgcatatagcaacctacttgacaagcttactgcttcttcaccattggtgaaaaatgatacacttttaacactattggaatgcattagaaaatttggtggttcttctatattagaaaactggaagctactttggaatgctttgaaatttgaaattatgcagaacagcgaaggaggcgaaaacactctactaaatccacataatcaggagaaatcgaatgacatgggcgaatatactaattacgaagcttgtttgaaaattgttagtttgatgggactgcaactatacgattttgacaaagtatcgtttgagaagttcttcaatcatatcttagacgaactaaaaccgaactttagatatgaaaaagacttaaagcaaacctgtcagattttgtctgccattggtagcgggaaattagaaatattcaatcaggtaatttcctccaccttcccgttatttttgaataacacatcagaaactgccaagttaaaactgttaattatgaacttgtcattcttttttgactcatatattgagctatttggaaaaatatctacagatctccccgaaaagtcagtaccaaataataaactggctgaatacaaggatgagataattatgattttaagcatggcattgaccggtagctccaagtcggaggtaactgtgagaacactttctgtaatccagtttacaaaaatgattaagatgaggggatttttgacaaaagaggaggtttcgttaataattcaatatttcacagaaacagtattaactgatagtaataaaaacatatattatgcctgcttggaagggttgaaaacgatcagcgagatttatgagagtttagtttttgaaatatcattgaaaagactattagatttattacctgattattttggcgaaaatattcgtgtaaatgatgaagaaaatattcagattgaaacaattttaaaaatcatactcgatttcaccacctcgaggcatattttggttaaagaaagtattagctccctagcaaccaatttgaatactgtggctaaaatttccaaatccaaagaatactgctttttgttaatttcaactatctattctctttttaataataatcaaaatggcaatgttatcaaggaggaagatgctctctcgctcaaaagagccattgagcccaagttatttgagataatcacccaaaactctgccgttagggatgacaattacaatttgaccttgttatcgaatgtcttattctttattaatctgaaattgccacaaggaatacatcaagaagaactggacaagtacaacagcattttcatttccgaaggaaatataaaaatattaaatgcaccaactttgctgattattccatatgtcaaaatcttgtctgccatgaacaagtcctgtatatttcctcaaaagttaaatattcttactgaaaccatccaactattgagaacacatggctcaataatgacagaaaccgagaaattaggatatttggaactgctattagtcttatcgaataaatatgttcccgaaaagaacgtaatagaattattagattggaatgatctatcactgatcaatctagaaataatgatatggttgagcaaaggcctagtaatgcaaaactcttcaaaatcctccgaaacggctaataactttatcggtttattgtctaatgaagaaattggttcatttgtggcaagactatttgaaatatttgttgttaacattagttccctacagaaattcaaaggaatcaattggaataataatgttaaaatattgtacaaacagaaatttttcggtgatattttccagactctagtcaataactacaaaactactgtggatatgaacgttaaatgcaattacctgactgcgttatcgctagtattgaaacacactccaagccagttagtgggtccgttcattagcgatttgtttccacttttattgcaagctttggatatgcctgattctgaagtaagagtatccgctttagaaaccttaaaagacactacggataagcatcataaactaattacagagcacataagtacaatagttccattatcgttatcccttgttcttccgcaaaaatataataatgttaatgtcaggttgatagccttgcaactgttgcaaatgattaccattgtggtcccattaaattattgcctaacttatcaggatgaagtgataagcgggctagtgccggttttatctgataagaaaagaattgtaagaaagcaatgcattgatacaagacaagtttattttgaattgggtcaagttccattcgaatga

SEQ ID NO: 1219 - DNA, 621 bp, Saccharomyces pastorianus
atgtcattctcccttagtgaagcgtcagaattccaagcaacttctgctgttaatgggctgctgttgagtcttttgcccggcgttcctaaagtcagagctaatggtggtaagaaaagggtgaataatggatctaaagctcagttgatcgatagaaacttgaagaaaagagtggagttacaaaatcgagatgttcataaaatcaagaaaagatccaaactagccaaaaagaaacaggtcaaggtacataagcacgataaagagcgactagagcaactggcgaagtatcaggtgttgaaaaagcatcaagaagaaggtactttgactgagcatgaaaggaagtatttgaataaactaatcagaaggaactcacaaaatttaaggtcgtgggatttagaagatgaagtacgagatgagcttgatgatatccagcaatacatcttaaaacaaacagtctcgaccatgaaggcggacagaagtcaaagaagaaggtctaagaagaagcagtttaaagaagacattaaacagagcgattctgctagagaccataggtacccaggtttgacaccgggattggcccctgtaggattaagtgacgaggaggactccagcgaagaagactaa

SEQ ID NO: 1220 - DNA, 3045 bp, Saccharomyces pastorianus
atgctaagattagtgtcttcaccatcatgccggtacacttctagaagactgttaaaaacctccatcctgaaaaatgcatcaactgtgaggaccgctagaagaagattggctactactggtacagataattttctatcgacttcaaatgcgacttatatcgatgaaatgtaccaagcttggcaaaaggacccatcttcggtccatgtctcttggaacgcatatttcaagaacatgtcaaatccgaagataccagctgcaagcgctttccaggcccctcctagtatcaccaactttactcaaggtactgaggccgctcctttagggaccgcaatgagtggttctctggatgaaaacgtttcgatacatttaaaggtgcaattgttatgtagagcttatcaagtaagaggtcatttgaaagctcatatagatcctctagggatctcattcggtagtaataaaagtaatcctgttccaccagagttaaccctagactactacggtttcagcaaacaagatctcgaaaaagaaattaatttggggcctggtatcttaccaagatttgccaccggcgggagacccaaaatgactttgaaagaaatcgttgatcacttggaaaagctatactgctcttcttatggtgtacaatatacccacattccatctaaacaaaagtgtgaatggttaagagagagaattgaaatccctgacccgtatcactatactgtagaccaaaagagacaaatcttggacagattaacttggtccacttcatttgaatcattcttatctacaaaatttccaaatgataagagattcggtttagaaggtctagaaagtgttgttccaggtattaaaactctgattgatcgttctgttgaattaggagtggaggatattgttttaggtatggctcaccgtggtagactaaacgtcttatccaacgtggtacgtaaaccaaacgaatctatattctctgaattcaaaggttccagcgctcgtgatgatattgaaggatcaggtgatgttaagtaccacttgggtatgaactatcaaagacccaccacctcaggtaagtacgttaacttatccttggtggctaatccatcccatttagaatctgaagatccggttgttcttggtagaacaagagctttattacacgcaaagaatgatttgaaagaaaagacaaaggccctaggtgttttgctacacggtgatgctgcgtttgcgggtcaaggtgttgtttatgaaactatgggatttttgactttaccagaatactctacaggtggtaccattcatattatcacaaacaaccaaatcgggtttactacagatccaagattcgcaagatctactccatatccgtcagatttagccaaggccatagatgctccaattttccatgttaacgccaatgacgtggaagccgtgacatttattttcaatttagccgcagaatggaggcacaaattccacactgacgccatcattgatattgttggctggaggaaacatggtcacaacgaaaccgatcaaccttcattcactcaaccattaatgtatcaaaaaattgctaagcaaaaatccgtcattgatgtttacactgacaaactaatcaacgaaggctcgttttccagtaaagatattgacgaacataagaaatgggtatggaatcttttcgaagacgccttcgaaaaggctaaggactacgttccatcccaaagagaatggttaactgctgcttgggaaggatttaaatcaccaaaggaattagccactgaaatattaccacatgaaccaaccaatatttctgaaaaaaccttgaaagaattaggtaaagttctttcctcatggcctgaaaacttcgaagttcacaaaaatttgaaaagaattttgaaaaatagaggcaagtctattgaaactggtgagggtattgattgggctactggtgaagctttagcatttggatctttggtcttggaaggccaaaacgtcagggtatctggtgaagatgtagaaagaggtacattctcacaacgtcatgctgtcttacatgaccaaaagtctgaagccgtctacacgccgttaagtactttgagtaatgaaaaggccgatttcacaattgccaattcatcgttatctgaatatggtgtcatggggttcgagtatgggtactcgttaacttctccagattacctggtcatgtgggaagctcaattcggtgattttgctaatactgcgcaagtcatcatcgatcaatttattgccggtggtgaacaaaaatggaagcaacgttctgggttagtcttgtcattacctcatggttacgatggtcaaggtcccgaacattcatctggtagattagagagatttttgcaattagccaatgaagatccaagatatttcccatcggaagaaaagttacaaagacaacatcaagactgtaatttccaagtcgtgtatccaactacgccagccaacttatttcatattttaagaagacaacaacatcgtcagttccgtaagcctttggcgctattcttctctaagcaattgttacgtcatccactagccagatcctcgctatctgagttttctgatggtggattccaatggataattgaagatgttgaacatggtaagagcattggcacaaaagaagaaaccaagagattggttttgttgagtggacaagtttacacagcattgcataaaaggcgtgaaaccttaggcgataaaaccactgctttcttaaagattgaagaactacatcctttcccattcgctcaactacgtgactctttgaactcttatccaaacttgaaagaaatcgtttggtgccaggaagagccattgaacatgggttcatgggcatatacagaaccaaggttacataccacactgaaggaaacagataactataaaagtttcaaggttagatattgtggtagaaacccaagtggtgctgttgccgcaggtagcaaggcattgcatgtggtcgaagaggataatttcttgaaagatgttttccaacaaagctga

SEQ ID NO: 1221 - DNA, 897 bp, Saccharomyces pastorianus
atgtcacagttagaatcacaacctaagaagattgccgtcgttacgggtgcctcaggtggtatcggatacgaggtaacgaaggaactagccaggaatggatatatggtctatgcttgtgcaagaagattagagccaatggagcaattgtccttgcaatttggaagcgatatcgtcaaaccttacaagctagatatttctcagccggaagagattgtaacctttgctgggtttctaagaaatacattacctgagggtaaactggatttgctgtacaacaatgccggtcagagttgtacttttgccgcagtggatgccactgatgctgtagttgaacaatgtttcaaagttaatgtgtttggccatattaatatgtgtcgtgaactgacaaagttccttgttaacggtaaaggaactatcgttttcactggttctcttgctggggtgctaacattccccttcggtagtatctattccgcttccaaagctgcaatccaccaatatgcccgtgggttacatctagaactgaagccgtttggtgtaagagtcatcaacgccattactggcggtgtggccaccgacattcatgacaaaagacccttacctgaaacttccatatacaattttcccgaaggtagggcagcctttgattcaagaaaaactatggccagagacaacaagcccatgtcggctgaagcttacgccaagcagctagtcggggacattttgagtcgcaaggacccagtggatgtttacaggggtgcgtgggccaacctcatgcgtttagtagtgctatttgttccctactgggtattggaaaggggactctctaagaagttcaaactagacaaagtcaacgatgctctgaagttaaaacaaaggaaaagtaaggacgattag

SEQ ID NO: 1222 - DNA, 1395 bp, Saccharomyces pastorianus
atgaaattttcaactgccgttactacgttgattagttctggtgccatcgtgtctgctctcccacacgtggacgtgcaccaagaagatgcacaccaacacaagagagccgttgcttacaagtatgtttacgaaaccgtcattattgactctgacggcaacacagtgacccctagcgttgctgaaactgcttccgctactgcttctgctgccgccaccgccatcaccaccacctctgttttggctccaaccagctcagccaccgccatcgctgtttcgtctgttattgtagccaaggacgaaaaggtctctactgctgcctcatctaccgcttctcctcaagctactccatctacaactacccctcacactgtttcatcttcatccgctgctgcatcttcctctgccgcttctgctagtgcttcatcttctgctgcttcttcatcatcctctgctgcggtcaaatccagtgcttccgtcacttcttcatccgcggcccactccagtgcctcttcgtcgtcttctgctccacagtccacctcctcttcctcttcctcttcctcttctggaagtggtagtgtctatggtgacttggctgacttctcaggtccaagcgaaaaattcaaagatggtaccatttcctgtgacaaattcccatctggtcaaggtgtcatttccattgattggataggcgaaggcggatggtccggtgtagaaaacaccgacacttccactggcggttcgtgtaaggagggttcttactgttcctactcctgtcaaccaggtatgtcgaagacgcaatggccatccaaccaaccatccgatggtagatccgtcggtggtttgttgtgtaagaatggctatttgtaccgttcaaacactgacaccgattacttgtgtgaatggggtgttgaagccgcctacgtcgtttctgaattgagcgaaggtgttgccatttgcagaaccgattacccaggtactgaaaacatggttatcccaacctttgttgaaggtggtagctcgctgccattgactgttgtcgaccaagactcctacttcacctgggaaggtaagaagacatctgcccaatactacgttaacaacgcgggcgtctccgtggaagatggctgtatctggggtacttcaggttcagggatcggtaactgggctccattgaactttggtgccgggtcgactgacggtatcacatacttatcgttgatccctaacccaaacaatggcgacgcattgaactacaacgtcaaaattgttgccgccgatgattcatctaaagtcattggtgaatgtgtttacgaaaatggtagttactctggcggttctgatggttgtaccgtttctgttacttccggtaaggctcactttgtcttgtacaattaa

SEQ ID NO: 1223 - DNA, 1059 bp, Saccharomyces pastorianus
atggaacgagagccacataaccaatccgaagaagaaaagaaaccgacagggccaatggctgctgagggaggacaccactcctcatcgtcttctggcactacaatggtagccggtgtggccgaggagagcgttagcaggagaacgacagggccatcacaaactaagaggtctttactactacgaataaagctcttgaaacagcttgggattaacgatatccaggagatagatgtatgtgatgcgaacctggtggaccggttcctaagcatacgattggtcaatgacacgaaagagctggagaagatacgtgattcaaatctcaccaaactaaaccagattattgataaatgtgtggagagcgacaacatcagcgatcctacactgaacaagattcttgacatgaccataagcagagagatcaacaatgacaacagtaaccacctcacggtaccgtcgccgacaatgacgaagaaacggaaggcgggggcatccgaactggccagtccccgaggccacagaaggtatagatcggacatacccactgtatcagaagtggatgcgggtgtcggttacccacaaatgcatcagcaaccgggcgcatacacgctgccggtgcctgcaaaccagtggatggggaacccatatatgcaacccccacaacaattgcaggcgctccctccacagtacctatatccgccgggtatgggaccgcaacccccgctgcccacgatgaattcaaaccccgagtcccagacacccgtgatgagctcgcaatatctctctttaaaccagcatggcctttaccaacaaaatatgagggcgcaccccctcatgaatatgggcccccaagcaaatatatatggccagcagcagccacaacagccgcagcctgcacatgaacgcgacccttcaagaaaaagttccactcatagaagatcacaaagcgccaacatttccatggcgaacttccggtcacccatgcggaattctcaacacggttcctctcaaagacccgttaattttttaattcacaccccgaaacatcctccccccacgtga

SEQ ID NO: 1224 - DNA, 1182 bp, Saccharomyces pastorianus
  modified_base (681)..(760): a, c, g, t, unknown, or other
atgtatttggaataccttcaaccaaaatttaacgtaatggatgaatcgaacaccagaaagaaaagtttccccggttactcaccgaacctaaccactcccattacttcaaacttcaatgaagaaacgggttccgattactctttgattacctcaaggagaatttccggctcgaattcaaattcaaactcgaactcgaactcgggatccattgatgaaaacgagccaactcattctaattcatcttcctcttcagcaagacagattagaaaaaaatggaaagaacctgaagacatagcgttcattactacaataatgaataactctcagctattgacattcgtagagtattttaagccaatgaaaaacttttggaaaaagatctcaaagatcttatttcaacaatatggatatgaaagaaactcccgccagtgtcatgacaggtttaaggtcttatactcaaaatctttaaaagtacatccttcaaagaaaataaaacagaagaagaagaaatcaaaacaagagacagactcgaacttcaacatcgacgcgccgaaattatcaagaatgcagtttttactactacagttacaaaacacctttagctttgtgaatggaaacatcatcctcaaatcgcaaaaaactttgaggccagccaaaaatactacccacgacacaataacnnnnnnnnnnnnnnnnnnnnnnnnnnnnnnnnnnnnnnnnnnnnnnnnnnnnnnnnnnnnnnnnnnnnnnnnnnnnnnnnctaatgttttaagtacgccagagcacattcggtccagcatgaatattgataagctagaatctgtaccagatttagatgctaaagtagaaccctcattcatcagtcctattcaattttcgttattgtcatcagcaccaactgacaatttgattctgcaaactcctccatcgcctttctttcagcaaacaatgcctttacaactaccgcgggatccacaacagcaagaacaaatatcttcagtgctcactacggatatgatctacatgtggcagacgatgttcaatactattgaaaatttaaaagaacaagttaacgatttgaaaaacgaagtaaagcaactaaaccgtaagttttatcaacaaaataaaccgctacaaaatttttcaacgtcgaattcagactcctttatgcaacaacactaa

SEQ ID NO: 1225 - DNA, 699 bp, Saccharomyces pastorianus
atgacatttttatgtgggtcagcttcaacatcaaataaaccaatcgaaagaaaaatcgtcattctaggtgatggtgcctgtggtaagacctcgttactgaacgtcttcaccagaggttatttcccggaagtgtacgaacccactgtttttgaaaactatattcatgatatctttgtcgacagtaaacacatcacgctatctttgtgggatactgccggccaagaagaatttgacaggttacgatccttgtcatattcagatacccaatgcataatgctatgtttcagtatcgattcacgcgattccttggagaacgtccagaacaaatgggtgggtgaaattactgaccactgtgaaggcgttaaattggtcttggttgcgctgaaatgcgatttgagaaacaatgaaaacgaatcgaacgctatcacaccgaacaatatccaacaacaggacatcaacgtttccagtggcaacaacaacaacataaacagtaactctaatgctaagaatctaataagctatgaagaaggccttgccatggctaagaaaattggtgcattgcgttatttggagtgtagtgcaaaattaaataaaggtgttaatgaagcattcacggaagcagcaagagttgctttaacctcagggccagtagcaactgaagcgaagagcgacgatggatccggctgtaccattatgtag

SEQ ID NO: 1226 - DNA, 615 bp, Saccharomyces pastorianus
atgaacatatacacatcgcccacacgggcatcgagcaccgcgaggccctatctgcctgcactggccaccgagagcaggagcacggataacagcagcatagacgataactgtgaggctgtaccgtgcctaagcatggaagtgtgcaaagtgtacccgaagggcccgctgcttgtgctcccggagcgcatctatctgttctcggagcccacggtgggggaaattctgccctttgatgtagttattaacgttgccgaggagacacaagacttgcagacgcaggtgccctccatcgagtactatcactaccggtgggagcacgattccgacatcgggacggatctggccttgctaaccagcatcatgcgcacggccgcagcggagcggaagaagatactgatacactgccagtgtggactgtcgaggtccgcgacgttggtaatcgcgtacatcatgaagttccaccacttgagcctaaggcgcgcttatgacctgctgaagtccagggcagacaagataagccccgccatggggctggtgttccagctgatggagtgggaggccgctctcaaggctacacccagcgcgcaggctagcgattatagaaaactaccttaa

SEQ ID NO: 1227 - DNA, 3240 bp, Saccharomyces pastorianus
atgagcgaccccaatacaaaacagccgataaagaaaaggtcgctgagcagctacctttcaaacgtcagcacgaggcgggaggagctggaaaagatatccaaacatgaagtcccggaagatgaagaacccgctagcaaccagaaatcagaagagccggtgccagaagaatcagtttcgggggttcaagataccaacaggccgctcgacacagaggctgtatccgttagtggctccattgaagatgactcaaaagaaagtacagctctgacccaacaggataatgaaggggatggaaaggcaaacccatatgatcaagaagatagtcttttggagacggaaggagaaaccaatcactcaacgcgaacggccgccatattgccgtccaatgcaggaaatctggatattcaaaaccaccaacctttttcaagagatcaactgcgagcgatgttgaaagaaccgaagaggaaaaccgttgacgatttcatacaggaagagggcttgggggccattgaagaagatgatataagcgacgaagtgctagaaaataatgtaatggccccaagcgaaggggaaatggatatagagtatagtggatcggatagagatacggatgatgtggaaagtgatgaccccacagcacccaactctccaatcaaattaagtcgccgcaaattagtaagggccgaccaatatgatactaccacaggctccatgttcaataacgaatctgactctgaactatcagatattgatgataccaaaaatattgctttgtcgagtagtttgttcagaggtgcttcgtctcccattaaagaagcaaataataatcttcatagtatgaattcctcacctgcgcagattgtaaagagaaactctatttccaagactaatactaataagaatcctcatatagccgtttctaaacgtcctaaacagaaaaagggtatttatagagattctggtggtagaacgagattgcagattgcttgtgataaggggaagttcgatgtagtccagaaaatgattgaagatggaggctatgatattaacgaccaggataacgctggtaatacagctttgcatgaagcagctttgcaaggccatattgaaatcgtggaactgctgatagaaaatggtgcagatgtaaacattaagtctatcgagatgtttggtgatacccccttgatcgatgcctccgctaacggtcatttggacgttgtcaagtaccttcttaaaaaaggtgccgatccaactatacgtaactccaagggcttaaccgccttcgagtcggtcgatgatgaatctgaatttgatgccgaggaagaccaaaacattttgcgtgaaataaagaaaaggctgagtgttgccaccaaaagatggactcacggtacaggatatcataacgacaaacccaaaaatgtcactagtacttacacaacggaccgaccacatttggatattactaacctttctgaagacagaaacgcccatgagtcctctcctatgctctctaatgttgacgataagcctccagaagaagagttttattggactgatgtcacttctagggcaggtaaggaaaaattgttcaaagcttcaaaggaagggcacttgccatacgttggtacatatgtcgaaaatggtggtaagatagatttaaaatcgttttttgaaagtgtcaaatgtgggcatgaggatattacaagtatttttttggcatttgggtttccagtcaaccaaacgtcaagagataacaaaacgtctgccctaatggtggctgttggacgtggtcatatcggcacagttaaattgctattagaagcaggagcagacccaactaagaaggacaaaaagggacacactgctttgtattatgctaaaaatagcgtaatggggataacaaataacgaagaaattcagttgattgaaaaagccttgaacgaacacctaagaaaacgttcgaacgatgacgatgatgacgatgacgaagatgatggtgacaatgaaaaagataccagtgaactacacgaaaccaggagagagaaaacacaatcacctgtactaacaagtcgaaaaagtacaatctccaaaatagaagatgaagaggacgaagtagtaatacgtaattctgcacacgatggcattaataacgaccacaacatcaagaatatcccaccttctgattttcgtaaaacgcatggacttgatgaaagtgatggcattcagtatccacttgattggaagaagcgtaagacgattgtttctcaggatgaagacaagttaagaagtgtttcaccactttctatggaatctcattctcctaagaaattcaaatctacagaagtcaatcccattcacgaagaaactgctgccgagagagaggctagactcaaagaggaagaggagtacaggaagaaaagattagagaaaaagagaaagaaggaacaggaattgttgcaaaaattagccgatgatgagaagaaaagaatcgaagaacaagagaagctgaaaatcctagaaatagaaagattgaagaaggaaacgatagaaaaagccaaacaaatggaaagagagaaaaaattggaggaactttcttatagacgtgctgtaagggacttgtatccgttaggtttgaaaatcatcaacttcaatgataaacatgactacaaaagattcttaccgctgtactattacgtggatgaaaagagcaataaattagtgcttgatttacaagtggcaattttgttaaaaaatatggatttgctctcaaaggatggacattcaatatcggagaaatttcctgttgatccaacccacttggcctccctttggaatatgttgaaattcattttcttgtatggaggtagttacgatgatgataaaaatgacttaaaggacaataaaaggttcgtagtaaatttcgacggcgttgatttggatactaagattggatacgagcttttagaatacaggaaatttattaatttgcccatggcatggatcaactgggatgaagttgtaattgacaatcctgcgaaaaaaaaggaaattgaacaaagcatgattcaaatatcaataattgaagccagacattcccataacaatataagcaaagatttgcaagtagcctcacggaaaagacgcttcatgaaaatgcccccagaattgccggttaaatttcaacatcgtatgagcatatccactattcttcaacaaaccgctaaagagccgttttggtag

SEQ ID NO: 1228 - DNA, 2787 bp, Saccharomyces pastorianus
atgtcccaccacaagaaacgtgtttacccacaggcccaggtcccgtacgggcagagcgccacccctctgcaacagccagcgccattagtagctccccaggacccggcagctgcagggatgaactatgcgcagatggggatgccaccgcaggctgcggtggcccccatgggccagccgcaattcctgacccctgctcaagaacagctccaccagcagatcgatcaagccgccacttctatgaacgacatgcatttgcacaacgtgcctctagtcgaccccaatgcctacatgcagcagcaggcccctggacaggtcggcatgccgtttcagcaacagcaacagcaacagccgctaccagcacaagcttacggacagcctagtgctgccatgggccagaacatgagacccatgaaccagctgtatcctatcgacctgttgacggaattgccacctccaatcaccgacttgaacttgcctcccccaccgctggttgtcccaccagagaaaatgctggttccatcggaggtgtccaatgcgtcgccagattacatcagatcgactttgaacgctgtccccaaaaacagctccctgctgaagaaatccaagctgccattcggactggtcatcagaccataccagcacctttacgacgatattgacccgccaccactgaatgaagacgggctgatcgttcgttgtcgtcgttgccgttcctatatgaaccccttcatcacctttatcgagcaaggcaggagatggagatgtaacttctgtcgtctggccaatgacgtccccatgcaaatggaccaaaccgacccgaacgacccaaaaagcaggtacgacagaaacgaaatcaaatgcgccgtcatggaatacatggcccctaaggagtacactctaagacaacccccaccagccacttactgtttccttgtcgacgtctcccaggcttccatcaaaagcgggttgttggccaccaccatcaacactcttttacaaaatctggattccatccctaaccatgacgaaagaaccagaatctccattttgtgtgtggataacgccatccactacttcaagatcccattggattcggataataatgaagaatcgactgaccaaatcaacatgatggacattgccgacttagaggaacctttcttgcccagaccaaactccatggttgtttcattgaaggcttgcagaaaaaatatcgaaagcttattgaccaagatccctctaattttccagtctaatttgatcacaagttttgcattgggccccgctttgaagtcagcttatcatttgattggtggcgttggtggtaagatcatcgttgtctcagggactttacccaacttgggaatagggaaacttcaaagaagaaacgaaagcggtgtcgtcaatacatcaaaggaaaccacccaattactgtcatgccaagactcattctacaagaacttcactatcgactgttctaaagtgcaaattacagtggatttattcttagcttctgaggattacatggatgttgcatcattgtccaatttgagtcgtttcaccgcaggtcaaactcacttctatcctggattttccggtaaaaatccaaatgatattgtcaaattttctaccgaatttgccaaacacatttccatggacctttgtatggaaaccgttatgagagctcgtggttccacaggtttaagaatgagcagattttatggtcattttttcaacagatcctcggatttatgtgccttttctaccatgccaagagatcaatcatatctgttcgaagtcaatgttgatgaatctatcatgaccgagtattgttacatccaagtagcggtactactgtccttgaataacagccagcgtagaattagaatcatcactttagccatgcccaccacagaatccctggccgaggtttacgcatcagctgatcaattggctatagcgtcattctataattcaaaggcagtggaaaaggcattgaactccagtttggatgaggcaagagtattgattaacaaatctgtacaagacatcttagccacgtacaagaaggaaattgtcgtatccaacaccgcaggtggtgctccattgagattgtgtgccaacttgagaatgttcccattattaatgcattctttgaccaagcatatggcatttagatcgggtattgttccaagtgatcatcgtgcctccgctttgaacattttagaatcattaccattgaaatacctaatcaagaacatttaccccgatgtctactcattgcatgatatggctgatgaagctgggttaccactacaaactgaagatggtgaaaccaccgccacagtcgttttgcctcaacctctcaatgctacctcctcattgtttgaaagatacgggttatacttgatagataatggtaatgaattgttcttatggatgggtggtgatgctgttccggctttagtatttgatgtgtttggcactcaggatattttcgacattccaattggcaaacaggaaataccaattgtcgaaaattcagaattcaatcaaagagtgagaaacattattaaccagctaagaaaccatgacgatattatcacttaccaatcattgtatattgttaggggtgcttctttaagtgaacctgttaaccatgcatctgctagggaagtcgcaaccctaagactatgggcttcgagcactttggtagaggataagatcttgaataacgaaagttacagagaattcttacaaatcatgaaagctagaattagtaaataa

SEQ ID NO: 1229 - DNA, 2499 bp, Saccharomyces pastorianus
atgttcaagacagttgatttctcagaaacatctcctgtcccgcctggctctgataccgatcttgcccctacacaatcgccacaccatgtggggtcaagccaggactctaattatgaacttttaccccggggttctgatgataaaattgacgctgaaaaaggtccacacgatgaactttctaagcacttgccattatttcagaaaagacctctgagcgatactcccatatcaagcaattggacctctcctcgaatcactgaagagaataccccttcagattctcctgaaaatagcgctacaaatttgaagtcgcttcatcgactacatattaacgacgaaaccaagttgaaaaaaggcaatattcccatagatgacgtcgccgattacattcctccatctaatgaaacaaatgagatcactcgtattgacttaaaggatatcaaatcgccctccagacatcataaaaggagacccacaacgatcgacgttcctggattaacaaaatctaaaacttctccggatggcctcatatccaaggaagacagcggatccaaattagtcattgttatggtcgggttgcccgctacagggaagtcatttatcacaaataagttatcaaggtttttaaattattctttatactattgtaaagtgtttaatgtcggtaacactagaaggagatttgctagagatcatggtttgaaagatcaagattccaattttttcgacccaaaaaattcggattctaccaggttaagagacaaatgggccatggataccctcgatgaactgctagactatttgttggaaggtgcagggtccgtgggaatatttgatgcgacaaacacttccagagagagaagaaaaaatgtactggccaagatcaggaaaagaagcccccatttaaaggttttgtttttagaatctgtctgctccgatcatgcgttagtacagaaaaacattagactaaagctctttggtccagactataaaggaaaagatcctgaaagctctctaagagattttaaaagtcgcttggcaaattacctgaaagcttatgaacctattgaagatgacgaaaacttgcaatacattaaaatgatagatgtgggaaaaaaagtcatcgcatataatattcaagggtttttggcttcacagacagtttattacttgttgaatttcaatttagctgataggcaaatttggataacaagaagtggtgaaagtgaggataatgttagtggtcgtattggtggaaattctcatttaacacctcgaggtttgagatttgccagaagtttacccaaattcattgccagacaaagggaaatattttatcaaaatcttatattacagaagaaaaatattgaaaatccaggcaagaatctttatagcgacttttttgtctggaccagtatgcgtgcaagaaccatcgagactgcccaatatttcaacgaagatgattatccgattaaacaaatgaaaatgctggacgaattaagcgcaggtgattatgatggtatgacatatccggagatacaaaacaatttctcggaagaatttgaaaagcggcaaaaggacaaattaagatatagataccctggtattggcggtgaatcatatatggatgttatcaatagacttagaccagtgatcactgaactagagagaattgaggacaatgttcttattatcacacatcgtgtggtagcaagagctttattagggtatttcatgaatttgagtatggacattattgctaatttggatgtgccattgcactgtgtttattgtttggaaccaaagccttatggaatcacttggtcattatgggaatatgatgaaacatcggattccttttctaaggttcctcaaacggacttgaataccacaagagtgaaagaagttggtcttgtttataatgaaagaagatattctgttataccaacagctccaccaagcgcaagaagcagttttgcaagtgactttctatcgaggaaaaaatccaacgtagcttcttcgtcatcttcccagaatgatttgtcagatgggcccaaaaatactgttagtgctcaaatcggtagcaataataccaccatcaatgagagtaacagcaacagtaacagcaacaataataataatagcacttctaaaataccattgtctgcaccattaatgactactaatgcttccaataacatcttagatggtggcggtacctccatttcaatccatcgtccaaggattgttccaaacctaaataacgtgaatccactattggctaacaatagtaacgcaatttctaacacagtcaatttgaaaaaatcacaacccacagcaagacaaatgtttgaaatagacaaagttgacgagaaattatccatgttgaagaataaaaactttcagttacatggcaaaaactactctacggagaatgatgatgatgacaacgatgatatcagggaaaaaacaatgactcgcagccaaagtcacgtttga

SEQ ID NO: 1230 - DNA, 2037 bp, Saccharomyces pastorianus
atgtcgaaaaacaatacaatgacgtctgcagtgtctgacctgctgtcacaacagcagctgaatcttcaacacttgcacaatttgcaacaacacacgaggagtatgacttcggcagaccacgccaacgttttgcaacaacaacaacaacagcagcaggcacagagtgcgagctttcgtaatggtagtttgacgtctgctgacataaaccagcagaactatttgaatggccagccagttaattctactagcaactctacgttccaaaataatagaactttaacaatgaattctggagggttgcaaggtacagtaaccaacggtgctcccaacgtcgactcaagtactaatgttaccattgccgctacagaggggaacaataatagctctaagccattacagggtagaaactccttaacaaatacttcactgctttcaagagctagatcctccttgcaacgtcaaagactcaaccagcaacaacaacaacaacaggatcccagatcgccattggtcatattagtgcctactgcggctcagcctactgatattcttgcggcaagattttctgcttggagaaatgttatcaagtcagtgattgtttacttgacagaaattgcttctattcaagacgaaattgtcagacaacaattgagactatcacatgcggtacaatttccatttttttctatcgaaaatcaatatcaaccaagctcacaggaagacaaatcggtgcaaaagtttttcctacctttgggcaatggctcggtacaggacctaccaacaattttgaaccaatatcacgaatctctggcatccagtgcgtctaaggcatcgagagaattgaccaatgatgttatcccccgtttagaagatttaagaagggacttattggtcaagataaaggaaataaaatcgctgcaatccgatttcaaaaattcttgttctaaagaattgcaacaaaccaaacaggcaatgaaacaatttcaagaatcattaaaagaagcacgctattcagtacccaaacaggatccctttttgaccaagttagccttggataaacaaatcaaaaggcaactccaagaagagaattttctgcatgaagcctttgataatttggaaacttcaggtgccgaattagagaaaattgttgttatggaaatccaaaactctctaacaatatatgcaagattactgggacaagaagcgcagttggttttcgatatattaatatccaaattggactctggatttttcaatattgattcacaatttgaatgggataatttcatttcaagagatcccaactttctattacctaacctgccaatgagaacgttcaaagaaattgtttacaagtatcaatttgatccattaacctatgaaatcaaatctgggtttttggaaagaagatcgaaatttttaaagtcctactcaaagggttattacgttctaacaccgaatttcttacatgaattcaagacggcagataggaaaaaggatttagtcccagtgatgtcattagcattaagtgaatgtaccgtgacagaacattccagaaaaaacactacatcatcaccaaattcggctggttcggatgctaaatttgtgttacacgccaagcaaaatggtataattcgtcgtggtcataattgggttttcaaggccgactcttatgaaactatgatgtcttggtttgataatttgaagatcttgacatctactgcaagcttacaagacaaatataaattcatcactcaaaagttgaacttaaattcagatgggaaacctaaagcaaatgataataaccccggtaacgtcaagtaccaacaaaataacactaataacacaacgatggaaaatgacgaaaacgatgatatgaacagtaattatgtggagtccacaatcacacccaaattggacaatcaaacaaacacaaacacatccatgtcgtcattacctaacaccaacgattctgaattacaggatcaagttcccaatatttatattcaaaccccaataagcgattttaaatcataa

SEQ ID NO: 1231 - DNA, 1524 bp, Saccharomyces pastorianus
atgataacaccgagattcagtataacacaggatggagagtttttattccttaaaatattcataagtaatattaggtttaatgcaacagggttagaaatcgtcatccaggaaaacatggtcgtcttccatttatcgccatactatttgagattgagatttcctcacgaattggttgatgatgagaggtctacagcacaatacgattccaaggacgagtgtattaacgtgaagataggtaaattgaataaagatgaatattttgaagatctagatttaccaacaaagttattggccaggcaaggcgaccttgtgggtgctgatgcattggctgaagcccctgatgaaaacaaaaaccacaaaccacttattcaagagatcggtggcgatgatacgaatattaagcccacggaagatgtgaaaactattggccaaatgggggaaggtttcaactgggagatagaacaaaaaatagattccactttggatgatggactattgaaaacgaaatacgggttcgataacttgtatgacaccgtaatatccatatcaataagtaacggaaacgatatcaatgagctagacgatcctgaacatgctaaagccaacgatagggtcattgaaaggctgagaaaggagagcttaaaatttgaccctgagtattacgtttctgaacacatgactaacaaatacgggaatgaagaagattcagaaattaacggtatcaaagaattactaaaatatacgccctccattgtcaagcaatacttgaaatggtacaaggactgtccgaacccaaatcttgtcatgccagtagagtttactgacaaggaacaaaagcagatgcaggacaacttacccaagaaaacttacctcgtggaagatgtcaaaccactttacgtcaccatactcaatattctttttagttacatgtttgaactgattgaaaacgaaggcacgcatactactgaaagcgcttggaccatggggaagttatgcccgcaaatatcgtttctagatcaacaactgaagcagacaaatgaactgcaggatggattgaaggagatatccgatgaaagcaaagacgtttctatcatcaagcttgccatcataacgggtatcaggagagctctaagctacccgctacatagaaattacgacttggcaatgaaagcgtggacgtttgtgtactatattctacgtggtggtaagagactggtcatacgagcattattagacattcatgaaacatttcgtttccacgacgtgtattacgtctacgaaaaagtacttctgggtgatctcacctcgtggttcatctctcagggtagtgaaaacgtcataagaagtctggccctggagatgagaaaagaacaagactcgattaacaggcaggatatcgaattcgaatgcattgcttcgttcaacgaacaaactggcgaaccagagtgggagacactgagcatcagggaaatggaaatccttgctgagtctgaatatcagcaacaacagcagccccagcaatga

SEQ ID NO: 1232 - DNA, 1011 bp, Saccharomyces pastorianus
atggctagaaaactcaaaggaaagatcggcagtaaaggcctgaaaggtgcattactaagacatcaagcaaagattaaaatggtaaaaaaaatagaaagcaagcaaaagcatgaattgaagaaaaaaacccctaatactaataacaaaaaagtcaaaaaaaaccaagaattacaaaaactcagtcaggaaaaagttataccttttgagaaaactgaaactttaatgctatgtggtgagggagatttttcttttgcaaagtcgattgtggagcaaggctatatagaaagtgggaatttgatcataacaagctacgacaattctgtgaatgagctgaaactgaaatacccacacacttttgaggaaaattatcaatttttaaaagatttgaatattccaatgttcttccaaattgatgttaccaaattagtcaagagcttcaaaatctccagaaataatacttggtttcggacaatcaacagactcagtgatcataaatggggaaataaacctttacaaaatatagtttttaacttccctcataatggtaagggtatcaaagatcaagatagaaatataagagagcaccaagacttggtttttgcatttttcaaaaactctttacaactattcaatctcataaacacaaaagttcaagatgatgcttttcgttatacacagggttatgatcttaatgagaacaccccgcagtccaaaaaactaaccaatgaaggctatggcaatatcatcttgtctgtttttgatggggaaccttacgattcatggcaaatcaagctattagctaggaaaaatgggttaactttaagtagatcaatcaaactccaatgggaaaactttccagggtatcatcatagaagaacaaatagtgaacaagataccacaaaacctgcgaaggaacgtgatgctagattttatatatttagtaaatatatatcaaacagttcaaaacgtaaccacaaaagtgagaacggttccgattctgattctgattga

SEQ ID NO: 1233 - DNA, 2430 bp, Saccharomyces pastorianus
atgaataccccacagatcagtttgtatgaaccagggacagtattgaccgttgggtcgcatcacgccaagattattaagtacctcacgagtggtggatttgctcaggtttattctgctgaaatttcgcctcctgatgcgtatagcagtgctaataaagcatgtttaaaacgagttattgttccagataagcagggtttgaataccttgagagctgaagtggacgctatgaagctcttgaaaaataataaacatgtggtttcttacatagactcacatgctgcgaagtccgtaaatggtgtagcatatgaagtatttgtattaatggaatattgtgaacgtggtggtcttatagactttatgaacaccagattaaagaatagattacaagagtcagaagtgttggaaatcatgagccagaccgtccagggaattgttgccatgcatgctctacaacctcctttaattcatagagatatcaagatcgagaatgtacttatttctcacgaaggcctttataaagtttgtgattttggttccgtttctggagtaataaggccacccaaaaatccacaggagtttaactatgttcagcatgatatcttaacaaatactacagctcaatacagatcgcctgaaatgatcgatttatacagaggtttacccattgatgaaaagtctgatatttgggctctaggtgtcttcctttataaaatatgctactatactacgccatttgagaaaagtggtgaaactgctatactacatgctagataccaatatccatcttttccccaatatagtgacaggttgaaaaatttgatacgtttaatgttgatggaagctccatctcagaggccaaacatttgtcaagttttagaggaagtttccagactacagaataggtcttgcccgatcagaaatttctatttgttaagagctatgaatcaaaatgcacatttggcgtctgaatcaacttctatggcatatataccagcacagcaacatatctctcagcatagttttcaaaatattaagggaatgactaatattgtccctttaactaatattaagactgccccgaatttagactcggtatcaaaattcatgaataacaacgacagaatagagcctatgtcacaacttcacactcaaaaactccaaactgatccgaatattttaaatccgttaacgaaaaccaaatccgttccactctctgatgattttacatcgctatactacaaagaattgcatccttttcaaaagtcacacactttcaaatcagtagagagcttccaatccccacaaagaaaatacattccatcatctccacccccaatcaatagcaacaattatgatagagtttctacaataaatcgtccaaataactatgtcgactcagagacgcaaactttagatagtatggctactcccaacttgaaaccatcccctattactactaataaaacaacaagcttctcgaaagagtctactgttgcagaaaatgtaactggaggaagtattgtacgttcgctaagttctaaactaaaaagggttatcacaggagaatcccgcagtagctctccgaccaaatcgaggcagaatactggcgacagtattagatcggcatttggcatacttcgtcatggctttactggaagttcaataaataacaataggtcaacctcctttgacaataataacggcaacaacaacggcaatagtgtgagtagacgactaacttcgtcgtcgtcaaatccgccctcttccaattttagctcagacactaaaagacaagaggagttggataagaaacggaagttggaacatcgtcgcagcatgccgccttcgatattatcagattttgatcaacacgaaagaaataactcaagaaccggatcaagagattattacagatcccattccccagtgaaaaaatcacaaacgatgcctaccacaacagcgagacccactctaaaatcgagtaatagcgatattaacgtaaaccaagataaaaaggaatcaattcaaagaagagttcataacttactaaataattctgaagattccttggggtataagtctgcctcagggtatggtaaatatactgataccgaggcagaaaagtctaatcgacagtccagcgtaagaataacaccaatcagtgaggaaagatttaataactatcatactagtaatgcaatgagcgatcatactagtagcaatgacaagcctaaatcaagaccaccacgcccgccaccaaaaccgttgcatttaagaacaaaaattcctaatacaagatgttccagtcatttgcaatcaaggagacccccagaggaaagaatttctagtgaagccaccgaaacgattgttgatgttaatgtggacgacttggaagctgatttcagaaagcggtttcccagcaaagtgtaa

SEQ ID NO: 1234 - DNA, 1116 bp, Saccharomyces pastorianus
atgtttagatccgtcgctactagaatatctgcttgccgtgggttggcaagcaacgctgctcgtaaatcgcttaccattggtcttatccctggtgatgggataggtaaggaagtcattcctgccggtaagcaggttttggaaaacctgaactctaagcacggcttaagtttcaattttattgatctttatgctggtttccaaactttccaagagaccggtaaagcgttgcctgacgaaaccatcaaagtattgaaagaccaatgtcagggtgctcttttcggtgcagttcagtctcctactaccaaagtggaaggttactcttcacccattgtcgctctaaggagggaaatgggactatatgctaatgtccgtcctgttaaatctgtggaaggaagtaagggtaaaccaattgatatggtcattgtgagagaaaacaccgaggatttgtatatcaagatcgaaaagacatacattgacaaagccacagggacaagagttgctgacgctattaaaagaatatccgaagttgcaacaagaagaatcgcaactattgcattggacattgctttgcaaagactacagacaaggggcgaagccactttaacggtgacacacaaatcaaacgtcttgtcccaaaccgatggtctatttagagagatctgtaaggatgtctacgaatctaacaaagataaatacggcaaaatcaactacaacgaacaaattgtggattccatggtctacagattgttcagagaaccacaatgttttgatgtgatagtcgcacctaacctatacggtgatatattatccgatggtgctgctgcattagtgggttctctgggtgttgttccaagtgccaacgtcggccccgaaatagtcattggtgaaccatgccatggctctgcaccagatattgctggtaagggtatcgccaacccaatcgccactataaggtcaacagccttgatgttggaattcttgggccataacgaggctgcccaagacatttataaagccgttgatgccaacttgagagaaggcgctatcacgactcctgatttaggcggtaaggcttctacccaacaagtggtcgatgacgttttgtcaagattgtga

SEQ ID NO: 1235 - DNA, 795 bp, Saccharomyces pastorianus
atgaagatacagacaaacgccgtaaatgttcttcaacggacatctgcctacctgaaatcagggttgttgaaagaaactcctgcatggtacaatgtcgtggcatccatcccaccatccactaagtttacccgtgaacctcgatttaagaacccctccaacgggcgcatcatagggaagcttgttgacgtagcagaaaggcagcaagctaacgctaatggactttacaagacaagacccaaccacaacgacaggagggtaggcgtgaaaaaactgtacaagcctccaaagctaacctacgtggaggacaggcttagagttcttttttacaagcaacacccttgggagctgtcaagacccaagattttagtggagaatgaagtcggtgatgaaaattacgattggagccatatgcctcaactaggaaaatcattggatggagaaagcgtcattcagcggaccatgcacttactcaaaacacaacagtacaaggacatggtcgaggcatacgaccacgcaagatacgaattctatgcgttgaggatgcaagaagaaacgcaacagcaagtagcgttggaagaggcagagatgttcggatccatcttcggagtttcatccatcgagcatggtatacaaaaggaacaagaggtcctcgacgtgtgggaaaagaaggtcattgaagaaaccgaactaatggcagcaaggtcgagcaatcctgctgggtcttggaaggacgacgctacattggacacggcgcaagacgaagagcccgccacgacagagaacctccacttctag

SEQ ID NO: 1236 - DNA, 2166 bp, Saccharomyces pastorianus
atgagcggcaattctgcaagggagaacgatgaccatttccgtggacatcggaagagaggaagacaggaaatgaggaagattaaaagaactactgccagaagaactgaggatgtggatacgaatgaagtagaccacgtggtggaagaattagtcgagagaaaagatgaaggtacagtttctgacgctggaagcgaatctgatcttgacatcggggatgaagaagagaagcaggaaaaggtttatgacgccttgctgactattttaaagtctgaacaccctgagccaaagagaaaaaagacaaaggctggcgagaataacgaaactactgaccagtccggcgggaatgagaatacaggctctgaaccagtcgacgaccagctagagatagagaatggccttttaagtgatcaagaagatgaaagcgacgataacgggaacgaaaacgagctggatgaagtggatagtgaggacgagcaagatccctttgagtcacatttcaatcaagtttcagagaagtacgttgacgacgtgtctaatgcttttaaggccaaaaacataaagtacaaatccgtcaaatctcctctaggtgatgatgaatcgtacatatattccaagccagtagtaaatggtgacgagacccctgttgaacgcctatacaagtcgtcttccatatattcgtattttttgaaacaaagactgaaaatccaaaatgggctactggacaagaaaatcgacccattgacttctttacagaaaaaattagtagaccctatgtttcagtacaaagacatactatacgaatacgattcctacgaaaaggatgaagacgagtatagagatctgtacaccttacatgcattgaaccatatttacaagacaagagatagaatcttgaaaaataatcaaagattgcaagataacccagacactgagcatttagaccaaggtttcacgaggccaaaggtgttgattgtggttcccactagagatgcagcatatcgtgtcgtggataagattattaaaaaatccggtatagatcaagtcgataagaaggggaagttttacgatcaatttcgtgatgattctttaccgccaaactctaaaccaaaatcttttcaacatatcttcagagggaataccagtgatttttttgttgttggtcttaagttcacaagaaaggctataaagctttatagtaacttctatcaatctgatatcatcgtatgctcgccattgggtattcaaatgatcttggaaaatacggataaaaagaaaagacaggatgatttcttgtcctccatagaattaatggtcattgatcaattgcattctatagaataccagaacatatctcacattttcaccatattcgatcatataaacaaaattcctgatcaacaacacgaagctgactttagtagaattcggatgtggtatatcaatgaacaagctaaactattaagacaaacaatggtgtttaccaaatacatttcaccagcggcaaattcattgattaatgggagatgccgtaacttggctggtaggtggaaaaaccacaaagtaatagaaccagaaacctccagtatcggacaattgggtttgaagattagacaaatcttccaaagatttgacattatcggaaactcaattattgaagaacccgattatagattcaagttcttcacaagtgttattattcccagtattgtcaaatctacgggctatgaagatggtatactgatttatattcctgattatacagactttatccgtattagaaactacatgaaggaaaagacgacgattctgtttggcgatataaatgagtattctagtcaaaaacaactcaatgctaacagatcactatttcaacaaggccgcgtgaaagttctgttatatacagagagactgcaccattatagacgttatgaaatcaaaggtgtgaaaaacgttatattttataagccaccaaataatccagagttttacaatgaaactgtcagatatattggtaagaatgcctttttgggtaacactgatttgaatatatccactgttaggtgtgtttacagtaaattagacggtctttcactggaaagaattgtgggtactaaaagagcaggtgtattatcacatgctcaaaaggaagtatatgaattcaagtaa

SEQ ID NO: 1237 - DNA, 1476 bp, Saccharomyces pastorianus
atgaccagcttgtccaaaagcttcatgcagagtggaagaatctgtgcagcatgtttttacctgttgtttacgctgctttcaattcccatttcattcaaagttggtggtttggagtgcggtctttcctttacagtgacacttttcaccttgtatttcataacgacaacgctcaatgtgctagcaaggcgaaacggagcaagactgtatatttttttgaccagctgtctatattattcccaacactttgttattgcttctctgttgtatctatttttatccgggttttctaacgatgagttaggaaacgttttgaaaaatagatctaacgagtcggagtcgttcttagaggttttaaaaaatagcttgaattccaaccaaatcaattacgtgctatactattactactatcgattcgttgttcaaccatggcagttcatacttaccaagtctacacctttctttactctatcagaaggatttttcactattttggccattcaggccgtgggagagactaatagatggttgtcgaatgacttgaactcaaatacatggattatttcgtcattgctggcttcggggggtgtaatcaccgcttcactttactatttgtatcggatttatgtgactcctatatggccactatctattcaaacagcatctttattaggatttgttttgtccatggtatgcgggcttggactatacggtattgtaagtcaaagggggtccgtgatagaaagttcattatttttcgcatacattgttagttgtgtctatgaaatttctcccaaattagctactacggcaacggatgagatcctagatttgttcaaagatgtatggcagaaacatcaaagaaatttgcctacggcggataatctactgtgctatttccataacgttattttgaaaaatgcagaaatgttgtgggggtcctttatccccagaagaaggaagacagctagcgatctccatgaaaaaatcataagtatcttgtcatttgaaaaagtttctttgatatctaaaccgttttggagatttttcaaaaatttcaccttcagtgttccgttatccatcaacgaattttgccaagtcacgattaaaatggcaagtgaatcagtatcaccagccatagtgatcaatttatgctttagagttctcatgttctactcggcaacaaggattatccccgctttacaaagaaagaatgacaagcagttgcgcaagagtcgtagaatcatgaaaggattgtattggtacagtccctgtatactgattgctatgtacactcatttgattttgcagtattccggtgagttaaagaaagatttgtgtatatggggctgtaatgagaaatggtttggaccagatcagccagaaattatagtggattcatgggggttctggaactggtgcaatattttctgtactatcttggtatatgctactgagttagtcggttctggcagttga

SEQ ID NO: 1238 - DNA, 1467 bp, Saccharomyces pastorianus
atggagcctacagcgagtgctctttcatctatagcaaatttagtgaaaacgatagtaggagctggcactttagccattccgtacagtttcaaaagtgatggggttctgatcgggattcttttgatattattagctgcagtaacgtctggattgggcctattcgtgttgtccaaatgttccaaaacgctgattaatccgagaaactcttcttttttcaccttatgcatgctcacctaccccaccttagctccgatcttcgatctagcaatgatcgtccaatgttttggtgttgggctaagttatttggttcttatcggcgatctcttcccagggctatttggcggtgaaagaaactattggataattgcatctacagcggtcattatacccttatgtttagtgaagaaattagatcaattgaaatattctagtattctgggtctttttgccttggcttacatatcacttttcatcttcagtcactttgtgtttgacctgggcaaaggcaagctaacagatgtgttagaaaacgacatatgctggtggaaaatccacgatatcaaaggattattgtcaactttcagtatcataatctttgcgtataccggatcaatgaatctattccctatgataaatgagctaaaggacaacagcatggaaaacatcaccttggtaattaataattcgataactttgtcaactatactatttttgactgttggtttatgtggctatttaacctttggcaataagacttcgggtaatttgatgttaaattacgaccctaactcaatttggatagtaattggtaaattttgtctaggatccatgctaatcctatcatttccacttttattccagccattacgcgtagcagttaacaacgttataatctggctcgaaatcacttttggcaatgctgatccaaatgaggacacgcaagtttccgaatacacccgagcttctaacctaagaccgattagtatgactgtcgacgatccaacccaatctaatgcgttggctaccgatgcaacttcgtatgatgaacaggatcgtttactcccaaatggaaacctcgacaatggctcaatagaaatccaaggacatgatggaggcactatggcagtccctgtagataatgaacatcacgcaccattcgttaagtctagattctactggatcacagcagtgttgttgataagtatgtacactctagcattatccgtccagtcgtttgcattggttctttcattagtaggagccacaggttcaacgtcgatttcattcactctacctggtttatttggatacaagttaattggttctgactcgttagctgtcgggaaaatgatcccaccaagagatagattttacaaaagatgtagcttgttgttggtattttacgggttatctgtcatgtttttatccttatacgtaactttattctatgctccagacaatgcctaa

SEQ ID NO: 1239 - DNA, 477 bp, Saccharomyces pastorianus
atgtctaccagtcccactactgatgaagctaaggatgagctactttcaccatttcgctggttatacgctttgacaaagacgccctaccctgcactcgccaatgcagcactcctagcatcaacgccagtgctgtccccatctttgaaggtgcctccagtcaaaaagtccccggctttctcgataccaatgtccagggtattttccagatcatctacacctcgagttggtataagtgctaagaccgccctttttttttctacaatgcaagccataggggcatacatgatctatgacaacgatctggagaatggggctgggtttattgctacatggtctaccttgtatttgattgttggtggtaaaaagtctttcagtgcattgagatatgggagaacttggccgttagtgctatcgtccttatcattggccaacgccgtcctttacggccaaaggtttcttgccactgggtttcaatga

SEQ ID NO: 1240 - DNA, 1551 bp, Saccharomyces pastorianus
atggctataaggttaaagccaaaagtgagaaacttcttacttgacatgtgtcaacgaaggcgatatgttttccttttcatagcctctgtcctcgccatactgtattataatggcaactggccatttccctcaaaaataatgctcgatccgaacaatctaccttactccttccaggactattccactgataaagacgagccgttttttcggggttgtaccgataccagcctgtatctacaagacccagattataccaaaatgaacgcgtcatttgttatgcttacaagaaacgaagaagtagacgatgtattgaaaacaatgaaaagtatagagggccattttaaccaatggttcgagtacccgtacgtgtttttgaacgatgaaccattcacagatttctttaaggaccaagttcgagcgataaccaatgccagtattgagttcggtgttgtcaatgaaatagaatgggaatttccagccgaagtacgtgattcattacttttcaaaactgcattagaagaccaaaatgatagaggcataatgtacggtaatatggaatcgtaccatcagatgtgccgattttattccggattgttttacaagcatccactagtctcaaaatacgagtggtattggaggatagaaccggatgtagacttcttttgtgatatctcatacgatccattttttgaaatggccaaaaacaataaaaaatacgggttcaccgtattgataaccgaactgtattggactgttcctaacttgttcagaacaaccaagagttttataaaaaagacagcgggtttaagaggcaacctgggcacactatggaaactattcacattcaatcataatattctagacactgaagatgaagaaatttctagatgggtgaatcaaccctgggaagcgaaaccaaaattgactgagaagctgatggtagactttctagtagagaaccacagccaagatgattatgaggatgatatagaaggtatacaatatctggtagaaagggcgcgctctaagataccattgctggaagatgcttttgaaaaggaagaatacaacttgtgccatttttggagcaattttgaaattgcccgtgttgatttattcgataatgagatttataacgcctatttcaaacatttagaggaaacgggtggtttctggaccgaaagatggggagatgcgcccatccattcgattggtttaggaatgattctggacctagaagacgttcattattttagggacattggttatagacattcgtcgttacaacattgcccgaagaatgccttacaagagcaaaaaaatcctcttaagtttgataaaggatatggcttcggatctggatgccgatgcgtctgtcccaagaatgaggaagatatcgaggataattctagcccctgcatggacattttctttgaattacttcacggcaaggagtacgagcaagattttccaggctgctacaagccttccataaaagacgaggacgtggttgaagaaatcaggaaagagaatttcaaaatccttgattag

SEQ ID NO: 1241 - DNA, 984 bp, Saccharomyces pastorianus
atggctattcaaaaagttagtaacaaagatttgtcccgcaaggacaagagaagatttaatatcgagtccaaagtaaacaagatttaccaaaatttttattcggagagagataaccagtataaagatagactgacagcactgcaaacagatttaacctcgctgcaccaaggtgataacggtcaatatgctcgccaggtacgagacttggaggaagaaagggacttagagctggtcagattacgactatttgaagagtaccgtgtgtcccgttctggtattgaatttcaagaagatatcgagaaagctaagggtgaacacgagaaacttgtcaagttgtgtaaagaaagactctattcatctatagaacaaaaaataaagaagctacaagaagaaagactactgatggacgtagccaacgtccattcctatgccatgaattatagtaggccgcaatatcagaaaaacactagaagccatacagtaagtggttgggactcttcatccaatgagtacggtaaagacacggccaacgaaagtgccaccgacacaggtgcgggaaatgatcgaagaacattaagaagaagaaatgcttccaaggaggtaagaggtaacaacaacaaccaagaggaatcggatttccaaacaggtaatggttctggaagtaacgggcaaggttccagacaaggatctcagttcccacactttaacaacccagcttacaagtcaggtatggcgtctgattcggatttcttacagggtataaatgaaggcaccgacctttacgcattcttatttggagagaagaatccaaaggagaacgcaaatggtaacgaaaagaagaaaagccgcggtgctcaacgatactctaccaagaccgcgccgcctctacagtcactgaaaccagacgaggtcactgaggatatttctttgatcagagaactgacaggccaaccgccggcccctttcaaactaaggtcagactga

SEQ ID NO: 1242 - DNA, 1098 bp, Saccharomyces pastorianus
atgccacctctacctataattaacagaccccaaatccatacctcagtcaccgaaataactcatgccattgatcgtacgatcaaggaagagctgtttccggttgcctataccactgaggaagaacagtacttcagtaccaatcctagaccagcctacattgatgaattgattaaggacgctaaggaattcattgatttgcaatattcattgaaccgtgacaagatagttcttatcacctctggtggtactaccgttccattggaaaacaacacggtgcgttttattgacaatttttctgccggcactcgtggtgcatccagtgcggaacaatttttggccaatggttacagtgttattttccttcatagggagttttcattgactccatacaacagatccttttcccatagcattgacactttgttcttggattatattgattctgagggcaagatcaaaccagagtttgctgaaaatgttttaaaaaacaagaaactgtatgaaaagtacatggagcaagaggaaaagctacttttattaccattcaccacggttaaccaatatctatggtcattgaaaagtatagccaaactactaaataatagcggttgtctattctacttggctgcagccgtcagtgattttttcgttccatactcaagattacctcaacacaagattcaatcaggagataatgtcaaaatgggagcaaccgaagacactgagggtacgaccaaaactacccccgatggtaagttgatagttaacctggatcctgttcctaagttcctaagaagactggtggaatcatgggcaactcaagccatgatcgtttcctttaagctagaaaccgatgaatccatgctgttatacaagtctacacaggctctggacagatacaaccatcaactggttatcggaaacctgcttcagacaagaaacaagcaagtcattttcgtatcccctgaaaacagaaagggcgactgggtacgtttagacgagaatcaccatagcatcgaagaaatgataatcccagaagtcattacacgccatgatcaatgggtagcacactctaaaaccaagtcagccacaaaatag

SEQ ID NO: 1243 - DNA, 1101 bp, Saccharomyces pastorianus
atgtcgtcgttgttgtctgaggtggaaagtatggacactttgccgtacgtgaaagatacaacgccgcaagcgagcgatccgtcatctagtaaattgctggctccatccatagaggatgtggatgcaaaccccgaggaactaagaacgctgcggggccaaggacggtactttggagtaatggactacgatgccgatggtgcgataatggaagcggaaccaaaatgtaataactgttctcaaaggggccatttgaaaaggaactgccctcacgtcatatgtacgtactgtgggtctatggatgatcattattcacaacattgtcccaaggctattagctgttctaattgtaatgcaaatggccattacaaatcacagtgtccccagaaatggaaaaaagtgttctgcacactatgcaatagcaaaagacattcaagggagagatgtcccagtatttggaggtcttacttgttgaaaactaaggacatcagcaatgataagcttgattttgaaactatcttttgttataattgtgggattaacggccattttggagacgactgtgcagaaagaagatcgtctagagtgccgaacacagacggaagtgcgttttgcggcgataatctagctatggagctcaaacagcactatttcgacgaagtgaagaaccatcagagagaagtctccaaaagacagatggtggaaaacgaggacaacgaccagcaattcaacttctatgactatgagtacaacgacgatgcatatgactacccaggttctaggaattatagagataaaatgaaatggaaaaacagggctcaatcatccagaaatagtaacaataacaaaaacaatagctataacgataacaacaacaacaacaacaggaggaagaagacaccatttagcccacacaactacaatgtaaccaaaaagaaaaatgtgcatgcgcatcccttagatttccccagaaaccctcaaaacaacaggatgaatgagtacccaagccattccaactataacagacaagattttccgagaggacccaagaataaaaagaacgggccctcgtttaataagggacaaagaagcggacgttattga

SEQ ID NO: 1244 - DNA, 2205 bp, Saccharomyces pastorianus
atgagcgctaacgaagcaggtgtcgctgagcaagtcaagaacttgtccgttaaggataacggtgatgcagcagcagcaaaggcaggcaagaaggataacaaaaagtccaagcaacaatctctatacttggaccctcaaccagtctttattgaaaaaagaatggagatgtttgacagattgcaaaaggaatacaacgacaaggttgccagtatgcctcgcgttccattgaagatcgttttaaaggacggtgctattaaggaagccacttcttgggaaactactcctatggatattgctaagggaatttccaaatctttggctgatagattatgtatctcaaaggtcaatggccaattatgggatttagacagaccttttgaaggcgaagccgatgaagaaatcaaattagaactattagattttgaatctgaggaaggtaaaaaagtcttctggcattcatctgcccacgttctgggtgaatcttgtgagtgccatctaggtgcccacatctgtttgggccctccaactgatgacgggtttttttacgaaatggcagtcagagatagtatgaaagatatctctgaatctccagaacaaaccgtctctcaagcggatttcccaggtttggaaggtgttgctaagaacgtcatcaagcaaaagcaaaaattcgaaagattggttatgaccaaggaagaccttttgaaaatgttccactactctaaatataaaacttatttggttcaaaccaaaattccggatggtggtgccaccactgtttaccgttgtggtacattgatcgatttatgtgtcggtcctcacatccctcatactggtcgtatcaaggcttttaaattactaaagaattcttcttgttacttcttgggtgatgccacaaatgactctttgcaaagagtttacggtatttccttcccagacaaaaaactgatggacgctcatttgaagttcttggctgaggcatctatgagagatcacagaaagattggtagggaacaagaattattcttattcaatgaaatgtctccaggttcttgtttctggttacctcatggtaccagaatttacaatactttggttgatttgatgagatctgaataccgtaagagaggttatgaggaagttatcacacctaacatgtacaattccaaattgtgggaaacttcaggtcactggggtaattacaaagaaaacatgtttacttttgatgtagaaaaggaatctttcggtttgaagccaatgaactgtccaggtcattgtttgatgtttaagtctagagaacgttcctacagagaattgccatggagggttgctgatttcggtgttattcacagaaacgaattctcaggtgccttgtctggtttgactcgtgtgagaagattccaacaagatgatgctcatatcttctgtactgaaagtcaaatcgaaaccgaaatcgaaaacatattcaatttcttggaatatgtctacggtgtctttggatttgaattcaagatggaattatctaccagaccagagaagtatgttggtaaaatcgaaacttgggacgctgccgaaagtaaattagagtctgccttgagaaaatggggtggtaactgggaaatcaacgccggtgatggtgctttctacggtccaaagattgacattatgatttctgatgctttaagaagatggcatcaatgtgccactgtccaattagatttccaattgccaaacagattcgaattggaattcaaatctaaggatcaagatgagagttacgaaagaccagttatgattcatcgtgccattttgggttccgttgaaagaatgactgccattttgatcgaacattttgctggtaagtggccattctggttatctccacgtcaagtcttggttgtcccagttggtgtgaagtaccaggaatacgccgaagatgtccgcaaccaattacacgacgcaggcttctatgctgatgtcgacttgactggtaacactctacaaaagaaggtcagaaacgggcaaatgctgaaatacaatttcattttcattgttggtgaacaagagatgaacgaaaagtctgtcaacattagaaacagagatgttatggaacaacaaggtaagaatgccaccgtttctgtcgaagaggttttgacacagttgaagagcttgaaagacgaaaagagaggagacaacgtcttagcttaa

SEQ ID NO: 1245 - DNA, 2832 bp, Saccharomyces pastorianus
atgtccttaactactgctgctccacttttggcgctactaagggagaatgaagattctgtcaagacatatgccctagaatctataaataatgttgtcgaccaattatggtctgaaatttcgaatgaattgccagacattgaagcattgtacgatgatgacactttttccgatcgtgaaatggctgctttgattgcatccaaggtgtactacaaccttggtgaatatgaatctgccgttagatatgctcttgccgcagagagtcgtttcaacatagatgaacaatctcagttcgttgaaaccatagtctcaaagagtatcgaaatgtacgtccgcagagcttccaggcaatacactaaggacgaactgttttacactaaggatactattgacccaaaattaacgtctatttttgaacgcatgatagaaaaatgtttacaagcctccgaacttaaacttgctttaggtattgccttagaaggctatagattggatataattgagaatactttaaaaaacaagctggatcacgattcagcttctgagaatgttaaaattattaactacttattatcacttgccataagcaccgtgacaaactcgaaattcagatcctcgatattgagaaaatcttttgacttcctaatgagcatgcctaatcgcgattatttaacgctcaacaaagtggttgtgaatttgaatgatgccgaattggcacttcaattatttaaaaaattgaaggaagaaaacgatgaagggttatccgcgcaaattgcatttgatttagtctcttctgcatctcagcaattacttgagatattggttactgaattaactagtcaaggttgcgattctggcttattgaatattctgtccggtctaccgacttgtgattactacaacaccttccttttgaataataaaaatattgatattggcctgttaaataaatccaaatcagctttggatgggaagttttctttattccataccgctgtcagtgttgctaacgggttcatgcacgctggtaccaccgacaactcgttcatcaaggcaaacttaccttggttaggaaaagctcaaaactgggcaaaatttacggccacagcctcgctaggtgtcatccataaaggtaacctgttagaaggtaaaaaggttatggctccttatttaccgggtagtcgagcttcttctagattcattaaaggtggttcattgtatggtttaggtttgatctatgctggtttcggtcgtgatactactgactacttaaagaacattatagtcgaaaatagcggaactgcaggtgatgaagatgtagatgtcttattacatggtgcttccctaggtattggtcttgctgctatgggatcagccaatattgaagtgtatgaagccttaaaggaagttctttataacgactctgcaacatccggagaggctgctgcgctaggtatgggtttgtgtatgctaggaacaggtaggcccgaagctattcatgatatgttcacgtactctcaagaaacccaacacggtaacattactcgtggtttagcagttggattagctttaataaattacggccgtcaagagctagctgatgatttaatcgccaagatgttagcaagtgatgaatctctattacgttacggtggtgctttcacaattgcattggcctatgcgggcacgggtaataactctgctgtcaagaggctactacatgtggctgtttcagactccaacgatgacgttaggagagctgcagtcattgcattgggctttgttcttttacgtgattacaccacagttccaagaattgttcaacttctatcgaagtctcataatgcccacgttagatgtggtactgcattcgcacttggaattgcatgcgctggtaaaggtttacaatcagccattgacgtgttggaaccgttaacaaaggatccggttgattttgttcgccaagcggcaatgattgccttatctatgattctaattcaacaaaccgaaaagttgaacccacaagttgctgagattaacaaaacattcttgagtgtaatcacgaataagcaccaagagggattagctaaattcggtgcatgtgtagcacaaggtataatgaatgctggtggacgtaatgtcacaattcagctcgaaaatgccgacacgggtactctggacgccaaatctgtggttggtttggtcatgttctcacaattctggtactggttcccattgtctcactttttatccctatcttttactccaacaacagttatcggtatccgcggtaatgaccaaactataccaaaattccaaatgaactgttatgccaaagaagatgtattcagctatccaaagatgtacgaggaagccagtggtaaagaagtagaaaaggtagctactgctgttctttccaccactgcaagagcaaaggccagagcaaaaaagacaaagaaggagaagggtcccaatgaagaagaaaagaaaaaagaacgtgaggaaaaagagaaggaagcagacaaaaaagacataaaggaaacaaaagaaaatgacgaagaattttacaagaacaaatactcttcgaagccttataaagttgataatatgactcgtatactgccccagcaatcaagatatatttctttcatcaaggacgacagatttgttcctgtacgtaaatttaaaggaaacaacggtgtggtagttttaagagacaaagaacctaaagaaccaatagagatgattgaaaccgtcaaacaaatgaaggatgttaatgctccacttccaacaccatttaaggttgaagataacgttgatttcccaaatgcttaa

SEQ ID NO: 1246 - DNA, 1410 bp, Saccharomyces pastorianus
atgtctaatcaagctaccgataatttgcaagattccttccaacgtgctatgaacttttctggttctccaggcgcggtttcgacctcaccaactcaatcattcatgaatacattacctcgtcgtgtaagcattacaaaacagccaaaggctctaaaacctttttctacaggtgacatgaagattttattgttagaaaacgtcaatccaactgcaatcaaaattttcaaagagcaaggttaccaagtggaatttcataaatcctctttacctgaggaggaactgattgaaaaaatcaaagatgttcatgccattggtatcagatctaaaacaagattaactgaaaaaatattacaacatgccagaaatctagtctgcatcggttgcttttgcataggtaccaaccaagtggatttgaaatatgctgctagtaaaggtattgctgtttttaattctcctttctcgaattcgaggtctgtagcagaattagtcattgctgaaatcatcagtttggcaagacaattaggtgacagatccattgagttgcatacaggcacgtggaataaagttgccgctagatgttgggaggtgagaggaaagacacttggtattgtcgggtatggacacattggttcccaattatctgtccttgcagaagctatggggttgcatgtcctatattacgatattgtaacaattatggccttaggtactgctaagcaggtttctactttagatgagttattgaacaagtctgatttcatatcattacatgtaccagctactcctgagactgaaaatatgctatctgctccacaatttgcagctatgaaagacggcgcatatgtgatcaacgcttcgagaggtactgtggtagatatcccggctttggttcaagctaagaaggcaaacaaaataggcggagcagctctggatgtttacccacatgaacctgccaaaaatggagagggttcatttagtgatcaactaaatgattggacttccgaactggtttccttgccaaatattatcctgaccccacacattggtggttctacagaagaagcccaaagcgccattggtattgaagtggcaacggccttaaccaaatatattaacgaaggtaacaccgtgggctctgtgaatttcccagaagttagtttgaagtccttagattatgatcaagaaaacacagtacgtgtcttatatattcatcgcaacgttcctggtgtcttgaagacagttaacaatattttatccgatcataacatcgagaaacaattctcagattctcatggtgaaatcgcctatttgatggccgatatctcttctgttaatcaaagcgaaatcaaggatatatatgagcagctaaaccaaacatttgctaaagtttctatcagactgttgtactga

SEQ ID NO: 1247 - DNA, 1818 bp, Saccharomyces pastorianus
atgtctaacaaacaactggtaaagccaaaaacggagacaaagacggatatcaccaccgaacagtctcaaaaattgcttcaaacaatgctaacaatgtcttttggctgcttggcatttctcagaggtttgttcccagacgatatatttgttgatcaacgattcgtcccagagaaagttgagaaaaattacaataaacaagccacatctcaaaataattccatcaaaatcaaaactttaattagaggcaaatccagtcaagtggatctgttgttagactggttggagaagggcgtcttcaaatcaatccgtttaaaatgtctgaaggcgctttcgctgggcattttcttggaagatcccaccgatcttttggagaattatatttttagctttgactatgatgaagcaaataacgttaatataagtgttgatttgggggatgataaaaacaaaaataagaaagcgagtgaggacaacgaaactatttctctattagattcaagaaaaatggttcaacagctaatgagacggtttatcattatcacccagtctttggaacctttgcctcagaagaaattccttacaatgaggctgatgtttaatgataatgtcgaccaagattaccaaccagaactatttaaggacgctacctttgagaaaagagcaaccttgagggtcccgacaagcttagacaatgatgcgtttaacgtcggtactctgaatacaaaacatcataaagtggctctttccgttttatcggcggcaacatctaccatggagggagccgaaagtacaaatttcattagagtcgatccctttgaaatgattttagaggagcaagagcaaaagcaacaggagaaatcaatttctgcaaaaccccagaactttgttacaagtcaaacaacaaatctgcttggaaatcttctaaactcttctcaagcaagtatacaaccgactcaatttgtttcaaataacacgctcacttctctttgtaattgcgaatgtggattgcaggttcctaaagaagctacggtcttgaaaacttgtaaaagctgccgaaagacattacatggtatctgttatgggaatttcctacattcatcaattgaaaaatgtttttcttgtattttcggtccttcattagatattaaatggtccaaatttcaagatcttatgatgattagaaaggtttttaggtttctggtgagaagaaagagaggcttcccagcttccataacggagctgattgatagctttattcacctcgaggatcaaaataacgaaataaaagaaagagttgctttcgccctatttgtcttctttttggatgaaacactctgcctggataatgggggtaaacccagccaaactattaggtatgtcacgaattctgttcttgttgatttaaaaggaattgtcacaccaaataacaaaaaagaactgaaaacaaatcaagaatatatattgcatttcactaccagttcacccaaagccggaagcttttatcaagaagttctaccaaactcaagaaaacaaatcgagtcatggttggaagatatcactaacttgagaagaatgtatgttgagactctttctccctcttcaactttgcaagagcttgacctcaattcaagccttccaactcaagacccgataataattggtcaaaagagaaagcattataatcttgaggagtacttacaagatgaaaaaagctcagttatgaatgatacgataaaagcaaaggattttgatgaaaatgtaccaacaaaggttcgtaaaattagtgtctctaaaaaaactctgaaaagtaactggtag

SEQ ID NO: 1248 - DNA, 801 bp, Saccharomyces pastorianus
atgtttctaagaagtctaaaccgagttgttgctaaaagcgtactagctgcccctaagtctaccgtggcaaagtcatcatggaaagttttaactgttgccaactccaagagatgtttcacccctgccactatcatgagaaaccaagaaacccaaagagtaggtgatattttgcaatccgaactaaaaattgaaaatgaaacgttgccagaatcaacttcgttggattcatttaacgattttttgaataagtacaaattttcattagtagagactccaggtaagaatgaagctgaaattatcagaagaactgaatccggggaaaccgttcatgtgttctttgacgttgcccaaattgctaatttaccatacaacaatgcaatggatgaaaacactgaagcaaatgaagacggaatcaatgaggatgatatcgacgccttatcagacaactttgctaacgtcaacgtcgttatttcaaaggaaaatgcaactgaaccagctgtctcatttgagttgttaatgaatctacaagaaggctcattctatgtcgatagtgctaccccgtatccctctgttgatgctgctttgaatcaatctgccgaggctgagatttcaagagagctagtataccacggtccaccattttctaacttggatgaagaactacaagaatctctagaagcttacttggaaagcagaggcgtcaatgaagaactagcatctttcattagtgcatattccgaattcaaagaaaataccgaatatatttcttggttggaaaagatgaagaagtttttccattaa

SEQ ID NO: 1249 - DNA, 2034 bp, Saccharomyces pastorianus
atgggtgtacatttcgatgataatgctaatacaacttgggatgccgcagatcccaaccttttgagtggatcagaaggacagcatcagagaactgagtccataccattgcgggacctttcaaacgctgacgtggaaaacgtgcctaacgaagaggaaggcgaaggcagcaagcccaaatggttattactaaagaggaaaaaccccatacaaaagttttttgaaagagtttggaatggccctgttgaacctagcgatgaaccgcctagctttccccaacgatgggggtggttgaagaggatagaggaatttccacagactacttttaaagctataattccgaataaattcatacggttgttactgctgattgcgtactgctgcttttggattcgtattttttacttcctcatatacccatatctcatcaaaccaccgtatttccatccgagcgatggctccgaaaagatacccatattgtctttaagttgcaactcctatttgaactgggaaggtaccaataacgcttgtggtttgaatgccaaaaactgtggcccatttgatgataaagaatacatggtcagatgcccagctttgtgcgatagaggcggttggacttactcagctattgccgttggaaaaagacgagtcaaatatacaggatatgaaattggcggaggtgctttatttagtgaagaagacccaatggccctttcttacccttatagaagcgactcctatccatgtggagccgcagtgcatgcaggtgttatttctccattttttggtggttgtaccaaagtttccatgcagggaccccaaaattcctttccatcaagaaaggggatatataacacagggttttccatagcttttgattcatttttccccggttcttattcatttagagatattcaaggtggtattttgtccggttgttatgatccacgagccgctgtggtggcattaaatattgtttttggattaccagtattttacttgtatgatagtatctatgggtactggataaacacaatagtgggctattggacactcgtattatcgttagaccctcctttattaacggacgctcatgatccaacgagcgtgtatgagctattcagtgtaggtttccaacgactcctgcctttgtgttttgttctctatgtggtttggaaaagcgccgtaaagagaaccctagaggccggctctcctatagccaaagtaattctttggtacccgacattttggctgggcatttcgaacaatgtcacttttgatagattgcctgtagacaggcttactaccaaggatttgaaagaacaagctggagcattgaccgctgttgattccattgccgcaacaattcttacatgtgcaattatacaagcttactcactttggaaatcaggaagattcagaaagtactttaaaatatacatatgtttcattggtggattagtagcgttaggatccttgccaggactgaatttaagagtgcatcactacattttgggttcagtgctcgttccagggtgtgcgacaagaggctcctcagcatatttgtttcaaggtgttttggtagggctgatcctatctggggtagcaaggtgggattttgcaagtatagtcgagacagatgtggctctgttaagaggggaagcaggagcgtctttgaagccaccaattttggaattcgacgatcagaatcactccttgtcatggcatctgaatgcaaccgattcagcaattgatgagacaggtagtatagatggattttcattacttttgaatgacgtagaggtgtacgtaggtaataacgacacagtcagcatcgataatcttcgaatgaagaatccacaacttacaagaatgatggacgatgctctcgacgcctctaacggaacaatagacttgtgtttaagagtggctcgtgcttctgtacggtccccaacaaaaagaggcgattatacaaacgcaggaatattacaatggccagaggggatgtggcaaaatcctgagcctggtgtatcttaa

SEQ ID NO: 1250 - DNA, 468 bp, Saccharomyces pastorianus
atgacgaagatcgatttctggcccacgctgaaggacgcatacgaaccgctgtacccccagcaactggaaatactgcgccagcaggtggtctccgagggggggcccacggcgactatccagtcaaggttcaactactcatggggcctgatcaagtccacagacgtgaatgacgaacggctcggcgtgaaggtcctcacggatatctacaaggaggccgagtcccgcagacgggagtgcttgtactacctgacgatcggctgctacaagctgggcgagtactctatggccaagcgatatgtagacactctcttcgaacacgagcgtaacaacaagcaggtggctgcgttgaaaagcatggttgaggacaagattcagaaggaaaccctcaagggcgtcgtcgtcgcaggaggcgtgctggcaggtgctgtggccgtagccagcttcttcctgaggaataaaagaaggtaa

SEQ ID NO: 1251 - DNA, 996 bp, Saccharomyces pastorianus
atgagcgagtccaagattgatagtgcagtggatgaaaagactaaggtgcagcaacctgcggttaaagaaaccattgatgaactagataaaactcccaagagaccaagggaagaagcacaggatgaagagagggaagaaacgagtgagaaaccagaaccatccaacgctgatgaggaaaagaagaaggatgatgacgacgagcaagaggcgtcttcgcacaaaaaaacaaagaccgacgatgcaaaagttgttgacaagcaatcatctaaagatgctagtaaggttgaagatgaagaaagaaaggataaattcgtgtttggtgcggcatccaatttcggaactgggtttggtgtcgctaagggggacaccaagaacgagaaaacaaccaacgccaactcttcatcggcgtccaatacaactacaaagaagccatttgcatttggttcaggtttgtcgtttggcagcggcttcagcatattgaaaagcaagaacgacaatgacagcgaaaacggaaagaaagttgctgacgataagggaaaagtcaacagcgactctgagcagcgggcaaagacgtcagaagccccaagcgacgcagcaagacctctcaaactgcaaaagcaagatatcaaatccggcgaagagtcagaggagtgcatataccaagtcaacgctaaactgtaccagctctccaagatagaagaaggctggaaggaaagaggcgttggtgtaattaaagttaacaaaagtaaaaaggatgaagaaaagacccgtatagtcatgagatcccgtggtatcttgaaagtcattttgaacattcaattggtcaaagggttcaccgtgcaaaagggattcaccggttcgttgcaaagcgagaaattcataagattgttggccgtggacgacaacggcgaccctgcacaatatgccatcaagactggtaaaaaggagaccacagacgaattgtacaacactatagtcaagtctgttcctaaataa

SEQ ID NO: 1252 - DNA, 465 bp, Saccharomyces pastorianus
atggaagctgactggaggagaattgatatcgatgcatttgacccggaaagcggtaggttgactgctgctgatctggtgccaccatacccaaccatcgttacactacaagaattacagcctcgaatgaatcaattgcgttcgctggccacgagcggtgactctacgggggccgtccaattactcacaaccgaccctccatacagtgcggacgctgcgacaaaggaacagtatttcgtgagcgtgcttgaagcattgacacaggtcagacaggccgatattggtaacgtagtcaaggctttgaacgactcccagaaggacgtgttggtgaagtacctttataaggggatgtccgtacctcagggccagaaacagggtggtgtcttgcttgcttggttggaaaaaattacccaagtcagcggtgtcacgcccatcgttcattatatatcggatagaagaaccgtatga

SEQ ID NO: 1253 - DNA, 909 bp, Saccharomyces pastorianus
atgagttacaatttatccaagtatcccgacgacgtgtcgagacttttcagacctaagccgcccttgccctacaagaggctaacggattacccatacgccaagaggcaaacaaacccaaatatcactggcgttgccaatttgttgtccacccctttgagaaactatatggaagagtttccacaaggcacccccaacaaccacctacaagagtacgaagaagtcaaactcgccaagaccaaaaactcccaactgataaatcagagattgcaaggttgggacccgaacgcagaccctcatatcaaggacacggatccctacaaaacgatattcattggaagattgccgtacgacctcaacgaaatcgaactgcaaaagcatttcgccaagtttggagaaattgagaaaatcagaatagtcaaggacaagatcactcagcaaaacaaaggctatgccttcatagtattcaaggaccccatcagcagcaagatggctttcaaggaaatcggcgtgcacaggggcatccaaatcaaagacagggtctgcatagtcgatatagaaagaggtagaaccgtcaagtacttcaagccaagaaggttgggcggtggcctcggtgggagaggctactctcacagagagaacagaatcccaggaagatttgcgaccgcaaccgcccccacttccatggagagaatccacgctcccaggccgccacgcagggagccttcttcctccacgtacactccggatagatacaccagtgtcaccgcagacacaagatatcacgcccaccggcccctgcttgccgcaacagccccaacccccattcccgcggtcacctcggtatacaagtccagaaactcaagaacaagagagtcccagccagctgccaaagaagtaccagactattga

SEQ ID NO: 1254 - DNA, 1908 bp, Saccharomyces pastorianus
atgaacggtcctcctacttttacccagtatagaataaacaagtcttctgggaatggggctacccacaagatcagggagctactgaacttcaacgatgaaaaaaaatggaaactgttttcgagcagaagactggagttgatagacaaattccagctaagccaatacaaggcaagcgaacaagaccagaacatcaagcagatcgccaccatattaaggaccgagttcggataccctgtgagttgctccaaggaatttgagaagttggtaaccgccgcagtgcaatccgtgaggagaaacagaaagcggtcaaagaagcgttacgccttgagtatagccaacggtaacggcggcaacggtaacatctcttcgtcgaattctacttccgacgatgagatttctccgtccatttaccaccacaccaattctgagtttttaccttcttccaaccaaactacagatttccagtatccaggaaagtttcaacctctaatgagtcatcagaacaatagcgggcgcattctgccaaacgtgtatccgcaaatggacccttcgtcgccggtcacttcgactcagcagaaatacaacgatatagtcactatgctagtgcatgacctcgttacgaatgctgtgccactgtcggaacaagctctcaaggacccgtacattgggccgaacttgtctcatttcgctatgtcttcgctcagccagcagcccaatgttgccgacagcatccccatagattccaccgtgcccttcttcctgagggaaaaactactgctacagatacaaagatcaagaacttgccaagacatttcgcaagccgcagggtccatcgacctttacgcaaatctcgagatcctggacgaaatgtcaattcgaatgtccatcgcattcgtcatcgagcgtttcttttccaacctggtatcttcatcaatgaaatacatcacttccaagacctgctctcctgaaaacttggccctattgtcccaaagactgtttggctccgctacaagacataatttatctcacttccccgcggcccaggttcagctgagactgctgtatttggttattggtggcattgtcaaggatttcgggttcgaccccactctttatcccttgagtgaaatcattcaccacatagtaatggtccaataccctttggctaactcatgcgcgacagctcctccaccttcttcatctaataaaagagtcaagaggagtcctcccaccgtccccagtgacataatgatgaacaataacacattgtcgaatagagccacgctcttaaccacgctgcccatgaagcctcaatctgccaataaagatgtcaaccgtcgggtgatcataagattcaatgatcgcgagcaagccttcacgttccaccagttgagtaatggcccacccactgtgtctgaaatactggaaaactgtaagaatttatttaatataataaacaaaaacaagaatttcggtattttccataacgacaacctactaaacgatgaaactttagcgagattattcgattcattttccacaaatgagattggtttggagattagagacatttcttccatccccttacaagataatagcatgccgctacccatccaactacccaaaatggcatgcttaggggaaaacccccccattccgttggtatcacctgagaacgacgatccgaaaaaatcaagcttaactgcctttgataacatcattaacagaatctctaaatcaccattgaatgaagataaccctattcctactgcaaacattagcatcactgccactgcaaataataataataatcataatgaacctgtacctgtaccatccgtcaccaaaaataaaaactcttttcaaaatggcaatctgccccagccggttttccagccattactgtga

SEQ ID NO: 1255 - DNA, 819 bp, Saccharomyces pastorianus
atgaaacgttttaatatattaaagtcttttattagaataccaaaagcaaatctacatacaacgaaaatgcctttgaccacaaaaccattgtctttgaaaattaacgccgctctatttgatgttgacggtaccatcatcatctcccaaccagccattgctgctttctggagagacttcggtaaggacaagccatacttcgacgccgaacacgttatccacatctctcacggttggagaacctacgacgccatcgccaagtttgctccagacttcgccgatgaagaatacgtcaacaagctagaaggtgaaatcccagaaaagtacggtgaacactccattgaagttccaggtgctgtgaagttgtgtaacgctttgaacgctttgccaaaggaaaaatgggctgtcgccacctctggtacccgtgacatggccaagaagtggttcgacatcttgaacatcaagagaccagaatacttcatcaccgccaacgatgtcaagcaaggtaagcctcatccagaaccatacttgaagggtagaaacggtttgggtttcccaatcaacgaaaaagacccatccaagtccaaggtcgtcgtctttgaagacgctccagctggtattgccgccggtaaggccgctggttgtaagatcgtcggtatcgctaccactttcgatttggacttcttgaaggaaaagggttgtgacatcattgtcaagaaccacgactccatcagagtcggtgaatacaacgccgaaaccgatgaagtcgaattgatctttgatgactacttatacgctaaggatgacttgttgaagtggtaa

SEQ ID NO: 1256 - DNA, 438 bp, Saccharomyces pastorianus
atgtttctaagaaattccgttttgagaaccaccccaatcttgaaaaggggtttgacaacattgaccccggtcagcaccaaactggcaccacctgctgccgcctcttattcccaggccatgaaggcgaacaacttcgtctacgtgtctggtcaaatcccatataccgcagaaaacaagcctgttcaaggttctatctctgacaaggcggaacaagttttccaaaacgtcaagaacatcttggctgaaagcaactcgtctttgaacagcgttgtcaaagtcaacgttttcttagctgatatgaaaaactttgctgaattcaattcagtgtatgccaaacacttccacacccacaagcctgcaagatcatgcgtcggtgttgcttctttgccattgaacgttgatttggaaatggaagtcattgctgttgaaaagaattga

SEQ ID NO: 1257 - DNA, 858 bp, Saccharomyces pastorianus
atgggattgagtccactaccaagaaaagcgaccacgtcgcctatcgacataccaggtggcgatagacacggccacataatcgagccgcattcacacagtcttaagaccgacccgttatcaagtaacaatagtagtctcgtatccaaaacttccaccaatctgagcttagaaagccctttctcttcgaagtctttactagactgcccccctgcgcaaccgataaaggactctcgagatttacaaggtggtaaccgtaatatggaagaggaaactattacaggagatagcgaaagtgtcttaaacatagtagatttccccacggatgagctcatactaatggtaagtgcgttgttgaacaaaattgtgaaggccaacgatgaaactacagatccctcacaacaactagtagaagacgatgaagacgaactcttggctcccgttttggcattttatgggaaaaacgtccctgagatcgccgtggtccagtacttggagagaattcaaaaatactgtcccaccacaaatgacatctttctttccttactagtgtatttcgatagaatatccaaaaattatgggtccagtcctgaccgaaatgaccatgtaaagcaaatgttcgttatggactccggaaatatccacagattgctcattacgggtataacgatatgcacgaaattcatgagcgactttttttatagcaactctcggtacgccaaggtcggaggaatttccttgcaagaattgaatcacttggaattgcaattcctagtcctgtgcgacttcaaattactagtctcgagggaagaaatgcagaaatatgcagacttgttatataaattcgggaacgaccagtag

SEQ ID NO: 1258 - DNA, 762 bp, Saccharomyces pastorianus
atgtatcctgatgaagaacaattgatactgtatatagtatatgcctatagactatcctttttcattggtatttgttcccttttcatagccaaagtttgtctaccagaatttttgcaatatggtaaaacttaccagcccaagagtacttcaaagtgcttgagtatactagacaagataaaaaagtttacagttccaaaggcgtactttgcccacttctattatctggcctctttcctgtcgtcaatcaccctatacttctaccccaagtaccctattgtttggatcattttcggccactcattgcgccggctctacgaaacccttcatgtattgcgttatacgagcaattccaggatgaattggtcccattatctagtcgggatatggttctattccgtactcttgctgattttaaatatatcattatacaagaataccgttccgagtaagctaaacaccaaggctttcatcatattctgcatagcatcttgggaccaatatagaaaccattgtgtcttggcgcaactggtcaaatactcactgcccagcggggggatgttcggccttgtatgttgcccccattatctagacgaaattattatttattccactctgttgccctacgaacaagaattctatttaacactaatttgggtcatcgcaagcttaagtatatcggcattggaaacacggaactattacagacacaaattcaaagacgatcacgtaacccgctacgccatcataccttacgtactttaa

SEQ ID NO: 1259 - DNA, 3447 bp, Saccharomyces pastorianus
atgcctaaccctccttcatttaagtcacataagcaaaatatattcaactccaacaacaatcagcacagaaatagtgtagattcattcgacttacatctcgacgattcatttgacgctgccttagacaatttacaaatcgacaataatccagatccactaagtaagcacaatactgttggagacagagaaagttttgaaatgagaacggtagacgacttttcgaatctgtctacagattcacatcgtaagtcttcaaatacagatacccgtcctttaatgtacgacaatcgcctctcgcaggacgatagtttcaaatttactaatattgcttcatcaccatcaccatcttcgaataattttttttcaaaagctctctcatttttaaagatgtcgaactctaaaaactggtccaagtttggatctcccattgaacttggcgatcaacacgtagaaagagaaatacacccagatacaacgcctgtatatgatagaaatagatatgcgtccaacgaagtatccaatgcgaaatataatgctgtgacatttgtgccaactctattgtatgagcagtttaaatttttttataacttatactttttggtggtcgcattatcgcaagccgttcctgcgttaagaatagggtatctatcatcatatatagtaccactagcgtttgtgctgacggttacaatggtaaaggaagctatagatgatatacaaagaagaagacgtgatagagaatccaacaatgaactataccatgtaataacaagaaaccgttctattccaagtaaagatctaaaagttggagatctcataaaagttcataaaggtgatcgtattcctgctgacttaatccttctgcaatctagcgaaccatccggggaatcattcataaagaccgatcaattagatggtgaaactgactggaagttacgtgttgcgtgccctctaacccaaaatctgtccgaaaatgatttgatcaacagaattagtataacggcttctgcacctgagaaatccattcacgaattcttgggtaaagtcacgtacaaggactccacttcaaaccctttatctgttgacaacactctctgggcaaacactgttttagcttctagcggattttgtattggctgcgttatctatacgggtagagatactagacaagctatgaatacaacttcagccaaagttaaaactggcttgctagagctggaaatcaatagtatttccaagattctttgtgtgtgtgttttcgccctgtccattcttttggtcgcatttgctggtttccacaatgacgattggtatgtcgacattatgagatatctgatcttgttttccaccattattcccgtgtccttaagagttaacctggatttagccaagactgtttatgctcaccaaatcgaacacgataaaactattcctgaaacgatcgtaagaacaagtacaattcctgaggatttaggtcgtattgaataccttttaagtgacaaaacaggtacgcttactcagaatgatatggaactgaaaaaaattcacctaggaactgtatcatacacatcagaaacattagacattgtgtccgactatgttcagtctttggtagattctaaaactgactctttgaataattctaaaattcctctatcaacagcaagaaaagacatgccctcacgtgtacgtgatatggttattgcattagcaatctgtcacaatgtcacacccacttttgaagatgatgaactaacctatcaagcagcatcaccggatgaaatcgctatcgttaaatttaccgaatctgtcggattgtctcttttcaaaagagatcgtcattcgatctctctgttacatgaacattctgggaaaactttaaattatgaaattttacaagttttccctttcaattcggattccaaacgtatgggtataattgttcgtgatgaacaacagggtgaatactggtttatgcaaaagggtgccgatacagtaatggcaaaaattgtagaaagtaatgactggctagaggaagaaacagggaacatggctcgtgaaggtttacgtactctggttatcggccgtaaaaaattaaacaagaaaatttatgaacaattccaaaaagaatacaaggacgcttctttatcaatgctaaaccgtgatcagcaaatgggtcaagttattggtaaatatctggaacatgaccttgagttattgggtctaaccggtgtggaggataaattacagaaggatgtgaaatcttccatcgaattacttagaaacgctggtataaaaatttggatgttgacaggagataaagtagaaacagcccgttgtgtttccataagcgcaaaattgatttctcgtggtcagtacgttcataccataaccaaagtaacgagaccggaaggtgcattcaatcagttggaatatctaaagattaataaaaatgcttgtcttctaatagatggtgaatcattggcaatgtttttaaagcattatgagcaagagttctttgacgttgtggtacatctgccaactgtgattgcctgtcgttgtacacctcaacaaaaggcggatgttgctttggtaattcgtagaataacgggtaaaagagtgtgttgtattggcgatggtggtaatgatgttagtatgattcaatgcgcagatgttggtgttggtattgtgggtaaagaaggtaaacaggcttcgttagccgctgatttttctataacacaattttgtcaccttactgaattgctattgtggcacggcagaaactcgtataaaagatcggccaaattggctcagtttgttatgcatagaggtttaattattgccatttgccaagcagtctattccgtttgttcattgttcgaacctattgcactttatcaaggttggttaatggttggttatgctacttgttatacaatggctccagtcttttcattaactcttgaccatgatattgaggaatcgctaacaaagatatacccagaactgtacaaagaattgacagaaggcaagagtttatcgtacaaaacgttttttgtttgggttttactttcattattccagggttctgtaattcaattgttttcacagacttttacaagtctatatgagaatgatttcgttaaaatggttgctatcagtttcaccgccttaattttgaatgaactgatcatggttgctttagaaatttacacgtggaataaaaccatgttttttactgaaattgccactttgttgttttacgtagcatctgttccattcctaggtgattattttgatttaagttttatgaccaccgtaaaattttatgctgaactcttggtgatcctactaatttcagtcttccctgtctggacggcaaaggcaatttatagaagactacatcctccaagttatgcaaaagtgcaagaattcgccacgccgtga

SEQ ID NO: 1260 - DNA, 2652 bp, Saccharomyces pastorianus
atgaaattcgctgaccatctgaccgaatcttccatcccggagtggagggacaagtacattgactacaaggtcggcaagaagaagctcaagcgctacaaggataagctgaccgcggaggaacagcggtccagctccggtcggagctggacccctcccgtgtcgctgtaccagacggaggcccagcggaggattccgtctgccgactaccgtaccgggcaagtgagcaagaaggaatactctgggctgcagcgggagttcgtatccgagttcatcgaggactggctgatcgcgttccagctgagaaagtgcaacgagttttacctctggctgttgaaggagtgtgacaagaagtttgaggttttggagtcgcagctgcactactacttgctgcaaaaaaactatgagcgcgacgtgttgaacaggtccacctccagcgtcgacatttcctcgagcctgtaccaggcaggatccggcaacgttgatggcgggtacggctcgatggcgggtgcccaggacacgactccgccacggctatcgccacttgcgtattgccgcaaggtcctgaaggacaaccggttgctaccctcgtggcccaagcgaggattctcgttgctgcacgacgtgacgcaggactcgtcgtccaggggccgtgagacgtttgccttcggagcgtcgttcttggacaccatgaccatgacgcaggcccggaacctgttgagcaacgccatcatcgagtactacctgtacttgcagttggttaagtcgttccgtgatatcaacgtgaccgggttccgtaagatggtcaagaagttcgacaaggcgtgctacactaaggagttgccctcgttcatgtcgtacgcgagggccaactacaccctcttcaagcacgcggacgccaacgtgcaactggttgcgcaacagatgcaacagataaccagctcccagccggcaacgaccgcggagctgtcctctgcccaaagagacaaggagcccatcacttggctggaaactcagatcagcgagtggtacaccaccgcattgaccaacaccccgaaggacaagaagcataacacccacaagttgaagaagctgaccatccagtactccatatccgagcaaatggtccacagaaacaacaggtccatcgtgcagatgttcgttgttggcctgggtatcggtatttcgatggctctgatcactttcaccttgtatcgggccattagctccgatcaggcttccttcacgcacaagatcttgttcccgctgtggggcggttggtacatggtcatgttgatcgcgttcctgttccttgtgaattgttacatctggcataaaaccggaattaattatagatttattatgctgggtgagattcaatccaagaacggtacacaattctttaacaatgattttgccacgagcaaaatccctctcaaaatgtatttcttgacttttttcattttgtcctgtgcggtttgttccatgttgagttttgcattggaaagacttactcccatggggtttatatacattggtatcgtgtttttcctgtttgtttgcccctctggtctcatcccatactgggataaagtcgtacatacgagaaaatggctagtagtgactcttatcagactgatgatgtctggtttcttccccgtcgagtttggtgatttcttcctgggtgatatcatctgttcgctaacctactccatttccgatatcgccatgtttttctgtgtttactcgcaaacccccaacaatctatgcggctcttcccattccatagcaatgggtgccttgtcttgcctacccagttattggagattcatgcagtgtttgcgaagattcgccgactctggtgactggttcccacatcttttaaatgccgctaaatacactttaggtatcgcgtacaacgccactctttgtgcttacagattgtctgatcattcagacaaaagaagaacacccttcattgtgtttgccacgttgaattcgctcctcacttccgcttgggatcttgtcatggattggtccgttgctcataacaccacatcttacaattggttgctaagagacgacttatatttagccggtaagaaaaactgggaagacgggagctattcattcagaaggaaactggtttattattttgctatggtctgggatatcctcattagattcgaatggattgtgtatgcaattgcccctcaaacgattcaacaaagtgccgtgacgtcatttattttggctactttggaagttattagaagatttgtttggatcatctttagagtcgaaaatgaacatgtcgctaacgtccatctattcagagtcaccggtgatgctcccttaccttatccaatctcgcaagttggtgatgatactgaaagtagtgaactgggttccaaatatttgtcatcgataaatgatatacctattacgccctcacgtgataacgatccgcacaacgtcgaagaacccgcacccgcataccgtgggaccttcaggagaaggtcttctgtatttgaaaacatttcaagaacaattccctgggctcatgcaactgactttcaaaggccaacagttaatactgtggatgacagatcacctgaaacggacagtgaaagtgagatggatagtgtgatgtga

SEQ ID NO: 1261 - DNA, 1884 bp, Saccharomyces pastorianus
atgaggagacagctgcaatggatggccgggtccgagaacgagggccaggacggtctggataacgaaaacaatagcaatacaagcgaaatgaccgacacggcgatgatgccacctttgaagagagtgctgcaggcagatggtagcgatgacgggtctgggaagaagcagatgacaacgtcggcgacgatgtcgccgacgttgtcgccgacgctgtcgacgaatgacagcggcaccagggtgcagccgctgccggagtacaacttcaccaagttctgttaccggcacaacccggagattcagttctcacccacgcacacggcttgctacaagcaggatctcaagtgcacgcaggagatcaacgccaacatcgcgaagctgccgctgcaggagcagtcggacatccatcacattatctcgaagtacaacaactccaacgacaagattcgcaagctgatcctggatgggatcctatccacgagctgcttcccgcagctctcgtacatttcttcacacgtcacacacatgatcaagatcgacttcatcagcattctgccgcaggagctgtcgttgaagatcctgagctacctggactgccagtcgctgtgcaacgctacgcgggtgtgccgcaaatggcagacgctggccgacgatgaccgggtgtggtaccacatgtgtgagcaacacatcgacaggaagtgccccaactgtggttgggggctgcctctgctgcacatgaaacgtgcgcgcatacaacagggcagctcgggctccagcgagggcacacggccttggaaggtcatctacagagagcgcttcaaggtcgagtccaactggcggaagggccactgccgaatccaggagttcaagggccacatggacggcgtactcacgctccagttcaacttccgcctgctgttcacgggctcgtacgactccacaatcggcatatgggacctgttcacggggaagctcataagaagattgagcggccacaccgacggcgtcaagaccctgtacttcgacgaccggaagctgatcacgggctcgctcgacaagactatacgcgtgtggaactacataacgggcgagtgcatctccacgtacaggggccactcggatagcgtgttgagcgtggactcgtaccagaaggtaatcgtgtcgggcagcgctgacaagaccgtcaaagtctggcacgtagagtcaagaacatgctacaccttgaggggccacacggaatgggtcaactgcgtcaaattgcatccaaagagtttctcgtgtttcagttgcagcgacgacaccacaatacgcatgtgggacatccgaaccaattcgtgcctgaaagtgttccggggccatgtgggacaggtccagaagatcataccgctgaccattaaggatgcggagaacctggccaccgacaacacctcttcgcaaaacgaccaggcaatggccagcgaccccaacgcgtcagaaacgccgtcgagtgagcaagaggcggccacccttgacgagaccataccctaccccacacacttgctgtcgtgcggactggacaacaccatcaaactctgggaggtccgaacgggcaaatgcataagaacacagttcggccacgtggaaggtgtttgggacatcgcggctgacaacttcaggataatcagcgggtcccacgacggaagtatcaagatctgggacttgcaaagcgggaagtgcatgcacacgttccagggacgcaggctacaaagagacactcaaccaacgcagacgcaatctctgggcgacaaagtcgcccccatcgcgtgtgtgtgtattggtggctcggagtgtttcagcggtgacgagttcggatgcgtcaagatgtacaaattcgatctcaacgactag

SEQ ID NO: 1262 - DNA, 1605 bp, Saccharomyces pastorianus
atggctaccactactcaaccacaaaatattttgatggatgaatctttgaacatccctagtggcagcaacagcagtcattatgggaacacaaatgcaaatgtaagaactccctcggggacacacacgcatcatcctaggctgaactctctggactttttgcacatgcccagaagactttccaatgtcaagctgcaccgactaccacaagacgagctgcggagaaatacaaatctgaacaagagcatgtccatcaacggtaatcaggttcatgctcaccatccgttcataaacccgggtgcagaagtcggtgctcatcagaacgtggaaagagaagaggaggaggaagatgagatttctcctctgtctcatgataacttccagtatgattcagaagagaatgctaataatccctcaccccccatctataagaaatctggcgaactggtgaagagctcgctaaagagaaggtccaagtccttacccatcacccccaaatctatcttccacaaggcgggcgccaggggcaagcatgtcaatctggaccacgtggattcaaggctgttgcaaagaagtaaaagtgtccatttcgatcgtgtcttacctataaagctgtttaatgggaacgaaaaacctatagacgttagcaaacaaatgatccagcaggatgtcttaaattttaagcacaagcctttgacaagactcgatgattttaacggtagtaacgactgtgtacccatcgaggacttgttatctgaagacagccaaaacacatttcaagacacgtggctacgaaaccccaagggcgtcttcctctttgggacgaatgccaacagtcaccacaagaacaagaagaagttctcgctggaggacgaggatagtgatgacgatgaggctataaaccgcttagtgaagaagcaaggcaaagacgaaactttcctcacaaacggactaaagaatttgttgataaacaacgaagaccaatattcagacgcaaagaaggactctgacaaatcagagatctcactggacgccaacaacttattttacgggaactcgaaaagaaccgttggtctttataataagaacttccccatcttaagtgataggaaccacaagagcttgaaattaaatgtatttttgaatttatctcgcggcaggcctgtttttctacaagagcttactttactatcaggtttccacaacatgactatagtggggaaagtctttgtaaaaaacatatactttgataagaagatcattgtaaggtacacatgggatgcatggaaaacggtccatgaatcagaatgcgtctatttctctaatgcaaacggcatcttaccggggaacaatatggatatcttcaaattctccatcgatgatatacacaatccaaacgataaagatagtaatatatcgccattagagttttgtattcaatacttgacctggagcgttgatcgttccagaaaggagtattgggacaataacgattcatcgaactataagatcgatgtggtgacccatgaagcgaggttagggcctacaacggacgtcaatgacaactatgaaatgagacacagtcttttcagaaatccattccactaa

SEQ ID NO: 1263 - DNA, 894 bp, Saccharomyces pastorianus
atgtcgacatcggtccctgtcaagaaggcactgagtgctcttttacgcgatcctggaaatacccactgtgcggattgtaaggcacaactgcatccacgctgggcctcctggtcacttggtgtttttatctgcatcaagtgtgcaggtatacatagatccttggggacacatatctcaaaagtgaagtctgtggatctggatacatggaaggaggagcatttgacgaaactgattcaattcaaaaataattcaagggcgaactcgtactatgaagccaatttggcagacgacttgaagcgaagaaagatcactgacacgagcagtttacagaatttcatcaagaataaatacgagtataagaagtggattggcgacttgtcaagcatcgtcaacgggtcgggcgatgctactctgcataaatcatccactaatcaatcttctgtctcgaacgcgagcttgaattcaagttcaaactcactacaaaggacgcagacacaaccgtccccttctttgttgaaaacttcgcagagtaataccagtttactgaacttgcaggtttcatctctttccaagaccacttctaatacgagtgacgctagtgacactacaagcatagctgccactagtaacaaagcctgtcacagggctaatgaaattgggcaaaggagcgacttgaagaaatctatcttatcattatactctaaaccttcgactcagactcaaagccagagctcgttcttcaataccacgatacctcagccatctccaactccaactccgtcgccattagttagtcctggaattattggtaccggtaacaataacgccaactcgaactccaattctaatgtttcgttggacgataacgaattgttccagaacgtttggacctga

SEQ ID NO: 1264 - DNA, 1188 bp, Saccharomyces pastorianus
atgtggaaggttatgcgtgtgtggagatgtggaggggtgcgctgggcacatcgccagcggccctcaaatgagttgttgtcggaactgtcgttcgaccagcactacaagatcaggtccaacatcgggctgctaatacaggactacgccagcaagcccattgcgccgctagactacgagtacttcctgcagtaccggccaccgctgacgaggaaggaggaatacatgctgacgatcaagacgatcaacttgttgctatcgctaacgtgcaagcggctgaacgccatccagaggctaccgtacaatgcggtgataaatccgcacctcgagaggaccaactcgctgtacctgaagagcctgcagacgctgcttccggtggcgtacccgtatgagctgcacaacccgcccaagatccaggccaagttcacggagctgctggacgaccacgaggacgccatcgtggtgctggcaaagggattgcaggagatccggacatgctacccacagttcaagatctcacagtttttaaactttcatttaaaagagcgaataaccatgaagctactggtgacgcactatctgtcgctgacggcgcaaaacaacgacgagtctgacgggaatacgatcgggatcctgcagcgcgacctacccatagtgcagttggtcaagcacgtctcggactacgtcaacgatatctgctttgtgaagtttaacactcagcgaaccccggtcctcgtctatccgccggcgcaggacatcgcattcacatgcatcccgccaatcctggagtacatcatgacagaggtgttcaagaacgccttcgaggcgcagatagcacacggcaaggagcacgtccccatagaggtcaatctcttgaagccggacgacgatgagctgtatatacggattagggaccacggcggtggaatcacgccggaggtggaggcgctcatgttcgactactcgtactccacacgttcccaacagccgtccgacgacgaggactctacagacctccccggcgagcaaatcaataacgtttccggcatgggctttggcctgcccatgtgtaaaacgtatctagagctatttgggggcaagatggacatccagagcctgcccggttgggggacagacgtctatatcaagcacaagggcccttccaaggctgcactgctcgccaaacgctag

SEQ ID NO: 1265 - DNA, 978 bp, Saccharomyces pastorianus
atgtcattcaatgcctttgccagctctttgagcaagaaactacaggaactctccacgagtgtgtccgaaagaacccaggatttgcccaacttggcgcaatccacccaaagaatggtccaggagcgtctgggtcaggtgacagacatctcacagttaccacgggagtacacggagctcgaggacaaggtcgacaccataaaactgatctacagtcacttcttgggcgtgactgcgatctacgaaaacgggtcgtacgactaccctaaatacatcaacgagtctgtcaacgaattttccagcagcttggcctccaagttgaccgagttgacccatgccacgtctgcttccgaggcgcagaacatcttggtcgctccaggccctataaaggagcccaagacattgaactatgctttgagcaaagtggctttgaactctagcgagtgtttgaacaagatgttccccagcgaggaacagcccctggcctcttcgctcttgcagttcagtgatgtccaggctaagattgctcaggctagaatccaacaagacactttgattcaaaccaagttcaataagaaattgagggaaagagtctctttcgaaatcggtaaagccgataaatgtcgcaaggaagtccactccatgagattgagatacgacgtggcaagaacaaacttggccaacaataagaagccagaaaaggaagcttccctaagagtccaaatggaaactctggaggaccagttcggccaagtcaccgaagacgctactgtgtgcttgcaggaggttatttctcacgccaacttcaccgaagacttgaaggaattggccaaggctcaagctgagtatttcgaaacctcttccgccctaatgaaggaattcttgtccgattcattcgctcaagagcctgaatcaaagcctcaagcagaagatggaaagccacaggccgctatttctatgaacgacgaagatgatgcttaa

SEQ ID NO: 1266 - DNA, 417 bp, Saccharomyces pastorianus
atgaacgccatccaaccccaatacgagctgtctgtggtcacccaatgtttgaaatatgcaattgatatcatccaatggttgatcccggcaatcaccaagttcagccagtctcaccctttggtctttcaactctcgttcatttcctttactttgtacgtcttttacaatttgctaatgaacctgatcaccctggttaagagattcctgtatgtggcgttagtcgtatcctgcatcggaatttacttacgtggttcccagcagtttttgactgttgacttgatgaatttctataacttcgccatgtccaacaggtactacgcattcaagatctatacactatttattaatgccttggaaaaggaagccaacgctgtctatcacctggctcaaacgaaagtacaacaattgttcaaatag

SEQ ID NO: 1267 - DNA, 1416 bp, Saccharomyces pastorianus
atgctaaggtgtgtagtcaagaagtttgcgtatttcgccactttgctcaccatcgtggctaacatctatatttatacctacccatctttccatccggaacagtgttcatggaattgttctgacaagaataccacgttacgagaagattcgactcttctggagaaagttaaggggtacttcaatgacgttcaagaacaatggtattccagccatgcttctgatagtgacgatattcacatcatggcctttggtgatcctcaaataaagggtaattggcccaagacaccctacgtgtcccgattggacacttatggcaacgactactatctaggccacatctacgatatgatgcaacaaagactgaaaccgcaagtggttactgtcatgggtgatcttttctctagtcaatggatcggggattcggaattccacaatagaacgcaaagatacattagtagaatatttaaaagagatcctgcttttattgaaagggttaaaacagaaaatctcgacgaagatggccagtataaggcaaactggtccaaatggggggatcgtttcaacgagatcctaagcactgctcaacaaaatgatactgcaaacgaagatttaacattcggatttggatacgaaaatatccaatcatggaacccagatttagaagattttctgtttattaacattactggcaaccatgacgtgggatactcaggtgatgccacgtaccaacatatgacaaggttctatgatcttttcggtaaggacaattattggattgaatacgagactaacacgacacatccttggagaatcgtagtgctaaacgatcttcttttggaaggccctgctttacaaccagaattcgttgatgcaacttggatgtttttgaagcaactaagtgagcgtaaattcgccggtagtactgttttattgacccatgttccattttacaagcgcgaaggtttgtgctacgatggcccagacactaggtattatccagatgttgatgcccctgaatcatataaaactgggcttctaagatctcaaaaccatttgggagaatccgtttcaaacgaagttttgaatatgatcttcgaaaacggaaagccaggtatcatattaacaggacatgaccatgaaggctgtgaaacggtttacaataagaagtcttccgccacttgggaagctacaaaagatatcgaaagtgacattttcgtcaaggaaattacagtcaaatccatgatgggcgaattcaacgggaacacgggtttagttacgggacacttcaacaccgatacaatgacttgggattggacattcagtttatgcccattcgccattcagcatgtttggtggttcgctaaagtatccctacttgttgctatattcacttggtcctcgctactcttcgtctaa

SEQ ID NO: 1268 - DNA, 2544 bp, Saccharomyces pastorianus
atggctcataggaaactacaacaggaggtcgatagggtctttaaaaagatcaatgagggtctagaaatcttcaatagctattatgaaagacatgaatcttgtacgaataacccctcccaaaaggacaagctagagtctgatttgaaaagagaggtcaagaaactgcaaaggctcagggaacagatcaaatcgtggcaaagctcaccagatattaaggacaaagattctcttctggattatagaagatccgtggagatagcgatggagaagtataaggccgtggagaaagcatctaaagagaaagcatattccaacataagtctgaaaaagtcagaaactctggatccacaagaaagagaaagaagagatatatcggagtatttatctcaaatgatcgatgaattagaaaggcaatacgatttactacaagtagaaattgacaagttattgcttctcaataaaaagaagaaaactttctctgcgtcaaatgacgagaaaaaggaacaatttaagcatttccaatcgaggcataggtggcatcagcaacagatggaactcgccttgaggcttctagccaatgaagaattagatcctcaggatgttaaaaatgtgcaggatgatataaattattttgtggagtccaatcaagatgctgatttcgtagaggatgaaactatttatgatgctttggacttacaaagtaatgaggccattgcccatgaggtagctcaatattttgcctcacaaaaggcagaagacaacaatacgtctgatgctaatgactctctacaggatgcatcgagactttctaaaaaggaacaacgaaaattggaaagggaagctaaaaaagctgccaaactagcgtcaaagagtacaacagacacaacagccactataggctcgacaataagcgtacctgatctttcctctacaccatcacccgtcacacctgtcacaaatatatctagggaaaccgaaaggagcccttctgcttcacctattcaaagtgtgtcaaaacctgagaaaccaatgaaaaccttttctataaagagccccaaggctagcactgaaaatatacttcagtcgctgcaaaaatcaccaagctcgacgacgcctgaaaccccgacaaatgtacatacacatatccatcaaactccaaatggtattactggtgccactactttaaaacccgccactcttccagtaaaacctgttggtgaactaaaatgggccgtcgctgcgtcgcaagcgatagaaaaggatagaaaggtcacatctgcatcgtccaccatttccaatacttcgatgaagactccgacaacggccgttgccaccacaacgccatccaatgccaacagtagaataagcagtgctttaaatacacccaaactaaacactccatcattatctttacagcctgagaataacggcgcatcgtcatcatcagctgctaatgcggccgccgtcttggctgcaggagccgctgctgtgaatcacaataaccaagccttttacagaaatatgaactcccctcatcatcctctagtttctttggctacaactacaaagacggagcatgtctccaccgtttcaggaacgccattcaatgaaggtgcgtttgaaagtgatactaaaccagttgcagaacaacaggaggaaaccgaatcgacagagaaaagccaactgcaggttccaacttttggggtatttgaagacgacttcgaatctgatagagatttagaaaccgaatcagaggacgaggagcaatcaaacacatcgatacatctaagttcggaacagaaagaggttagaacaaacgaaattaaaaatgaatttgttagtgactttgagactctactgctaccaagtggtgtacaagaattcataatgagttcagaactctataacagccagattgagtccaaaataacgtacaagagatctcgtgatatgtgcgaaatttctagactagtcgaagtaccgcaaggcgtcaacccaccatcccccctggatgcattcagatccactcaacaatgggatgtgatgcgttgttcattgcgcgacgtaataatagattcagaaacgcagaaagagagttcatcatcggtctatgacagaatcttagaaaacttcagaactttagagatgttcacactattctacaattactatttttctataactcctttagaaagagagattgcatttaaaattctaaacgagagggattggaaagtttcaaaggatggtgctatgtggtttttaaggcaaggtgagatcaaattttttaatgaaatctgtgaagttggtgattataaaattttcaaactggatgattggacagtaattgataaagttaatttcagattagactactcatttttacaaccacccgtcgatgcagtacctgaggctggcgatattgatgttgacaataacgatgttaacgatcaaagtaatgtaactttagaacaacaaaaacaacaaatttctcatggtaagcaactcttgaatcaattgagacaaggtaagaataatgtatga

SEQ ID NO: 1269 - DNA, 1953 bp, Saccharomyces pastorianus
atgaacaatatgtgcgtcgtaagatctttatcactccctcagaggttgttctattgtctcttccacccccttctgctaatattctttacttcaataattctaactatttggagcaccttttcagttatagatattacaatggctaaaacatatcacacgaagaccgagtggaacaataccgttgtcacttcagtatctatttctacagccacaacaacagctacagaaacatcagtcactacataccaaccttcgtactccaccagtttttatactttaaacaattcctatattgaagagaggatcgatcaatactttgagagcaaactccgaaatatttcatccgtagttaatacggatatgcaggcaaaattcgagtcatacacggatgatttactgaatgacaaacaacagctgataaccgaccatataagttcacaaaccgaatcaataaaaagcgttcttgagctgaacaatacgatctttaacgagttgctcgctaaatcgcatttaataaatgtaacatggagcgaaatatctgaagatgcgatgacgctggaccaggattcaatttcacaattagcacagaatttatttttgaattcttccatgttcgataacgttttccaaaattactccagtagattggaatttttacaggaatttaatgacaccatcaccgattttcctattcagctgagtgataataagactttaaatttaagttatttacaaacatccgccgactgggttcaattaagacagaatttcaccagaaacttacaaagtcaaattttcattctctctgggaatactacaaacaccaagtcatcagcctcaataacgaagagatctataaataataatagtgaggaaaatagcgatttcattgcaataaaaagaaaagttttttataggtgtcagaaaatgacaatagttttcaccgtactctattttgccttagtggttttactaatgatagtggaaagaattaagtttcagctggaaaaccaacagtttaacttagtaatttcccaaattaatgattctacagggtgcacaaacttcacgcaatacaataacattctgaaaaacctgataactactttgaacctctccgcactttacccagttgtctaccaattgacaaagcttataaaccagaagatattgaaaaggaacgcaaaagaaagcaacgagagaaaagcaaaacggtccaaactattttattgcaattggtggttattctcaaatggcgtttatttgtggatttttggtttactgatgatattgattcattggcaaattgcgtcacgattaacaagcttttcagtagcagattcacgtgcattaaataaaagatcagaacctctgtcatacaagagagaactttgggcagacgtaaatatgactaccgcagtagatggcgtcattaatgacagtataaacttattgtgcgcgaacttccaattggacatcaacgaacggttcctctcaacacatttcacgtttcaggctgacccaagcttacgagcacaatcgatggaaattttgagctcctggggtaatgcgacaaacactcaattcgagaaatatctcaatgatagttctcagaattggcaaaaaacagacgtgcaaattgaacctcttctgagcaccgactctgtcacagtattcatgaaccagtattccgtcccactgaatagagttgccggagccagtacatcattagcaatagacattcaaaagtatgggataatcattaaggaaactaatgtaaccaacaattcagtggcgacactctcatcactgggaaagcgtctggtagaaaaacaagaaccaaaacaaaaaaactcgccctcatcacacaacgttttcaagtggggggttttaatagcctgtttgatcatactgcttcaccacctgctcaccttcataataataaggctgtaa

SEQ ID NO: 1270 - DNA, 1119 bp, Saccharomyces pastorianus
atgaaatgcagggtattgtcagaagctcgtgtttatacgaatatcaataagcaaagaaccgaggaatattgggattatgaaaatactacaatcgattggtccacgaatacgaagagctacgagattgagaataaagtggggcgtgggaaatattctgaagttttccaaggtattaagttggactcaaaagttaaaattgtcattaaaatgttgaagcccgttaaaaagaaaaaaattaagagagaaattaagatcttaacagatttgtctaacgaaaaactacctccgacgactttaccattccaaaaagaacaatactacacaaatcaaaaggaagatgttgtaaaattcactagaccctatatttttgatttgcctcacaccggtcatgcaaatataatccatttatttgatgtaataaaggacccgatttctagaacgccagctttggtctttgaatacgtcgataacgtggactttcgtattctttaccctaaattaaccgatttggagattaggttttatatgtttgaactattaaaggctttagattactgccattcgatgggaataatgcatagggatgttaagcctcataacgtgatgattgatcataaaaacaaaaagttacgattgatcgattgggggttggccgaattttatcatgttaatatggaatataatgtccgtgttgcatcgagattcttcaagggtccagaactactagtagattatagaatgtatgattactctttagatctatggtcatttggaacaatgctagcttccatgatatttaaaagagaaccatttttccatggaactagtaatacagatcaacttatcaaaattgtcaaagtgcttggtacaacggattttgagaagtacttgttgaagtatgaaatcactttaccaagagaattttacgatatggaccaatacatcagaaagccttggcatagatttattaatgatagtaacaaacatttaagcaataacgatgaaataattgatctaattgataatctgttgaaatacgaccaccaagaaagactaactgctaaagaagcaatgggtcacccatggtttgccccaatcagagaacaaattgcaaaataa

SEQ ID NO: 1271 - DNA, 864 bp, Saccharomyces pastorianus
atgtctgacactcaattcgatgctgctttggatatcctcagaagattgaaccccactacgctgcaagaaaatttaaaaaatttgatagaattgcaaccgaacttggcgcaagatctgctatcttcagtagacgttcccctatctgtccagaaggaccccactcactcacatcgcgaatatctctgctgtgattacgaccgtgatattgactcgttcagatcaccatggtcgaacacctatttcccagaattgtccccagaggatttgcaagacagtccctttccttccgcgcctttgagagagatggagatcttggctaatgactctttcgatgtttacagagatctgtactacgaagggggtatctccagtgtgtatctttgggatcttaatgaagatgatttcgatggacacgatttcgcaggggtagtgcttttcaagaaaaaccaatccgaccatagcaattgggacagtatccatgttttcgaagtcacagcttccccttcaactcccggctctttcgattatagagtcaccactacaattatcttacacttggacaaaccaaagaatgaccaggactcccatatgatgttgtctgggaacttaacaagacaaacagaaaagggcatcgccgtggacatgtcccgtccactggacgttatctccacatcacacgttgctaatttgggatccttgattgaggatatcgagtctcaaatgagaaacttattggaaaccgtttatttcgaaaagacaagagatatcttccaccaaacaaagaacgctgcgattgcatcctctgccgaggaggccaacaaaggtgcccatgcagagatcatcaagggtctacagtctctatag

SEQ ID NO: 1272 - DNA, 1251 bp, Saccharomyces pastorianus
atggtcttttctttgtccaaggaatcgcaagctgagttgcagctgttccagaatgaaatcgccgccgccaatccgtctgatttgctacagttctccgccaactacttcaatcagaggctagagcaacagagggcgtttcttaaagccagggagcccgagttccgggccaaaaacattgttctgttccccgagacagacgaacccctgtccaggccccagtcagcgcagtcgcagtccaggtccagatcgagcgtcatgttcaagtcgcctttcgtcaacgaggatcctcactccaacgtgttcaagaacggttttgatatggacccacacgagcaggacgcccaccagccattaaaggaagagcaacaacatggcggcgaaaagggctccacacccccgcttccaatgcacttcaacgctcaaaggcgtacctccgtcagcggtgagacgctgcagccaaacaatttcgatgactggactccggaccactacaaggagaagtctgagcagcagttggaaagactggagaagtccattggcaacaactttctcttcaacaaactcgactccgactcgaaaaggctggtcattaactgtctggaagagaagtccgtgcgcaatgggtctaccatcatcaagcaaggtgaccagggtgactacttctacgtggtggagcagggcaccgtcgacttctacgtcaacgacaacaaggtcaactcctctggtcccggttccagttttggggagctggctctcatgtacaacagcccccgtgccgccaccgtcgtggccacttccgactgtctgttgtgggccctagataggctcacctttaggaagatcctgttgggcagctctttcaagaagagactaatgtacgacgatctgttgaagaccatgcccgtgttgaaaagcttgactacgtatgaccgtgccaagctcgctgacgccctggataccaagatctaccaaccaggcgaaacgatcatccgcgagggcgaccagggggagaacttctacctgatcgagtacggcgccgtggacgtctccaaggacggtcaaggtgtcataaataagctgaaggaccacgactatttcggcgaagtggccttgctgaacgatttgcccagacaggccaccgtgaccgctacaaagagaaccaaagtcgccactttgggtaaaagtggtttccaaagactattaggtcctgcggtagacgtattgaagctcaatgaccccacaagacactga

SEQ ID NO: 1273 - DNA, 426 bp, Saccharomyces pastorianus
atgacgctcgtctccaaattactttatgcagtttctacgttagtgctattacactctggtttctcaagttatgaatttcatcatttattaaaacttaaatcgctaaacaatgcacaaaccgtaatccatgaattgcccaaggatataaagtatgagacgtatgcaggattactattatttgttcttgcagtatttacgtctttcaagaaactacaatatttgccaattgagagcaacgacgggatgataatatctgaagggaactatctaaaggaaattgcattgaataaagccaccaacgtggataacttgatcggtagcaatcctaatggtgaaatcgttttcactccaagctttgttgatgtccacgctaagaggaaactttcaagagaatgggcttctaataatgagaaaaaggaaaaatga

SEQ ID NO: 1274 - DNA, 570 bp, Saccharomyces pastorianus
atgtccagttttttacttatcatccccgaagacgtaatcaaagagtactccaaaggagataagctggtcgttacaggggagttcgataactggggacactcagagtatgttttgcagtacgacagcagcgcacagaactacacggtccaaatacccagacgtaaggaccaacgcagcacgatgttcaaagtggtgataaatgataagaagtgggtcaccctcaactacttcgacaccgtgacggataggtcagggcacaccaacaatgtgctgcatttcaaagacaacgaggcaagccagctcatggacgtaccactgtcaccacatgcacgggccagcactgccaaggggaagccagaggacgactcgttgaacgactacgtcaacttgtcgtcgcatagcgacctaagcagcacggaggagatcgtgtactggaactctgatatggaggacgagaacctggacgccaccatccagtgtgacttccacgaggcgttcaacagcaggaaggagtctctgaacgggctaatgtgtattgccaagaaggtcaagacctactggaacaaatag

SEQ ID NO: 1275 - DNA, 1050 bp, Saccharomyces pastorianus
atgaaggcgttccaggtttgctcttatctgctgggcgtggcccctgcagtactggcccacgggcttcaccataaccatgctcatggccagggcgcagagcacgagttcaagcagggctctgtaatcttgaagcaagaatccgtcctttacccgctggtgcagttcctacaggactacgtgttcgccctgggcccccgctacaatgccctcgtggccatcctgatcatacagtttatgccatgtctctttgtgctgctggttcccggactgcgcagaaccgatcctgccagcttgacactgcccttgctggtttcgttttcactggggtcactgctgggtgacgttttcttgcacatcataccggaaagccttatcggcggtagtgcagacgatggcatgatggtcgggtttgctatcttcctggggtttatctgcttcttgaccctggacaaaacgctgcggatcctatccggtgcctccaacgacgatggtggcatgcactcccacttacacggccatgcccacccacaccaagacgcagagaagaagactggcttcaacatgtctgcgtacttgaacgtcatatccggtatagcccaccacatcaccgatggcatagcgctggcgtcgtcgttctacagctctgcgcaggtcggcataatcaccagcatagccattactttccacgaaatccctcacgagctgggcgactttgctgtcttgctctccagtgggttcacgttcccacaggccatacgagcccaaatgataacggcgtccggtgccgttgttggcaccgccattggttgtctgatcaacgagatcgggggctccagccatgcaccaacatcgtcgtcgagtggtgtttccgagctcatgctgccgttcactgcaggtggcctcatttacatcgctacgaccaacgtggtgcctcagatcctgcaaagctccacccataatagcaagtgccaagagttcaagcggtgggtcttacaactgggctcggtttttgtggggtttgccgtcatggcactcatggacgaccactga

SEQ ID NO: 1276 - DNA, 1272 bp, Saccharomyces pastorianus
atgtacagatcgactcttactacgctcgccgccgggtgcaggccccaggatgcaggactcctcgttactaaagccctgttctccacctctgtcactcgtgcccaaggtggaaaccctcgatcgccactgcagattttccgtgacacatttaaaaaggagtgggacaagtcccaggagctgcaggagaacatcaagacgttacaggatgcctcaggaaagctgggagagtccgaggcttacaagaaggccagagaggcctacctcagggctcagagagggtccacgatcgtgggtaagacgttgaagaagaccggtgagaccgtcgagcacatagccactaaggcctgggattccgaactcggtaagaatacaagaaaggccgcttctgccacggcgaagaagctggacgagagctttgagcccgtcagacagaccaagatctacaaggaggtctccgaggtcatcgacgatggcgagagctcccggtacggtgggtttatcaccaaagagcaaagaaggctcaagcgtgagaaggacctggcctctgggaaaagacacagggcggttaagagcaatgacgaggcgggcacggcagtggtcgccacaaacatcgagtccaaggagtcgttcggcaagaaggtcgaggactttaaagagaagaccgctgtgggccgttccattcaatcgttaaagaacagattgtgggatgaaagtgaaaaccctctgatcgtcattatgaggaaagtgaccaacaaagtgggcgggttcttcgcggaaacggaatcgtcccgtgtgtacagccagttcaagatgatggaccccactttttcgaacgaaaatttcaccaagcacctgagagagtacatcgtcccggagatcctcgaagcgtatgtgaaaggcgacgtcaaagtcctaaagaaatggttcagtgaggcccccttcaacgtctacgccgctcaacagaagattttcaaagagcaggacgtctttgctgacggccgtatcctggacatcagaggcgtcgagatcgtcagcgcaaagctgttggcccctcaagacatcccagtcttggtggtcgggtgcagagcgcaagaaattaacctttacagaaagagaaagaccggcgagatcgccgccggtgacgaagccaacatcctgatgagctcgtatgccatggtcttcaccagagatccagagcaaatagatgatgacgaaacagagggctggaagatcttggagtttgttcgcgggggttctaggcaatttacctga

SEQ ID NO: 1277 - DNA, 960 bp, Saccharomyces pastorianus
atgagtgaagaaggcccccaagtgaaaataagagaagccagtaaagataacgtggatttcatcttgaccagcgtggatttggccatggccaattctctacgtagaatcatgatagcggagatccctaccctggccatcgactctgtcgaagtggaaacaaacactactgtcctggccgatgaatttattgcacacagactaggtttaatacctctacaaagtatggatatcgaacaactagagtacagtcgtgattgtttttgtgaagaccactgtgacaagtgttccgtggtgttgacattgcaagcctttggagaaagcgaaagcactacaaacgtgtacgccaaggacttagtcatcgtgtcgaaccttctgggacgcaatatcggtcaccctgtcatacaagataaagaaggtaacggtgtgcttatttgcaagctgagaaagggccaagagctgaaactaacttgtgttgccaaaaagggtatagccaaggaacatgccaagtggggtccggcagcggccatagaattcgaatacgatccttggaataaactcaaacataccgattattggtacgaacaggattctgccaaagaatggccccagtccaaaaactgcgaatacgaagatcctccaaacgaaggcgacgcctttgattataaagccgaggcagacacattttacatgaacgtggagtccgtagggtccattacagtcgaccaagttgttgtcagaggtatcgatacgttacagaaaaaggtcgcttcgatattgttggctctgacacagatggatcaagataaagtcaatttcgcatcgggcgataacaacgccgcctcaaacatgctgggaaccaacgaagacgtgatgatgtcgggtgctgagcaagatccatatttcaacgcatctcaaatgggtaatactggatcatcaggcgggtatgacaatgcttggtga

SEQ ID NO: 1278 - DNA, 1044 bp, Saccharomyces pastorianus
atgaacagtgatgaagaggaatatgccaggcaattagaactacaaaggaaagcctttgaaagccagttcggatctctagagtccatgggattcgaagataaaacaaaaaatatacaggctgaaaaagatacaagctccggttcagacggtgaaaaggacagttcagacgatgctggtgaccttgaaaatactaatgggaacggccacttctcttctgaagaggaggcggaggatgatgtaagcgatgaggatgacgaacagaaacccaagctgaaaacgcaacccaaagttatcaagttcagtgggcccagcgatgtttacgttcctccaagtaaaaaaacacagcaactactgagaagcggtaagacattatcgcaaataaataagaagttggagagcactgaagctaaggaggaaaaagaggatgagactgtggaagcagaaaatttgcaaaatgacctggagttgcagcaatttctaagagagtcacacttgctgagtgccttcagcaatggtggaagtaactctgcggatagtggagtagcattgactctgcaaagtatgggcggtggtaacgatgacggtatagcttatcaagacgaccaagtgattgggaaagctagatcgcgtacattggaaatgagactaagcagactgtcgaaggtgaatggacacgaggagaaaatcaacaaactagaaaaagtgcccatgcatattagaaagggaatggtcagcaaacacgtccaaaggattaaaaaatacgaacaagaagctgcagaaggtgggattgtcttgtcaaaggtgaaaaagggccaatttagaaaaatcgaatcgacatacaagaaagacatcgaaaggcgtattggtggaagcatcaaggccagagacaaagaaagagccaccagaagagagcgtggtctaaaaatcaccagtgtaggcaggtccacgaggaacgggttgattgtatccaaaaaagacattgatcgcatcagcggaaacaacaagggcggtaaattcaacggtaaaaagaattcccgtcgctag

SEQ ID NO: 1279 - DNA, 2769 bp, Saccharomyces pastorianus
atgactgtggcttattccctggagaatctcaggaagattagtaatgccctagtgggtgatcaactggctaaagtagagtacttcctggccccaaagtgtctgattttccagttcctggtggccattaggccggatgatagggtggcattgaagaatgcgaagttggatttgttgtatactcttttacacctggaaccgcaacaaagagatatggtaggcacatcgtaccttgatactgtctctgcgatctacaagtccatgactctggcaagaagttttgcccagaatgagtctttgaccaactataagtacgtgaaacttctgaatttgtgtgcagaagtctaccccaattgcgagttttcagacctacagtaccttcagaaggggtttatccatttggtcaacaataaatttttgagaggcttatgcagtgctaatgaagttactacaattattgaactgttgaaattcttttcacttgtggacgaggaaagggacggtggttctgatttgacggatcctataaagcaagaaagggaagtgacagaaatttcgcactatcaagattttaatatggcggattctcttgaacagataatagtcaagacttccacgaagtacctggaccaaataagcctcaaatacatagtgagactcaaggtttccaggccagcgtcgccctccagtgtcaaaaacgatccattcgataataagggtgtggactgcacccgcgcaattcctaaaaaaattaacatctctagtgtttatgactcaagtttactgtcattggggttactgctttatttgaggtactcttatgtgataccagacgataggaaactgtggaatgacctgaccttcaaggcatttattctgggccttttaaagagtgatgatgtaaatatcagatgcatttccttaaagttcttattgcatccataccttacagaggataaaagatgggaggattcgcgtactctggaaaaaatactgccatatctcgttgaatcgttcaactacgacccattaccttggtggtttgatccattcgattcactagattctttggtagtactatataacgaaactactccaatgaataatcccgtactcgccaccctggcccatacaaacgtcgtattttgtattctgtctcgtttttctcaatgcctttctttaccacaacagaacgagtcttctttgagaacgactacaaagttcatcaaactgtgcgcctcctttgcagcctcggacgaaaaataccgtctattattattgaacgataagttgttattaaaccacttagaatacgggctggaatcacacattactttgatacaagattttatatcattgaaggatgacataagagaaacggttgccgagactcattttatgtgtttacctcccatatatgaccacgagtttgtggcagcttggttacgattgctgaagtcattctcaagaagcgtttctgcccttaggacgactttgaaaagaaataaaatagcacagctacttttacaaattttgactaaaacatataccttaacgaaggaatgctattttgctggacaaaattttatgaaaccggaaatcggaattatgggcattacgctgggtagcatttgtaattttgtggtggagttctctaatttacaatcattcatgttgagaaacggtataattgacataatcgaaaaagtgttatcagatcctttattcaactcaaagaaagcctgggaagatgacgaaaatgaaagaagaatcgctttgcaaggtataccagtacacgaagtaaaggcaaactctttgtgggtgttaaggcatttaatgtacaactgtcagaacgaggagaagttccaacttttagccaaaatcccaatgactttaatcctagattttattaatgattcgtgttgggcagtacaagctcagtgtttccagctccttagaaacttgacttgtaactcaagaaaaattgttaatattctcctggaaaaattcaaagatgttgaatacaaaatcgatccccaaacaggtaataaaattagcatcggttcgacgtatctttttgagttcttagcaaggaaaatgagactattaaatccactggatacccaacaaaagaaggcaatggaaggtgttttatacataattgtcaacttggctgcagtaaacgagaacaaaaagcaactggtaatcgaacaagacgaaatactgaacattatcagcgaaatattgatggaaactacaaacgataattcacgttatggcaacgacagtaatttgaagttagcgtgcctatgggtcctaaataatttactttggaattcatctgtttcacattatactcaatatgcgattgaaaatggtctgggaccgggacattcaccaagtgattctgaaaatccacaatcaacggtcacgatagcgtataatgaaccagttgctggtggatactccagaggaaagtattttgacgagccggatggcgatgatagcagtagtaatgccaatgatgacgatgatgatgatggtgatgatgatgatgacgatgaaggcgacgagtttgttcgtactcccgcagcgaaaggtagcacttcgaatgtacaagttacacgggctacggtggaaagatgtagaaaattggtggatgtaggtctatacgatttagtcaagaagaacattactgacgaatcgctatctgttagagaaaaggcaagaacgttgctgtatcatatggacttgcttttgaaagttaaatga

SEQ ID NO: 1280 - DNA, 480 bp, Saccharomyces pastorianus
atgtcatacagtgtgatggacgaatggaagagcaagttgagcaagaccagcacttcgacgtacgtcgtgctggccataatcgcggccgtattcttggtcacggtcactagacctagcagtagcaagggaaagagcggcaagaggaagggctcgaagaaggacaagaagagcaaaggccgcttcgaaaaggccccggttccacttaccttggaagaacggatcggaaatgtgtccttgagatacaataacgaactgagagaccgaagcaaggatcttataagtaggttcgattccggtaacgaaaaggatgtttatgaacgcaactactgcaacgagatgctgttgaagttattgattgagctggacggtattgacctgattaatgtggatgagtctttaagaaagtcgttgaaggagaaaagaaaagctgtcatcaaggaaatccaggcgacgttgaaaagtctagactctcttaaataa

SEQ ID NO: 1281 - DNA, 1779 bp, Saccharomyces pastorianus
atgttcattataaatcacttttgtttacgacttctactggtgggtctcgcgatctcaaacaccgttgctgctttaagaagcgatggcagcggtcatctggaattttcactaaagcatgaagagcagatgtactacgctacaactttagatataggtaccccatctcaacaactgacagtactgtttgatactgggtctgcagacttctgggtgatggactctagcaatccgttctgccttgctaaatccaatacaacatattatcaaaacgcgacttataatggcagcaggatcaccccttcagtggattgtttgtctttgagtacatacaacgagaacagctcttccacctatcaagatcttgataacggcaggttctatatcatatacgcagacgggacgtttgcagacggttcttggggaaaagaaaccatgtcaattgacggaattaaaatccatgatatacagttcggtttagccaaatatgctacgacgccagttagtggtgtcctgggcatcggtttccccagaagggagtccgtgaaggggtatgacggtgctcctaatgaatactatcctaatttcccacaaattctgaaaagtgaacatattattgacgtggtcgcatattcactcttcctaaattcgcctgactctgatattggttctattgtgtttggtgccattgatgaatcaaagttttctggcgatttgtacacatttcccatggtaaacgaatatccaactatagtcgatgtcccagcgactctagcgatgaccatacaaggtttgggggcccagaataaaagcagctgcgaacatgaaacattcatgacaaccaaatacccagttttattagactcaggaacatctttgttaaacgctccaaagtccattgcagataagatggcttcctttgtaaatgcctcatatagtgcagatgaaggcatatacatactagattgcccagactccacaaacggtgtagaatacacgtttgattttggtgatctgcaaataaacgttccattaactagtttgattttgagtcctgagacagagggcggatattgtggttttgctgtccaaccaaccaacgattcgatggttttaggtgatgtgttcttgtcttctgcatatgttgtgtttgatctcgataactataaggtatcgttggcacaggcgaattggaatgctagtgatgattcaagaaaattggtgaatattcctactgatgggtccattccgggtggtaagagtgcaactgcacaaccttggtccactaatgatccatttacagtcacttccgatatttatgcatctgacgtttgcaaaactacgctctcttcgcatcaacagacaggctcctcatctattccacagactagcatgcaagctcttaattccacaacaagggttgtgggagtcaggtcgactactacattgagcaaaactactcaaacaggagtgacaaaccaaggggaaagtactaacatagaaagtgcaacggcgcgtaatcaatcagcgccttattacgatgcgaaaagttcagatagtgggctaatcatagtaactgagtcatcgggtagaaaaggtttctcaagtcctacgcactcaatgcctcaaactacagttaacccaactgcgacgaaaagttctgcactaatatccatatctgtagggaagagtataaatcgacctactcataagaccatcataacagaaaccgttacgaaatattctacagttgtaataaatgtttgtaaaccaacattttaa

SEQ ID NO: 1282 - DNA, 789 bp, Saccharomyces pastorianus
atgtccttcactaaaatcgctgctttactggctgttgccgctgcttccaccaaattagtttctgccgtggacgaatatgaaatcgttgaattcgacgctattctggttgatgtcaaagccaatttggaacaatatatgtctttggccatgaacaatccagattttactctaccaaatggtgtcttggatgtctaccaacacatgaccacttacagtgctggtgatgatggttacactagttggtacaccgaattagattttgctcaaatcaccaccgctatgcaacaagtgccatggtactcttccagactggtacctgaaattctctctgctttacaaagtgccggtatcactgttaccgctttaggtgacgatgccgctgctgcttcttcagctgctgcttccgaatctgcttccgaatctgcttcagcttccgaatcctctaaggcatcctcctccgctgctgcttcctcttcagcttctgaatcttcttcagcttccgaatcctctaaggcatcctcctccgctgctgcttcctcttcctctgctgccgcttcctcttctgccaagagctctgcctcttctgctgcctcttctgctgcctcttctgctgcctcttctgcatcttccaaggcatcttcctcttctgccaaggctacttcttcagcagcaaagtccagcaacggtacctcctctgctagtaagaacgctggtgccgctatcaacatgggtttcttttctgccggtgttggcgccgtcgttgctggtgcagccgccatgctattatga

SEQ ID NO: 1283 - DNA, 648 bp, Saccharomyces pastorianus
atgggcgaagcactacgtaggtcagctaggattgcaacatccaaaagagtgttggaaaatgaaggttccaaactagttccagtttcgccaccgaaaccggctaagaagaaggtcaagacgattccaaaactggatatcgaagaaccagtaaagcgggtagaccacagttcgtcaggtgctaacgaattggaaatcggagatgctatccccgatttgagtctcttaaatgaagatgatgagtctgtctccttgaaagaaatcgctaaagaaaacaaaattgtagtatttttcgtttatccaaaagcaagcacacctggttgtaccaggcaagcctgtgggttccgggacaactttgaagatctcaaggaacatgcggctgtctttggattgagtgcagattctgtgatatctcaaaaaaaatttcaaactaagcaaaatttgccctaccatttattgagtgatccaaagagagagtttattggtttgttaggtgccaagaaaacaccgctttccggttctgttagatcacatttcgtctttgctgatgggaaattgaggttcaagagggttaaaatatcaccagaggttagtgtcggtgatgctaaaaaggaagttatggaactcgctaaaaagtttgaaaaagaatga

SEQ ID NO: 1284 - DNA, 300 bp, Saccharomyces pastorianus
atggtgaatgtaaaagtggagtttttgggcggattggatgctatttttgaaaagcagagggtgcataaagtcaccgtggacaaagaggatcctgtaacagtgggtgacttgattgagcatatagtgtccaccatgattaagaatcccaacgacgtcagtattttcatcgaagatgactctataaggcccggcatcctcacattaatcaacgatactgattgggagctcgaaggtgaaaaggactgtgtcttagaagatggcgatatcgtctctttcacttccacgttgcacggtggctaa

SEQ ID NO: 1285 - DNA, 672 bp, Saccharomyces pastorianus
atggaggagaaagaactaagcgatttgttggccaatgtcaagatagacccgagtctggcgtcgaggatagaccagatggatgacttcaaactagcggaattgatggtgttaaagacggatatcgaggcccagctggaggcttatttcagcgtgctcaaggagcagggtattggtatggattctgcgctagtcacgccagatgggtatcctcgctcggatgtagacgtgctgcagatcaccatgatcagaaagaacgtcaatatgctgaagaacgacttgaaccaccttttgcaaaggtcacatgtcctgttgaatctgcactttgatagaatgaacgtcaagactcaccaaacggtggacggcaatgataggggcgacgaagatcgacccatccagtacactatcccctttgccttcatcagtgaggtcgttgcaggcagtccatcggataaagctgacattcaggtcgatgataagctgatttcgattggcagtgtgcatgcagcaaatcattccaaactacaaaacattcagatggctgtcataaagaatgaagacaagtcattacctgttcgtctcttgagagatgggaaaattctcaccacgtcgctgacaccttctaggaactgggacggcaggggtcttttgggctgcagaatacaagaattgtga

SEQ ID NO: 1286 - DNA, 2106 bp, Saccharomyces pastorianus
atgacaacacatttgaagaggcacctattggccttcctgcctttcatagctcttcttatagccctcacagtaactgctgctgaaccacccgaaggatttcctgagcccttgaacaaaaataacttcaaagaagagctgtccaaggggctgcatattatcgacttctatagtccatactgcccccattgcaagcacttggaacctgtctggatggagacgtgggatgaatttagagatgaaggcaagaaactcaatataactttttcacaagtcaattgtgtcgagagtgcagatttatgttcagaggaaaatattgaatcctatcctgatgttagactttataatccgtcaggatacctgaaatcgtttactgaaaggccaaaaaccaaagagtctttgatggcgtttgcgcgtagggagtctatggacccagataacctcgacacggatttggattctgccttaagtcaaagtcagcatctcgaaggttttgattttatcaagctgattgctggtaagaccgataggccatacttggtttctttctggccaaccaaaaatctgaaagatagtgatgattctgtaaatttcgagaattgtgacaaatgtcatgaattccaaagaacttggaaaatcgtttcccggcaattggttatggaggatataaagtctggccacgttaattgcgaatccaacccaacgctttgtaaggaactagggttttccgacttggtgaaaataaccaaccacagggcggatagagaacccaaagtggcattggttttacccaataaaacttcaaataatttaatcgattatccaaagggcttctccgtgaagtcaaacgattatgtggattttgccaaaaggacttttgccaacagtcagttcccgaatataacggaagaagaacttaaaaaagtggctagggaaatcgactttgtaccagaaaagggagcatcgttcaacaatgatattcacttggtctttgcatatgaccccgaaactgtcgtggttgaagactttgacattttagaatatctgattgagcctctttctaagattccaaatatttatttacaccagattgacaaaaatttgataggcctatctcgcgatatttttgaaaatatgtataaattgattaacgattacaacaccggtgaagctcaaaagaattttagtgaagaatactttaccatgaacacggttacacaactgccaactttctttatgttcaaagatggcgacttcgtatcacatgtttaccccggttattcgacaacagaaatgagaaatgtcgaggaaattatgaaatgggtgcaaaagtattccaatcccttggcgacagaaatcacctcttctaatttgagggagtggatgtcattccaaactgaaagttacagtaatttagccattcaattagtaagtactggtagtggtaagcaaattaagggaagtaatacacttatccgtaagcttcttctcgcgagcttcgattacgaacatgttcgtatggaaaataactttgaacaaataaatgaaaaaagaacgaagaaagctgacagtattaagctactaaaggagaaaaagacaccagccgacaaaattgttgataagatgcgtgaagaaattcctcatatagacaataagaaattattgttgggttatttagatctttccaaagagaaaaagttttttagaagatttggtataacgggagaccacaaggttggagatgtcattataattgacaaatcaaacaacttctattatacaaaagataattttggtaatactttaacggccaatgagcctctcttactaagagaggcatttgtctctctaaatattccatcgaaggccttgtacagctctaaaatgaaggggagattgatgaattctccattccacaacgcttttagcttcttagacatagtccatcagaacggcatttacggctatctttgtatcattattttgattatcataatccttaaaagcccctctttttacagaaaatataaagtaaggaggaactataattcgaagagaaatgcagtcggcatcttagggaacttagagaagaagcaaaatcaagactag

SEQ ID NO: 1287 - DNA, 2841 bp, Saccharomyces pastorianus
atgaaactgttcatcggtagaaaaacacgttcggttgtcatctcttccaataattactgtttatcgtttcaacgactgcgcagcataccaggagccagttcccagcagcgtcaactaagtaaaaatcctagcgtaactataaaatctttccctgatacagacctctcaaatgataataactatatcgaagtcaaaagctgcatattcaatgggttatttgggctcgtgtgtctcaatggtgatatatatgtcgccgttatatctggtgtccagaatgttggatttcctagatggaaattagtagatcaccaagtaaggccgtcagagaacatttataaaatattagatgtcgatttttacagtttagaaaatgacgtttttgattacctcttttatgaaaggtcagaacaaaactacgataaattgatccacgaacatccctgtggtcccttgaagaaactgtttagtgatggaacattttattattctagagatttcgacatctcaaacatcgtaaaaaaccacggttcatcacataacttggaatacactgtggataaccaagatttatccttcatttggaacgctaatttggctagtgaggttatcaattggagaagtaaaatttcgaatgaagagaaacaactctttgcaaatgcgggtttcttaacgtttgttattcgaggttattgcaagacagcgttaatagaaaacggcccaaatacagcctccataactatcatttccaggatctcaactgaaggtaagcaggatacgctcgaattagagggcattagtgaagacggaaagatttccttgtttgtcgaaactgaaattgtggtaaccacagaaaagttcattttttcctacactcaagtaaacggaagcattcctcttttttgggaatctgtggaaagtcagctgttgtatgggaggaaaatcaagataacgaaggatcctatcgaagctcaaggagcctttgacaggcattttgataatctaacatcaaagtacggtgtcgttagtattgttaatatcataaaaccgaaaagcgagtcacaagaaaagctagcactgacatacaaggattgcgctgaatcgaaaggaataaaaataacaaatatagaatacagctctagtgttctaacgaaatctccccataaactgctttatttgctaaaacaagatatttacgagttcggcgcctttgcgtatgatatctccaggggcatctattttgcaaaacaaacgggtgtgataagaataagtgcatttgattcaattgaaaaacccaacacagttgaaaggttagtgagcaaggaagtccttgagttgactaccaatgaaatcgatgtatttgagcttacttctctattcttagatgcccatgataagctgtggtcagaaaactattactggcttgatcgaacatacaccaagcatacaaagagttctggaaagtacacgaaagtttattcgaaattgtttggttcacgagttagattatacgatccgctacacatctacatctctcagcacttaaagcaactaaggacaaaatatacctttgagaaagatatctcaatatttgcagggacatttaacataagtgggaaaatccctaaagatgatataaaggattggatttttccaaagtcaatgtctacggatgatgaaatggctgatctttatgtgataggattggaagaggtggtggaacttacccctggccacatccttgctacggatccatacgtccgccaattttgggaaaagaagatactgactttattaaatgggcctggacgtaaaaagaaatatgttcgtttatggagcacgcagttgggtggtattttgcttctcttattcatgaacgagacagaatattcgaaagtcaagcatatcgaaggggatgtaaaaaaaaccggctttggtgggatggcttcgaataaaggagccgtcgcagtcagtttcaaatattccgctacaaagttttgcgtactggtgtcacatttagcggcagggttagaaaatgttgaacagagacacaatgactataaaacaatcgcaaaaagcattcgattttcaagaggactacgaataaaggaccatgacgcaattatttggatgggtgatttcaattacaggatattgatgtcaaatgaagatgttaggcgaaaaattgtttctaaagagtatgccggtttatttgaaaaagatcagcttaatcagcaaatgatagccggtgaatcattcccttatttctacgaaatggcaatcgatttcccgcctacctataaatttgatcctggtacaaaaaactatgataccagtgaaaaaatgaggataccagcttggactgaccggattctaagcagaggagaagtattaaaacaattggaatatagatgttgtgaagatatcgtgttttccgatcatcgaccagtatatgcaacattcagggccagagtgactatggttgatgaacaaaaaaagactactctgggtacacaaatctacgagagaattatggaaaaattagaagggttggatgatgatgagaaaattgcagttctaagtgatgacgcatttgttattgacagtattgagggcaacgatgcgatagctgggcctacgcactctccaacaccaattcctgaaccgaaaagaggcagaaaattaccaccacctagttcagacttgaaaaaatggtggatcgggaacgggaagcaggttaaagtggttcttgacgtggacccagaagtttatatgatcaacccagagagggatcccaacccttttatcgagaacgaggatgaaacgctttttatagaaagataa

SEQ ID NO: 1288 - DNA, 2991 bp, Saccharomyces pastorianus
atggctagtgcaggtgattgctttagtgattttgaagacgatgaactagataagctgtatgaaaaggctatcaacaagaccgtccaagaaaccgtaataagacgagccgtaccggtccaaagagatctcaaaaacaacgttttgcctggtcagaaaagtgtatacgaagaaatacaaagagatgttagttttggccctacacatcatgagctgaatcatgatgctttatctttttacgtgtatcctacaaattatgagctaagagattaccagtacaccattgtttataaatcattgttgcaaaacacgttatgtgccattccaacaggtttgggtaagacattcatagccagtactgtaatgttaaattatttccgttggactaaaaccgcaaaaattattttcactgctcccacaagacccctggtggctcagcaaatcaaggcgtgcttgggtataacaggcataccttcagatcaaactgccattttactggacaaaagtaggaaaaatagagaagaaatttgggctaataagagggttttcttcactacaccacaagtggtggaaaacgatttgaaaaggggtgtattggaccccaaggatattgtgtgtcttgtcattgatgaagctcacagagccactggttcctatgcctatacgaatgtggttaagttcatagacagatttaattcatcatataggctattggcattgaccgccaccccgggttctgatctggaaggtgtacaagaagtggtcaataatctagatatttccaagattgaaattagaactgaagagagtatggatattgtcaaatacatgaaaaaaaaaacaaaggaaaaggtcgaagtaccgcttatattagaaattgaagatataattgaacaattgggtatagcagtcaaacctgtgcttcgacaagcagtggaactgggcattcacgaagaatgtgacccttcacagataaatgcctttaaggccatgcagcaaagtcaaaaaatcattgctaaccccaccatacctgaaggaattaaatggaggaatttttatattttgcagcttttaaataatgttgggcaaatgttgaagagattgaaaatttacggtataaggacatttttcaactattttcaaaataaatgtatggaattcactacgaaatataacctaaaaaaatctactaataaaactgcggctgaattctactaccatccaattttgaagaatattaaaaagcaatgtgagcattatctaaatgatccgaaatttgtgggccatggtaaactacaatgcgtcaaagatgaattaatggaatttttccaagagagaggttccgactcaagggttattatttttacagaattgagagaaagtgcacttgaaattgtcaaattcatagactctataactgacgatcgaatcaggcctcatatttttattggacaagctcgtgcaaaggaaggttttgatgaagtcaaatatacaaggaaacatgcgccaaaggggaggaagaaggccgaaaggttaaaaaggcaagaagaagatgaatccttggaagctcaacgacgtaagaatgtggataatgataaatttgaaagaagtgcaagacggacggggagctcggaagaagcacagattagtgggatgaaccaaaaaatgcaaaaggaagttatccataattttaaaaaaggtgaatataacgtcctagtttgtacttctattggtgaggaaggtttagatattggtgaagttgatttaatcatttgctatgatactacaagtagtccaatcaaaaatatccagcgtatgggcagaaccggtagaaaacgagatggtaaaatagtattactgtttagtagcaacgaatcatacaaatttgagcgagctatggaagattattcaagtcttcaaggactgatatctaaacagtgcattgattacaaaaaatcagatcgaataatccctgaagatatcattcctgaatgtcggaagaccctcattacgattaatgatgaggacgaagtaattaatgaaatggaggatgttgatgacgttattcgttatgctactcagtgtatgatgggcaaaaagccgaaggcaaaaaagactataataaggaaaaagaaggttaatgaaattaaaaataagaaaaaatttttcatgcctgataatgttgaaacaaatattgttagtgcaagcagtctactcaataagtttgtagtggacaaaagtggtgagaaacaactagtaacaaagaaagaaaacactaataaaaaaagaagagttttcaaagctttagatggtttagagaatgattcaacagaggaagcttcttcttctctggaaactgaggatgaagaaatgagtgataaggatgatgatatgttcatcgccaatgttcaaaacctagccccaaaaaaactaaaacttaccactaactatgataggaagattatagcacaatctaaagatccttctaattttgataatcctagtatggctacatttgtgaacggtcacagtttcccaatgaaaagtgacaaggaactgaaaattccagatttgaaagatattaaagagcagacgcatgctcttaacagcaccggtgacaagaacaaccttgcattgaattcagatgaaaaggatttattcagggatcactatgtaccagaaggcgcttcttttgatgttgagccaaatcttctacagtttaataaggaggccaacgtgccacactgccagaaggtttccggggtcatctcattgttcgatgatgagaggaatgatgataagaagagaacaattgagatgaactacaccaaatgtttggcgagaaacatggtacgagacatgcaaaaggcctcagaagcccaaaataagagtcagacagaaaatagtaacagtatcagctatgaatcatctcagtctttgactttatcgaatgcagaattggatgatatactaggttcagattcggatttttaa

SEQ ID NO: 1289 - DNA, 1296 bp, Saccharomyces pastorianus
atggtcgttgacactgaatattacgatttgttaggcgtatctactacggcgtccgccatagaaatcaaaaaagcttacaggaagaaatctattcaagagcatccagataagaaccctaatgatcctaaggctaccgaaaggtttcaagctatctctgaagcttatcaggttttaggtgacaacgagcttcgtgtgaaatatgataaatatggaagaaaagaagctataccccaaggtgggtttgaagatgcagccgagcaattctctgtcatcttcggtggagatgcctttgcctcttatattggtgaactaatgctactgaagaatttacagaagactgaggaattaagtgccgctgatgaagccgaaaaggagaaggaaaatacagaaccaaaggatgaatctacagaaagcaataaaacggatgctgatgccgcttcccttcctgagccaacaacagctaataacaatgaaagcaacaataaggcaaagggaaatcctagtgacctgagtgtacacgacggtagcaaaaaagatgagcaagtaggaacagagacaaagaaaaaaaagacaaaactagagcaatttgaagaagaacaagaattagaaaagcaaaagaggatagaacaattgagtaaaacgttaattgagaaattatcgatactaacagaaagtgtctatgatgatgcttgtaaagattctttcaaaagaaaattcgaggaagaggcaaatcttttaaaaatggaatcttttggtctagacattttacatacaataggtgacgtctattacggaaaggctgaaattttccttgcgtctcagaacttattcgggatgggcggtatattccactctatgaaagcaaaagggggtgtctttatggatacattgagaaccgtttcggcagccatagatgcacaaaatactatgaaggagctcgaaaagatgaaagaggcgagtacgaatgataaacctttgttagacaaagacggaaatgagcaggtaaaaccaactaccgaagaattagcacaacaagagcagctgttaatgggcaaagtattatcagctgcttggcatggttctaagtacgaaataacatccactttacgcggtgtctgtaacaaagtattagaagatgactcggtgggtaaaaaaacactaatcagaagggcagaagcaatgaagctattgggcgaagtcttcaagaagactttcaggacaaaagttgaacaagaagaagcacaaatttttgaagagcttgttgcagaagctacaaaaaagaaaaaacatacctaa

SEQ ID NO: 1290 - DNA, 4473 bp, Saccharomyces pastorianus
atgtataatccgtaccagcaacagggcatgggctaccagcagcagcagcagcaaccgacggggttctacccgcaacagcagcaaggccaacccgcaaatcaagcccagggccagccccaaccacagcagcaaatggggtttaaccaacctcaggccactggatttagtgccttgcagcaaaactttggcaactccttcgctgatacgccacagcaggcacaaactggttacaacaataacggtaataacggcaatgtgtatggcaacaacagttttggccaacagcctcaacagcaacaacagcaacaacagcaagtgcaaccgcaacacacgggatacgctcccaatgcaaacatgagtgctggtgtgcctatgattaacactccgggctcaataccgccacctcatccggcccaacaacctcagttacaatccatgcagcctcaaggtacaggctactatcagcaagtcaatgcggcaaatgcgcaacctttacaatctcaaggaacaggttactatgtgtctacaccgaatttggtttcttctaaccaggctcagcaacctcttcaagctcagggtactggttacttccaatcccagccccaacaagccccccctcctcctccgcgagctcagcctttgcaacctttgaagccacagcaaactgggttttacgttcagcctcaaaatcaaactcccttagagccattgaagcccactgcaactgggtttgttaactcatttgccaataatggtttaaacaatgacatcaagatccctgctatgaggttgtcctttatcactgcacaggatcaggccaagttcgagactttgttcagatcaattgtcaccaacggttccaatactgttaatggcgctaactgcagaaaaattttgatgagatccggtttaccaccatcccaactggcaaaaatatggactctctgtgatacatcaagagcgggtgaattattgttccctgaatttgcattggccatgcatttgatcaacgatgtcctgcaaggtgattctattccttatgaactagactccaagacaaagaacgaggtttcaagtttcattgacgccatcaatctaagtattgcaaaccaagattttgtggccaaagatgctccaaaaacaccttttgacgaattcattaccgcaggcgtgcagaatttgcaaccccaaccaacaggtttcatgcctcaaactagttttggcattcccttacaatctcaaatgactggtggtgcccccatgttgaatcctcaatctactggaatgatggcacccactacgtttaatatgtcaatgaacaccggcgccccaggattgaccactcaaataacgggtggagcgcccatccctatgcagcctaccattactggtaacgctttacaacctcaagtcactggcatgatgccacaaacttcgtttggtgttaacttaggaccacagctaactggtggcgccttgcaatctcaatatactggaggatatggttctgtaatgcctcaacagcccaataatgcaactatgcccagcttatcttttaaccaacaaggaattcagtctcaggcaacagggttacaacctcaaccaactggcttcctgccaccatccaatttcaacgctaccatgccactaaccgctcaaaaaacagggtttgggaataatgaaatttatacacaatcaaatttcggtagtaatttaatcgataactcaagccaagagaaaatttcgagtgaagaaaaatctttattctataaaatttttgaaacgtttgatacccaaaacagaggtctattggattctcccaccgctgtggaaatttttagaaaatctggtttaaaccgcgctgatttggaattgatctggaacctatgtgatataaacaacactggccaattgaacaaacaagaatttgcactaggtatgcatttggtttatggtaaattaagcggaaaacccatccctagtagattacctgcaagtttgatcccttccagcacaaaacttttggataatctcaaaaaccaattaaagactgaaccaggtactgcaaaagaaaggccttcattcgggaaaactgatgccttgagttacaagaacaatgatgaagatgatgttttgccaaactacagaaatcgtagaaaggtttactctgcaaagaatgaagaacagtcctcttcttctttgactgataaagtggagaagcacattagtacttctcaaagtaatgatttttcagaagacaaactagtcaaaaagcagccagtcaaaccaaagtatgctgggtactcaagagatattaacttgaagagtattgccgcactggaatatgaaatcaaaaatagtaagagtctaaaaacctcttatgatagttctattccatctgatttgacaaaccgttttgacaccattattgctaaacttccaaacttattcaatgaaatttccacaattgacaacgaaattactaatgcgaaaatccagttgtataggaaaaagaatccatcgtcaatagttggatccggtccgaatggtgagataaccgaaaacgacaggaagaaagctaagagtagagctttgttgagagcaagaatgtctgctttaaccggtaaatctacaggacccgatgattcaatttccattgaagatgatcaacaaagcactgaaatcaataaaattcagcaagaaaatggtaagaaccaagaaattatcagggacataagatcatcgatttcggatatttcagcctctttaaaatccacaatgacaggatcagaaatgacttccaatcaagactttgaaaagtgggaattcggtattggattagaagatagtgtccgtgaattattggatgacctaaagtcaaattccgataaacaagtgggagaatcgtctccattcgtaccttcaccagcgccaacacctgtggacgatcgttcttcgtcaccttcttattcgcaattcaagacttctgaagaaagagcagcgcatttgaaagaacaagcaaaaaagagaatgaaggaaaaattagccaagttcgataagaacagaaggagtacaactcagcgttctaggtctactgtacatgaaagttctcaagggcatccacaacagattgcaagtgtttccgattcagttcaagctagtaaaactccattcaaagaagaagagaatatagaatccactcaaccaactcaacctgctcaacctgctcaaccctctcacttttctcagcctgctcaattttctcaacctgctcaattttctcaacctgctcaattttctcaacctgctcagcctgctcaacctgctcaacctgctcaacctgctcaacctgctcaacctgctcgtaatgtaaagcaagaatcagatgatgacgatgaagatgaagaagagagacgtttacacgaagaactgaaacgattaaagcttaagaaaaaaactgagaaagagaaaagactagcagctttacgtaagcaaattgaggatgctcagaatgaaagcgatgaagaaaaggaaagttcgaaatccaaccctagtggcccttcaaatattccgcaagtcgcacaaatttcatcacaagaacagcagctaggtaatggttctaccacaggcaatgctgccggttcctctgcggtcaatataactactacgggtttgtcttctacgcctaagggacataatccatactttaaggatacctcagctagctctacatctaccttcgatgctcaggctgcagaaatgcaaagaagaattcaaagagggttggatgaggatgaggatgacggatggtctgatgatgacattaacggagccgcgaaggctaacatcggacaagcaagcgctcttccatccaaccaaacacaatctgcttctgttgcacctactccaccaatgccaacagccgctcctattttagctactccaccaattccacaaacttcctctattccatctgctgctcctatcgcacaagtactttctgctcccccaaccaggccacttgaagcaaatggctataatgaaactggcagtcccattccggtagctcctatcttacctggtgctgttcaagagccacctatcccattggcccctcccttacccagtgtcaatgaaccccaaggaccatcaattccattagctccgccattacctaatggtgtacaaaaattgaacgcatctaccccggcactggccggaagtgttttacctcctcctccttccttgccagcccaacaaatttcccgttctgaacctactatcgatattaataatagagatgaccttggagggaatatgggtgcatatggtcccgattccgatgatgatgttttatcaatccctgaatcggtcggctcagacgatgaagaaaaggatgccccaccaattccaactgcaagcattccaccaattccagcctcaggtatcccaccacctccacctttaccgtga

SEQ ID NO: 1291 - DNA, 2292 bp, Saccharomyces pastorianus
atgcctgccaaaatacatatttcagtcaacggtgagttttgcgataaagaaggtaacgtgatccaattgcgaggagtcaatttggatccgtcgattaagattcccgccaaaccgtttttgtcgatccatactcccatcgtggacggcaaatatttcgaagatgctgataaagtcagtttcatcaatcatcccttagttttagaagatgtggaagaacacattatcagattgaagtctttggggtataataccatccgtttgccctttacttgggaatcgctcgagcacgcaggtccaggacagtacgattatgactatatggactatatcgtggaggtactaaccagaataaacagcgccgaacaaggaatgtacgtttacttggatcctcatcaggacgtttggtctaggttcagcggtggatctggtgcgccactatggacgcttcactgcgcaggtttccagcctgcaaactttcaggctactgaagcagcaatattacataactactacatcgacccaaaaacaggcagagaaatcggcaaagacgaagagtcataccctaaaatggtttggcccaccaactatttcaaattggcgtgtcaaacaatgttcacgttattctttggtgggaagcagtttgctcccaagtgcataatcaatggagaaaatatacaagactatttgcaagggaagttcaatgatgccatcatgacgctgtatgcgagaataaaagataaagctcctgagttatttgacaacaactgcataatcggattagagtctgtaaacgaaccgaactgcggttacatgggggaagcaaatcttgatgtaattccgaaagagagaaacttgaagttagggagaacccccacggcatttcaaagtttcattctgggtgaaggcattaagtgtactgtggaccaatataaaagaacatttttcgggttcactaagggaaaaccgtgcactgtcaaccctggcggcaagaaggcttggttgagtgcgcaggaaagaggtacaatagatgcgaaatacaactgggaaagaaatcctgaatgggagcccgaaacgtgcatttggaaactgcatggcgtctgggaaaatcatcgaagtaggggccccgtcttactcaaaccaaattattttggtcaagccaatgaaacggttttcattaataaccatttcgttgagtattataccaagacgtataacaagttcagggccattgataaagaatcattcgtttttctgcaacaaccagtaatgaaactgccacctaatttgcaaaattctactctcttggacgataggacagtatgtgcatgccatttttatgacgggatgacactaatgtataaaacgtggaataaaagaatcggcatagacacatatggtctggtgaataaaaaatattcaaaccctgcctttgctgtggttcttggtgaaaataacatacggaaatgtattagaaaacaattagcagagatgaaaaaagacgctaaatctatgcttggtgaaagggtgcctgtctttttcactgaaattggtataccatttgacatggatgacaagaaggcatacactactaatgattattcttcccaaattggtgctctggatgctcttgggtttgcgttggaaggaagcaatctttcgtacacattgtggtgttattgcagtaccaattcgcatgaatggggggacaattggaacaatgaagatttctccatttggtccccagacgacaaactgctgtaccgtgaaaatcgatcaaagacaccaacacgggcaccatctccaacgtccacaacggattccatatctacctccaaatcaaaactaaattcctcctcacaaccgccaagttttataaagcttgaaagtaacttggacttggatagcccatcatgcagtctagagacagacttgtcagggtacagggctcttgacgcaattatgagaccattcccgataaagatacacgggacgtttgaatttgctgagtttaatttacataacagaacatacattttgaaaatagtcggtaaaacgggaatgacgacggccactacacacatattcttaccacgtcatcattttgcacttaaccgtttatcaatacgctcgtcatcaggccaatacacttacaatgcagactaccaagttcttgaatggtttcatgaacctggtcatcagtacattgaaatatgtttaaaatccaaatctaggagcagtaccccagttagcgatgattcaaacgacttgccggcggattgcattattagctaa

SEQ ID NO: 1292 - DNA, 1236 bp, Saccharomyces pastorianus
atggtcgagtcagtgaaggcaaatgggccaagttcctcggacatggagtactattacaagtctctctacccgttcaagcatattttcaattggttgaaccattcgcctaaaccctctagggatatgatcaatagggagttcgccatggctttcagatcaggtgcttacaagagatacaactccttcaattctgtgcaagagttcaaagcgcagattgaaaaaggcaacccagacagattcgaaataggtgccatatacaataaaccgccaagggaacgtgatacccttctgaaaagcgaattgaggcccctggagaaggagttggtgttcgatattgatatggacgattacgatgctttcaggacatgctgttccggggcccaagtttgctttaagtgttggaaatttatatctttggcaatgaaaataatgaatacggctctgacggaagattttggctacaagaactttatttggatcttttcgggtagacgtggtgcccattgttgggtaagtgacaaacgtgctcgggccctaacggatatacagagaagaaatgtcttggattacgttaacgtcgtcagagatagaaatactgataagaggctagctttgaagagaccttaccaccctcacctcgctcgttcgttggaccagttgaaacccttctttgtcagcatcatgctcgaagagcaaaacccttggcaagatgaccagcatgccattcaaactttattgcctgcattatatgataaacaactgatcgaatcattaagaaagtattggttggagaaccctgggaggtcaagcaaagaaaaatggaatgatatagatcaggtggccacgtctctttttaaaggacccaagcaagactctcatatagcaaggttgcgtgagtgtaaggaagatcttgtattaatgaccttataccctaaactggatgtggaagtcacaaagcaaacaatacatttactgaaggcacccttctgtattcatcctgctacagggaacgtctgtgtgcccattgatgaatcgtttactccagaaaaggcgccgaaattgattgctttacaaactgaaatggaaaaaaataatgacgtttcactaacctctttgcaaccttttatcgatcaatttcacacgtacgtgaattctcttttgaaaagtgaactgggttcagttaaaagagaacgtgacgatgatgaagataatgaatcggcttccttagatttctga

SEQ ID NO: 1293 - DNA, 336 bp, Saccharomyces pastorianus
atgactgaaccagcaagaaaaaagcagaagactgatcgcgatcctcaccgtattgcgaccgaacgtgtagcggaacccaagaacacgctatatgtgagccagctgaatgaaaagatcaacacacaacggctgcgaatgaacctgttcctgctgttttccacatttggagaagtgttaaaagtaagcataaacttcaagaaacagcgaggccaggcctttattacattgaggaccatcgaccaggccagtttggctcagatttcattgaacgacgagttgttctttggtaaacctttaagagtggaattcagcaagagtgaaacaaagacgctataa

SEQ ID NO: 1294 - DNA, 1680 bp, Saccharomyces pastorianus
atgagtctggaacccacgcagacgattcctggcacgtcgccgatgttgcaccaaagaacgcacaaacacgtttacccattgcggatggaaactatcccgatttcagaaccagattccaaggccaaaatgcaaagcaacgggccttccgaagaggacgaagaagagggccagtattttgaaggcaagcaatccgtgtcgaatctgagtcccgatctgaagttcaaaagacacaagaataaacatactcaggggtttcctactctgggtgaaagattagataacctgcaagatatcaagaaggcgaaaagggtggagaatttcaattcttctgcaccattgggggaagagaaccatgggaatgggaatggggacgttaacgcaagtgcgatgcccgctccatatatgccttattattattactaccaccccatgaatgctcctgcgccaggaatgatggcatatcctgggtcgccaatgcattctatgatgcctaattcttcactacagcctttttattcacaaccgagtgccgccggcggtcccgatatgaccactccccagaacttgtcttcatcgcaacaattgctgcctgcaccacagctgtttccctatggatcgttccatcaacaacaacagccacaatacattcaacggacaagagaaagaaaaagatcaattggcactcaaagaggtagaaggttatcgatgttggcctcccaaggtaatggcgggagcactattatatctccacataaggacgttcctgaagaagacttctacaccgtggtggggaatgcgtccttctttggtaaaaatttacaaatacgacagcttttcaattggtgtttaatcagatcgcttcataaactggaagcgaaggccaaaggcacagaagaggaagcagaaccggagcatctaaccaaaaaacccaagcccgaaccagttaaggacaaaacaagttacgtggatcccaaacgtatggccatggtcatactaaaggagtttgtcgatgacttgaaaaaagatcacattgccatagattgggaagacgaagaaaaagatgaagatgaagaaaaagcgttagatgatactgaaaactacgatgacactgaactacgacagctgtttcaagaaaacgacgacgacgacgacgacgaagatctggactattcagagatacaaagttctaggcgtaaacttaatgaaaggagaaaagcagtactgaatgaaccaaggaaactactacctaatggcaagaacgtggaaaataccaaaaatttgaatctattggtcggcaaggtgtacgccataaaaaacgaagtcaaagaatgggctactacactagacacctcgagaccggatcttgaatggcaagaattaacttcactatcatcacaaccgcatgaaccagctttggacaaggaggactcacaactcacgtttgcagatattgaggcaaagttaggcacaaaagtcgatgaattaaggtaccagtcacacatattgaactcacattcattagccttaagcgaaataacgacctccaagctgaaaaaattgaacgtggaaactatgaacaaaatttctaacgaaacggacgatgaccattcgcaagctattaactctcaacaattactgaaggggttaagtctatcatttggaagaaaactggatatataa

SEQ ID NO: 1295 - DNA, 357 bp, Saccharomyces pastorianus
atgtccactaggcttccaaccgtgatttcaaatggaacagcgtttaaaaaaatccccgtgcaactgttgctgaatagcgggtctacagcaccaactgctttccctgactctattccagcccgcccaagaaccggtatcactaggacttgcgggcaatgcggggaaatcaaaacttcactgcagtggagggagggccccaatggtgccgcctgcttgtgcaatgcatgcggattgttctttagaaaactaacgttgcggttcggtagagcagcggctaaaacatacatggagcaaatcaagggaacggccgccaagagaagaatccccaaggaactcaccggaacggtcagattttaa

SEQ ID NO: 1296 - DNA, 504 bp, Saccharomyces pastorianus
atgaatttgagatcggaattgcagaagctgttgaacgtatgctttttgtttgcgtctgcctacatgttttggcagggcttagccattgctaccaacagcgcttcacccatcgtggttgttctttcaggctccatggaaccggctttccaaagaggtgacatccttttcctatggaatagaaacactctgagccaagtcggtgatatcgtggtgtatgaagtcgagggaaaacagatccccattgtgcatagagttttgagacagcacaacgatcatgcggataaacagtaccttttgactaaaggtgacaacaatgccggcaacgatatttcattgtacgccaacaagagaatctatctgaataaatcaaaggaaatcgtgggaaccgttaagggctacttcccacaattggggtacattacgatttggatcagcgagaatcagtacgcaaagtttgcattgttaggtatactggggttgagcgctctactgggcggtgaatag

SEQ ID NO: 1297 - DNA, 1911 bp, Saccharomyces pastorianus
atggctagcgacgctctaagtgctattttcagcaatcagtcgaaaaagaatgttcagcccatcacatccattgtatcatacactaataacaatgaaaatgatataatagacgtcgaaaacgggaagtttagaaagaacaaaaacgtcagcactaaagtctatgacgacaattcatcgatagaagaggacgagattgaccccttgcctgagacaaattccttttggagcaagatatactacgattaccttgtattggataagacaacgttgaacgtttcgctcaaggaatccttcttatataacagagatttaaacccggttgaagaagagagaagatgctggtcctggttcaattatttatacttctggttggcagactgtttcaacatcaacacatggcaaattgcaggtacaggtcttcaactaggtctgaattggtggcaatgttggctcacggtttggattggttacactttcgcagcagtgtttgttgtgctgaattcgagatttggttccgcataccatttgtctttccctatcactgttagagcctcgttcggtattttcttttccatgtggccaattataaatcgtgttgtgatggctatagtgtggtatgcagtgcaagcgtggctaggtgctacgcctgttgcactgatgttgaagtctatctttggtaaggatctgcaagacagaattccaaaccattttgggtctccaaatagtactactttcgaattcatgtgtttcttcatattttgggtgatcagcataccgtttgtcctagtggctcctcataaaattagacatttgttcacagtgaaggcggctctgattccctttgccgcctttgggttcttgatttgggctttgaagaaatcaaatggtaaaatcgaactggggtcactaaatgattactcgcctcatggttccgaattttcttggatattcgtcagatctttgatggcctgtgtcgccaactttgctgctttgattataaatgctcctgattttggtagatttgccaaaaccccccaagcatctctgtggccgcaattggttgcaattccattattttttgctattacctgtttgatcggtataattgtcacttcagcaggttatcacttatacggagttaactattggtctcccgtggacgtccttggtcaatttttggaaactacgtatacaagaggtactagggcaggtgtgtttttaatttcttttgtgtttgccttagctcagttgggtacgaatatttcagccaattcgttggcatgtggtgccgatatgacagctttgtttccaagatatatcaatattagaagaggttctttattctgtgtggcaatggccctatgtatctgtccatggaacttaatggctacttcaagtaagtttactagtgctttgagtgcttatgcaatttttctttctagtattgctggtgtcatttgctcggactattttgtagtgagaagagggtatgtgaaactgacacatttattcctggcgcaggaaggctcttactatatgttcaataataagtacggcttcaattggagggcccttgttgcgtatctctgcggtatagcaccaaatttgcctggctttatcggtgacgtgggcgctccaaaaattacagtgtcacaaggtgcaatgaacatataccacttgggttatccagtggggttcttcattagtgctgtgatatacatcggactgtgttactttttcccagttcctggtactccagtagacaacattcttacagataaaggttggtttcaaagatgggcttacgttgaggatttcgaacaagattggaagaatgaactgcgtagagctgacttatgcgatgatacaatgagtatctgtgatataagcgatgaaaagatagtctactaa

SEQ ID NO: 1298 - DNA, 1032 bp, Saccharomyces pastorianus
atgaaattttttggtttagaggaagaaactaaattcaaagaagtaattacttcaaaaaataaggcggtggatgttatagggtccaaactaggtggtcaggtagtttctttctcagatgaatggtttgcttctgctgaaaacctgctcaagccaaccgtccccataagggatcctactagatttgtacactccggtgcttggtacgacggctgggagacacgaagacacaacgaagcggaatacgattgggttattattaagatgggagttgctgctgcccaaattataggtggtgaagttgacactgcatttttcaacggaaaccatgcaccattcgtatccatagaagcgctttatgacgaaggcgaagaaggtaatatagtggagaacgatccacgttgggttgaaattattgagaaatttgagtgtggtccttcacaaagacacttttttatcagaagtagcggccttactgaacaaaagtttacccatgttaaattgaaaatgtaccccgatggtggaattgccagatttaggttgtacggaaaagtcgcccctccagaatacaaaacagagggtcacataattgacctagcttatgtttgcaatggtgctgtagctttagactattcggatcagcactttggttcagccgataacttgttattgccaggccgaggccatgatatgtctgatggctgggaaacaaaaagatcaagacaaccaggccataccgattgggcaataattcaattgggcagagaatcttcattcattgaaaaaattatcgttgatacagcacactacaggggaaacttcccgcagtttatcagtgtgcaaggttgcttgaatgaaccagaatcgagtggtaacattaaccaaagaacatggataaacttagttgacaagtcaaagactgggcccgataaagaacatgtatacgaaataaataaaaatctaagaatatcccatgttaaactaacaattattccggatggcggagtcaaaagaataagagtttggggatactaa

SEQ ID NO: 1299 - DNA, 1665 bp, Saccharomyces pastorianus
atggtaaagataaacttggacaacactgccttgtacgcagacattgacaccacccctcaattcgagccctcgcagacttctgtagctgatattttaaccaaagatgctttggaatttattgttctgctacatagaaccttcaatgcaagacgcaaacaacttttagctaatagaggtactttacagtctaaattagattcctgtgaatatcaatttgacttcttaccggaaactgaacaaatcagaaatgaccccacttggcaaggtgctattcccgcccctggcttgatcaacagatccagtgagattacgggccctccgttgagaaatatgttggtcaacgccttgaatgcagaagtcacaacttacatgactgattttgaagattcttcgtctccaacgtgggaaaacatgatttatggtcaagttaatctttatgacgctatcagaaaccaaatcgacttcaagactccaagaaaggaatacaaattgaaggacgacatttcaaaattgcctactttgattgtcagacctcgtggctggcatatggtggagaaacatctttatgtggatgacgagccaatcagtgcatctgtatttgattttggtttgtacttctaccataatgctaaagagttgatcaaaatcggtaaggggccttacttctatttaccaaagatggaacatcacctagaagttaaattgtggaatgatatcttttgcgtcgctcaagattttatcggaatgcctcgtggtaccattagagccactgtgctgattgaaacgttgccagcagctttccaaatggaggagatcatttatcaagtgagacagcattccagtggtttgaattgtggtcgttgggattacatattttccacaataaagaaactaagaaatttgccccaacacgttttaccaaatagggatctggtgacgatgacttcgccctttatgaatgcttatgtgaaaagattaatcaatacgtgtcaccgcagaggtgtccatgcaatgggtggtatggctgcccaaattcctattaaggatgatccaaaggccaacgaaattgctatgaacaaggttcgtaacgataagattagagaaatgaaaaatgggcatgatggttcatgggtagcacaccctgcattggcaccaatttgtaatgaagtttttagcaacatgggtacagcgaatcaaatttacttcatcccagatgcaaatgttacatcatccgatttattgaatacaaacattaaagatgcggaagtcacaactgaagggataagagtaaatttagatatcggtttacaatatatggaagcctggttaagaggttctggttgcgtcccaattaatcacttgatggaagacgccgccaccgctgaagtgtcacgttgtcaattgtatcaatgggttaaacacggtgtcattctaagcgatactggtaaaagggtgactccggaggtaaccgcgaagatattagatgaggaggctacaaaactggcttcaacaagtcccgtaggtgaaaagaataagtttgccttagcagctaagtatttcttgcccgaagtcacgggtgaaatctttagtgatttcttgaccactttgctgtacgatgaaattattacaccaaatgccaagccgattgatttgagtaaattatag

SEQ ID NO: 1300 - DNA, 588 bp, Saccharomyces pastorianus
atggtgacgctgattgcagagccgttgacgatagattctttcaaggaatatgggacgataatctctccagaggaggaaatctcgaggttaggcagcctcgagaaaagtgccaaccatgggactgcaatcaagttgcttcaggtaagccgtgtggagaacgggtccagtagcggggttcccaattggaacttgtttcgttgcttcccgcaaccacacctgaacagagcgttcacacctgggtccactcggggggtccttcacaaggttgaagtccttgaaaagcacccgagtagttcgcaaacgttcgtgcccatgggtagaaattccgctgaagtggcatacttgatagtcgtggccaaagaaattgcgaacaagccagacttatctacggtaagggcatttacatgtttaggtggtcaggctgtgacctacggcttgggcatctggcatgctcccatgatagtgcttggcgtgcaagagcacttggactttgcagtcctgatttatgaaagtctggatcccgaataccctgagcgggactgtgtggaagaacactacggccacgctggcatccatatcaccgtctag

SEQ ID NO: 1301 - DNA, 3375 bp, Saccharomyces pastorianus
atgcaacagaacagcgaatttttaacagaggcaccggggaacgaccctcacatatctcaattgcacggcaatagcgtgttagaatcacaacttctggatgatttcttactgaacggatctcccatgtaccaagatgacagcatggcacatatcaacatcgacgaggctgctaatttccaaaatttcattaaaacagacgagacaggctcgcccaatttactatctttcgaagggcttggtaacagtactcatagcaaccaggacgtgtccactcccctggaggacgggatggaggacgggatggaggacgggatggaggatgacacggctccgaaggaggaggaagacgacgagaatgaagacaaggctttcgagagaaacgacgccggcggttccgctcatgacgacgttgtctttggcaggaaggaggcgatccagtctgtttatatcaatgctttagatttcgttaaagtgagtgaagatcaattgcctttgaaaatggaggtttcagggctaccacaggtatcccgagtcgaaaatcaacttaaattgaaggtgaaaatcacttcagagacaccgctaagccaaaatatggtctacttgcccagcgattccatctccagggaaaaattctatttgaagaaaaatattgacgagtactcacacgatttcaggaagaatttattgtatataaacgcgtttgttctttgcgccgttagcaacaggacgacaaatgtttgtacaaaatgtgtcaagagagagcaaaggagagccgctagaagaaaatcaggaatcgcagacaacctcctatggtgcaataatatcaacagaaggctagtcgtgtttaataacaagcaagttttccccataatgaaaaccttcgaaaatgttaaggagttcgaattaaccaccagattagtttgttactgcaggcatcacaaggcgaataacgggtttgtgatcttgttcaccttaaccgattggcaaaatcaacttttgggtaaatacacaacaacacccatcatgattacagatagaaaacctgcaaatatggacactaataaattcaataacactaccaccacttctagaaggcaattaacagaagaggaatctaccacagaatattactcaactgacactaaccagttgagcaaggacgatagtgtgccctttcaatacacctaccaccataacccatacgataatgatgctcaaatgaataatattccattgaaagacaaaaatgttccattccactattcaatcccgcagcaatccgatctattacagaataacaatctatcactgaacctttctctacccaatcagcatatcccgtcaccaacgtccatgagtgaagagggctcagagtcattcatttatcatcaccgtgataatgaaaatcccgtccgtaccatctctttgaccaacatcgagcaacaaagtcaactgaatcaaaggaaaagggcacgtaacaacctagaaaatgacataggcaaacccctgtttaaacattccttttcaaactcattcagtccagcaaataccatgaatccatccttacatgcaatgcaagacttttcagcaaaaaatagcaacaacaccttaccatcaatcaatcgtgtcattccttcacaaggcccaattaatggtggtatcgaagttactttactaggttgtaacttcaaagatgggctttctgttaaatttggtgccaaccttgccctttccacacaatgttggagtgagacgactatcgtcacttacttgcctcctgcagcctatgcaggtcaagtctttgtttcgattagtgacacaaataatgaaaacaatgctgataatcttcctcaggaaattgaaattaacgacaataaaaaggccatattcacctatgttgacgataccgatagacaactaatcgaactagctttacagattgtggggttaaagatgaatggtaagctagaggatgcaagaaatatcgccaaaagaattgttggtaatgactctcctgacagcggtgcaaatagtaatggcggctcaaagagcacaggaccatcaccaaatcagcataatgcgaccttgcacaccggtgttcgttattccgatgaagttttgattcaaaaagttataaaaccactaaacactaactcaaatatttccatttgtgattctttgggaagaaccttattacatcttgcatgcttaaaaaactactcgagcttagtatctacattgattaaaaaaggcgcccgtgtcgatgatatcgattcgtttgggttgaccccattacacttcgcatgcataagtggtgatcctaaaattatcaaaatgctattaaactgtaaagctaattatttactaagggcacacaatggattaacagcaaggcaagtatttatggccaaccacgttcacttaaaggaagatggaaaacaagagaacaagggcaatcacaagagaaataatctcattgtatataatgataactatatcagtgaagtgttgacgttgtttgaagtttttgaagatggaacaaaaattgacaacagcatagagacagacagtagttactctattagcaggaaatactcacaatccagtttcaattcaagcctgttagataacgaatcttttaacgaaaacttattcgagaatcaaagcatgataaattcagccctcacggaaactcaacatcctgtttttcaattatttgagaattcaagttattctgaatacgatcagagcgattttgaggaagacggtgatgaaaacctctttgttgccgatgaagtagaacaatacaggactgaacgtaaggaggaatcaagggaactttccgacattggaactaacattaatgactccactgaggacaacgggaacacgtcactctggaatagagttttaaaccgcattaatgatgatttacctaaatatgaggatttgttcccactatcttggggcaaagacgataaattgaaaactgtgaacccagaaaatgttgtagagcagtcctcatctaatgtggaaaactccgagaattcagaagaagaagattatgaggaagaggaggaatttttgaaaaagcaatttaacagattctttcaaaacaagcaaaacttccaaaatgataagatgttaatatttttctggattcccttgaccttgctgcttttaacgtcgtttatcatgtataaatttggcaatcaagacaactccatcaaccatataagtgagttgatttcagaatacttaagaattgctttagcaaagttcttattaggaaatgaaagaatgaaaactgcattcaggtcaaaattatcgaacctgcaaacaacaagaatgttgaatgacttaattgtaagttaa

SEQ ID NO: 1302 - DNA, 1122 bp, Saccharomyces pastorianus
atgcctgccgttaccttacacttaagagctgaaactaaacctctagaagcacgtgctgctttaacgcctaccacagtcaagaagctgatatccaaggacttcaaaatatacgtagaagacagcccacagtctactttcaacatcaatgaataccgtcaagcaggtgccatcatagtgcccgcaggttcatggaaaaccgctccacgcgacagaatcatcataggtttaaaggaaatgcctgaaacagatactttccccctagtgcacgagcacgtccagtttgcccactgttataaagaccaggctggatggcaagatgtccttaacaggtttatcaagggccacggtactctatacgatctggaatttttggaaaatgaccaaggcagaagagtcgctgcctttggtttttatgccgggtttgcaggtgctgccctaggtgtaaaagattgggcattcaagcaaacacattctgacgatgaagatttgcccgcagtaaccccataccctaacgaaaaggctttggttaaagacattaccagggactacaaacaagctttggccacgggcgccagaaaaacaactgtcttgatcatcggcgctaaggggagatgtggctctggtgccattgatctcttgcacaaaatcggcgttcctgatgccaatatattgaaatgggatatgaaggaaacctcccgcggtggtccctttgaagaaattccacaagcagatattttcattaactgtatatatctatcaaaaccaattgcaccttttaccaacatggagaaactgaataaccctaacagaagactaaggactgtggtggacgtgtcagctgacaccaccaatcctcacaatcctatcccgatatacacggtggctactgtgttcaacgaacccactgtgctggtacccaccactgttgggcctaaattatctgtcatttccatcgatcatttgccctctttactaccaagagaagcttcagagtttttctcgcatgaccttctgccatctttagaactactgcctcaaaggagaactgctcctgtttgggttagagctaagaaactgttcgacaggcactgtgctcgcgctagaagatcttcaagactatag

SEQ ID NO: 1303 - DNA, 765 bp, Saccharomyces pastorianus
atgggcaaagtcatcttagttactggtgtctccagaggtattggtaagtcgatcgtcgacattctattcagcctggacaaggacactgtggtttacggtgtagccagatcagaggctccgctaaagaagttgaaggagacatatggtgacaggttcttctacgtcgttggggacattaccgacgactccgtgttgaagcaattggtgggcgacgctgtcaagggacacggtaagatcgactcgcttgtggccaacgctggtgtcttggagcccgtgcagaatgtcaacgacgtggacattaatgcttggaagaagctgtatgacgtcaattttttcagcattgtgtcgttagtttgcattgcgctgcctgagttgaagaagaccaacggtaacgtggttttcgtcagctcggacgcctccgacatgtacttcagctcttggggtgcgtacggctcctcgaaggccgctctgaaccactttgctatgacgttggccaacgaagaaaagcaggtcaaggccattgctgtggctcccggtatcgtggacacggagatgcagatcaacatcagagagaacgtggggccctcctccatgagcgcagagcaattgaagatgttcaaggaactgaaggatagcaaccagttgctggacagcactgtgccagccacggtttacgccaaactggccctgaacggcatcccagaaggtgctaatggacaatacctgagctataacgacactaccttgaaggacttcatgccataa

SEQ ID NO: 1304 - DNA, 492 bp, Saccharomyces pastorianus
atgtccgaattctataagctagctcctaccgacaagaagggtcaacccttcccttttgcccaattaaagggcaaagtggttcttatcgttaacgtcgcctccaagtgtgggttcaccccgcagtacaaggaactagaagccctgtataagcgttacagtgacgaagggtttactattatcgggtttccttgcaaccaattcggccaccaagagcctggttccgatgaagacatagctcagttctgccaattaaactacggtgtgactttccctgttttaaagaaaactgacgttaacggcaataacgaggacccggtctacaagtttttaaagagccagaagtccggtatgctgggcttgaaaggtatcaaatggaattttgagaaattcttggtcgataagaagggtaaagtttacgagagatactcttcgctaaccaagccttcgtccctgtctggtgccattgaagaactcttgaaagaggcagaataa

SEQ ID NO: 1305 - DNA, 1599 bp, Saccharomyces pastorianus
atgcagctgtttccttttctaccgttggctttatctttggcccattccctcgctgtttctggttcttctgtaagttcttatgtccagtttccggtccaaaagttggcaagcattccaaatatagccttgcagtatacatctggtatttttaagagaggcgaggcttctaattccacattggtacatgaaataggtctgtatgctgtcaaaatggagattggaactcctccccaaaccgtgtatcttcagttggataccggctcttcagatatgtatgttaatgacgctgatagcgcctactgcgaattgttgtctgatgggtcagactacgtctcaactgataattacgagctcacggcaacattcagcgagcttccttctagcacggtctcggcagaagtttataatactctctgctcctactggggtgcattcagccccagtaactcctccactttcaagtacaatgacactttttttgatgagacttatggcgatggtacgtattatgaaggtacgtatggaacagatgttgtctctttaggtgatattacgctaaagagtttctcttttggggtagccaataatacagaaaatcaaaacgggattctaggtatatcgcttcctgctggagaatatactgacgcacttgaaaatgcctataatataacaccttttgagtatagaaactttccaatggcattgaaaagctacggaaagatcgagaagatggcatattccttgtttttgaatgagcctgaagcacattttggcagcatcttgtttggtgctgtcgacaaaaataaatactcgggacagctctacacattacctatgctgcaggcattcaatacactcgactctctggggccaggaatgtttgtcactgcgcagagcgttgcaatttcggatggtttttctggaaacaaaactgtttctgagatccagttcccagtattgtttgattctggcacaacctattctactttacctacagaaatagcagattcgattggaaaattttttgacggaaagtacagctctgacgatcaaggttacatcgctgattgttcaaaaatgaataatactctattatctattgattttgggggatttaatatctctgcaaatatatctaatttcgtgacacggaccaaggatcactgtcttttaaatattgaagccacagattcgggattcgtgttaggggatgctttcctcgtcgacgcatatgtcgtctatgatttagaagactacgaagtttctattgctcaggctagctttaacagtcaaggggaagacattgaaattatctccaacagtattccaggtgctataccagcccctggatactccagcacatgggtgtatacaccagatagtcccataggaacaggagattttcttaatatgagctggacctcatattcagactattcggaataccaaactttactctctgctgcaactgcaagtagtagcagcagcagtagcagttcagaccaaacaactacgaaaaaacggaactccggtgacagaatacagcaatcatttttttccttttcgctaatacctcttctatcttacatccttttgtga

SEQ ID NO: 1306 - DNA, 711 bp, Saccharomyces pastorianus
atggcgaatttaaataaatttgggcaagaggttggtgcggacgtcgaaggctggacaacaagggccttcccagagaaagttgtattgaaaggtaacacctgtagactagaacctctagatagtgaaaaacacggctcggaactttttagtgcctataggaaagcaggccaagaattatggacatatgtaccagtgggaccattcaatgacttggaggaatacctaaaattcatcaaggaacttagtgaaactaaaaatattgtgcctttcgcaattattaatgaagagactgaacgcgccgttggtactttagccctaatgagaattgatcaagcaagcggttcgcttgaagttgggtatgtcattttttcgccagaattgcagaagacgattattgcaacagaagcccaatttcttctgatgaagtatgtatttgatgttttacaatacaggaggtatgagtggaagtgtgatagtttaaacgggccatctcgtagggcggcgatgcgtttgggatttaagtacgagggtacctttcgacaagcgatggtttataagggtcgaactagagacacccaatggttttcaataattgacaaagaatggatatacattcgtaaaacattcgagcaatggttagataaaggaaacttcgagaatggtagacagaagagagggttagctaatataagagaaaatctgctaagctga

SEQ ID NO: 1307 - DNA, 711 bp, Saccharomyces pastorianus
atggcgatcttaaacaaatttggacaagaagttggtgccgacgtcgaaggctggacaacaagggccttcccagagaaagttgtattgaaaggcaattactgtagactagaacccctcgatagagaaaagcatgggccagaactttttaatacctatggtaaagcgggcgaaaaattatggacgtatttacctgtgggaccattcaataacttggaggaatatttggaatttattaatgaacttaatgaaactaaagataccgtgcctttcgcaattattaatgaagagactaaacgtgctgttggtacattatgcctaataagaatcgatcaagccagcggttcacttgaagttgggtatgtggttttttcaccggaattacagaagacgattattgcaactgaagctcaattccttttgatgaaatatgtatttgatgatctacaatacaggcgatatgaatggaagtgtgatagtttgaatgggccatcaagcagggcggcaatgcgcttagggtttaaacatgagggtacgtttcgacaagtggtggtatataagggtcggactcgcgatactcaatggttttcaataatagacaaagaatgggtagacattcgcaaaacttttgagcaatggttagatgaaagtaattttgagaatggtaggcagaagagaggattagctacaataagagaaaaattgccaaactga

SEQ ID NO: 1308 - DNA, 597 bp, Saccharomyces pastorianus
atgaatgaatttaaaggtaccctgttatcaaaagggttatggctcaatgagccgaaagaagttacagaagacgcgggtaaacttagcttcaaaacggatgagaaatctgacttctggcgtgaaacctactatggatttacccgtgacagtggacatttcttaggaatgaagacagacaatgctttttctgcacaattacgggttcagggaagttacgagggcctatatgaccaggctggtataatggtacgtatagatgatagccactggctcaaagctggcatagaaatatctgatggtcaagcaatgctaagcagcgttctaacaaatgaaatatccgattggtcaactgctgtttatggcggaaatccttatgaattctggcttcggattaccgtcgaaaagggagttttaaggcttcaagtgtcttcagacaaaaagacatggccactggtacgtttagccccatttcctgtgtcagaccactatctagttggaccgatggcctgctcacctgaacgtgctgggttacaagtcaccttctcagaatgggatctcacatctcctttgagaaaagctttacatgatctaacttag

SEQ ID NO: 1309 - DNA, 2406 bp, Saccharomyces pastorianus
atgaccattattcacagggacgtcgactcggtagagtcgcagccctcaacatcgcggtcgccagccgtcgtcgccatccagataaaccagacagaagataagaaggacgatttcgtcaagaacatcgacgaggacgtcaacaatctcactgctactactgacgaggaggaccacgaccctgaaagccagaaatacgaccggcactccatccaggaggagggcctcgtttggaagggcgaccccacatacttgcccaactctccataccctgaggtgagatcggcggtgtccatccaggacgacccgaccatccgtctcaaccactggcggacttggttcttgaccacgatcttcgtggtggtgtttgcaggtgtcaatcagttcttctctctgagatatccatcgctcgagattaatttccttgtcgcacaggtcgtgtgctatcccataggaagaatgctggctctcctgcccgattggaagtgcaccagagtgcccttcttcgatttgaatccggggcccttcaccaagaaggagcacgccgtagtcaccattgccgtggcgctcacctcctccaccgcatatgcaatgtacattctcaacgcacaaggaagtttctacaacatgaaactgaacgtcggataccagttcttgttggtttggacctctcaaatgatcggctacggtgccgcgggcctgaccagaagatgggtcgtcaaccctgccagctccatctggcctcaaacgctaatttccgtgtcgttgttcgactcgttgcactccagagaggtcgaaaagtcagttgccaacggctggaagatgccccgttacaagttcttcttggtcattcttatcgggtcctttgtctggtattgggtgcccgggtttcttttcactgggctgtcatatttcaacgttgtcctttggggctccaagacaagacacaatttcatcgctaacacaatttttggtactcaaagtgggcttggtgccttaccaatcaccttcgactacactcaaatctctcaagccatgtccggttccgtgttcgccacacctttttacgtctccgccaacacttatgcatctgtgttaatttttttcgtcatcgttctaccatgtctgtattttaccaacacttggtacgccaaattcatgcccgttatttcaagttccacttatgacaacactcaaggcaagtacaacgtcacaaaaatcttgaacgaagactactccatcaacctcgagaagtacaaagaatactcgcctgttttcgtcccattttcgtatcttttgtcatacgctctgaattttgccgctgtcattgctgtctttgttcactgtatcctataccatggtaaagatatcgttggcaagtttaaagatcgtaaaaacggtggtgttgatattcacatgagaatctattccaaaaactataaagactgccccgattggtggtacttggtcttgcaaatcgtcatgataggtttagggtttgttgcagtttgttgtttcgacactaagttccctgcttgggcatttgttatcgcgatattgatttcccttgttaacttcattccacaaggtatcctggaagcgatgactaaccagcacgttggtttgaacattatcaccgaactaatatgtggttatatgttgcctttgagaccaatggcgaacttgctatttaaactatatgggtttattgtcatgagacaaggcctaaatttaagcagagatttgaaattggccatgtacatgaaagtgtcaccacgtttgatctttgccgttcaaatctatgccactatcatatccggtatggttaacgttggtgtccaagaatggatgatgcataatattgacggcttgtgtaccactgatcaaccaaacgggttcacttgtgccaatggtcgtacagttttcaattcctccatcatttggtctttacccaaatatcttttctcaccagggcgtatttataatccattgatgtggttcttcttgattggtttattattcccaatggtcgtctacgctgttcaatggaaatttcctaaatttaagtttgccaagcacattcatactcctgtctttttcacaggtccaggtaacatcccaccaagtactccctacaactactcgttatttttcgcaacatcattctgtctaaatatcataaggaaaagatggagaccttggttcaacaagtacaacttcgtgatgggagctggtgttgaggctggtgtcgcaatcgctgttgtcattatcttcttatgcgtacaatacccgggaggtaaactcagctggtgggggaacaacgtttggaaaagaacgtatgataatgattataagaaattttacaccttgaagaaaggtgagactttcggttatgataaatggtggtaa

SEQ ID NO: 1310 - DNA, 816 bp, Saccharomyces pastorianus
atgtctcgggttgcgcagctggacgcgatagcgcttgatagcgagttgtatggacagttctggtctgagttcaacgcggccgtcaacacggacggacacaaggaggagtgggagttggtgatgaattcactggtgtttgtgtgtgcgacaaggttcttgtcgcagcacggttccagccacacgtacgggtctgcgctgagcggtgtagctttccgatgcaggaaacgcaccttgtatgtggtgaccgtgctggctgggtacgtgtggaggaagatcacccactttgtgttcaatggttctcgtggtaggagccagatggcgtggctgaagctgtacaagtggctcaacgtggcctatcatggttgcggtgtgactaatttcgtgcggtttctggcggcggacggtgtcggggccaggtcgttcttgtcgcccgtgtatagaatgtttaatgtgtactcgacgagactggttcgtggcggctctgcatccgcctccgatttctactcgggctctgtgtttgctggattggaataccagaacagacagctgctgtggaacgcacttctggagctattttcaaaaacactgcttacgaagaggggcctcctgccctttgctaagagaccgcagagggtgcggtcgggcactgcatcccagacggtgtgcccccattgcgagcgtttcccgaccaatccataccagattgcttgctgccgggcgaactactgctatgtgtgcgtcgtgaaggcgctggaatggtctttgtgcgatgcgtgtggtgcttccaaggcactgactgctgcgccagtgtattga

SEQ ID NO: 1311 - DNA, 1962 bp, Saccharomyces pastorianus
atgtttctgcctcgtctcatttgtcacaggactgaaaggtttataacggttcccacctggatgttgcgacaaatcagccataacagcagggactcgctgcagaaacaggttctgttccttattagcacaaaggcgagtttgaataacgacgataagttgaaaatacgaaaatactggtccgaaatggcagactacaagaatcttcggaaacagagaaccgccttactggaaaactccatcctgcacaagatgaagatcgaagactttgttgagtttattaaccgcaccaaaagctcctctatgaccgcgagaggactgtatagaagagagtgtttgtaccagtgcaaggacgatctggctctggttaacgaagtggtcgcccaggtttcatcggcgaagcaactaaagccattagataccccgctggataccatgcgttggtccgtcgatgacgcctttagcacggcagacattgtcatggccgcagaccttttcctgttgtattacaaactatttacagataatgtccagccagacgagccatacgcaaggaaaatcatatcggcactagcatacccgaatccaatgcatgaccacgtccacctcgtgaaatatttggagatgaactcgttgtttgaaaaaagagtcggaaacggcataagattgaccagattccaattagaaactctttccaacaaagctctcggcttgagcgatgacgctcctcaattatgcaaggcaatactgaacaagttaatgaacataaactactttctgacggcagaatcaaagctacgagacgaccagattttattggcatacaagtccattgacgaaaactacagaagaggaaatgtggcaagcatatattctacatggaataagatcaaaggacactatgtctcgattactgcgcacgactcaagaatcatttataaagtcctgaagatttgtacacataatagagcttatagatctatatgtagcgaaattttttggcaattgactccggaatattactgtaacaaccctttactactacctgcaatcattgacttcatcacaaagcgagattctctgccgatggccaaagaactcatgcaaaacatcagcaggtacaccttgcctgagaaccatcatatcgtctggctaaacaagagatgcctctcctcattactaagaatgcatttgaaattcaacgattccaacggtgtagatagggttttgaagcaaataaccaccaactttaggtccttatcacaggaaaattatcaagcaattatcattcaccttttcaaaacacaaaatctcgatcatattgcaaaggcaattaaattattggacactataccacccaaacaagcgatgttggcctatggatcgattatcaacgaattagtagattggaagttagcttcaaaggttaaattcaccgataatttgatggccctcatcaatgaacttctgatgaaagctcatgattttgaccccgaacatagaagctccctttggaatgtcgtttcttccttatacatcaagaagctctgtcattataagaaacaggagggtaaatacgtcggcaatacagaggaggatattgacttggcaaaactattatatttgaatgcttcaaaaaaagaaaaaatccattggacaaagtcaaattgtaatccgttcatcatctccacaccaagtgatgttaaattgaaaataaataatcaaaacagattcgctatcttgaggaatattgcattaagcgccttacagacagaaagaatagatatttttctttgggcatgcgcagaattgtaccaaaatggtatgacgattgaggagctgagattggattggaatatcatgttaaaacatcaattaagaaattcagaatttaaaacaaacaaagaaattgtccaggatattaaaaaacatggtgtgtcatctattaagcgttacttaagataa

SEQ ID NO: 1312 - DNA, 6045 bp, Saccharomyces pastorianus
atgggaaatcagtctcttagagaactcatagaaacgtcaacagatcacggccatgacctgttaacgtggataactgccaatttggagaaggtgatatctttgaaggacgccagtgacgctgaattacaggaggttaaagacatacataaccaattggatgaatttataagatataccacaacattagaggatgcggatactttagagctgcactcggtgttcaccagcctgtctcagctttatgcaatgtccacacaatgtctaaaagacgaacatcctgggatggtattcgattcctctgcatttctgaccaatgtattatgtgaggaggatgtcttgatcgatgacgaaattaatgatcctaaccaaacgaaaaaaaaaaaaaaatcaacaatgaagaaaaagaagtatatatacacacctgcaaaagatattgcatgtaccgttttgattcaattatttgaaatttttggaagtgaagtttcatctttggtcccattgctgtttagtgcagtattcaaaaacttgaaaaagatcatggaaaagagtaaatatcaccatgcaacttttatgacgttactacttcaactgtttaatgcgatcctaagaaattctaataatgatgacaaaatcttagatccaactacatatgcaaaattctcaaagctatccaaaaccgttttcgacagtatttattcggatgaaaaggacttcccagtgagttttgtgtctgtactgatagaatgttgggtggctcatttcaaacaaacagcttttatcaaagagcatgctcatgatatcctagaaacaatatattctaaatttacggagggcgagataggggtttatggttttgccaacgataagacacgtctctctacggcaaagtctttagcggagatcttatttgattattacttctcaaaagagatcctaactttgcaagaagtatggtcgatttacgtgagaatttttctaaattctgacactcgagatgtgaaaagcggttgttttgaatctattatacattttattagtttaaatttacttgctgacaaaaccttcctgagtaactcaaaataccttgatacagtgctatctttaagtcagatctttagtgattacgaagtgaataataaaagcatgaacacattaacaaggtatttgaggtactttcaacatatgcatgaattcatattaccacatctgagtgacactgctaaaactcaagtgctatatcatatattaggttgttcggattcttacctgaattcctctaaaacggattcagcgaaaagcttaaagtacggcgttgatgttaagcctgacacacagtggcttacactagtacaactagatttgacgtatgttttaatacgcgatttgaactctacatttgccactgaggagtatactattaaagaaattagagataaactagttgaattggccacgtgtgaaatctttacaatccgtgttcacacaatggaaattttgagagttttcctcaataattgtccggagtatctttcggagactatagaaaactctctacatgcgttatccagtgatttcaaatcgactgaaaagtttgtcttttatagaaatcatggacatgcttttattatagcgaatttgattaaagacgccaagagcgactatatctcgtacgagctaattatgagaattacggttttctccacttcattcattaaaaacaataccacgtctacatcctccaatttatacttcaaaggtcttttatgctggatactattgatcggactaatgaattataaagatgaacaatatttgaaactacaaacatctcaattatttcttttctggaaagttttattaacgcacacttacacgtatcacgacgaggatgaattgtacaagaatttggaaataagaaaccacgccttgacctgtttattgacgtatttaagtaatacccaaattgacaaagatatggccaagcaagtatcatatttgttgactaaatgttccaatttcaaccattccgttgatttgaaatctaaaaacatcgacaacgcactattgcacaacgagaacaggatcctacaggtttacctcaaattagaaaagtacataagtggcgatttcaatagctcgttactaatattaatcgtaaagaatttctcagatcccaatctctatacagagtcaagctcttctggtttaagcaacctcaaacacattcgtaacaagaaggtggggaataaagacgatgtagaaaataacgccgtctcagaatcctcaataaattctttactccgtcaaaacaatggcttcgcctttggtctttctagtaagatagctagcgaccgtattgcaagtctgtcaatgtcccctgctaacaaatatgacgaatcaattagtggaaactggccatctaaggattacgattggtacaacattttcgagaaggaaatatcaaaaccaatttctccaattctatctctagactcattgatcctactatatggatccggatcttactcgcaaactgatcgttatgcacctcaggttactacatctctaatcgactcctctatggagctcttttcgtctgtatttccatttctgaatagtaaaatacagtactctgttatggaaactttaaacttgtcaatgttttccaagatgactaccccgttgagaagtgttgcaattgcggccaacgtttgtagtgcgttgcatagtgctttgtacattatgcaagaaagaagcttagagctggactacacagtggggcaattaattattgaatctatcaaaaaaattcagttttttaatgacacctttttaacaaaaatcaaagcagattgtatagggttacttacagccgctattgcacggacatataacgatgaagagaggcaaaggtttcttatagaacaatcaagaatattcattaaaaacgttgcagatatggaagagccatacttcagaatgtttcacgtgctatcgctggcaacaattttcaaatacaattcacaatacgcaaattttgaaacctcatttaatgtaatttttgcgctaacaaatgacccacatcctgtggtccattcttggtcattgaaggcaatgcacgttctccttgagaagcacttggttattgatctgaaaacaacatctatgctgctcaattttatggaagaggcgctgataaacgacagatatggtgcctacgggcgctccactcttcgctgcaactacaatagagaatttaattcacatgtggcaattggtgaaattttaaggactttagctgaaacggtgggcccaaactttctagagctgaatcctaaggttcttgattcgttcaggaatactactttatctttattgatttccaataacacactcaacaatatcattagcattaaaatattcgaaaatatggctacgttcaaaatgaaaagcattctaaactacggaatattcatttctttttctaagaatataattaaaaattcaatagttacaggaataggatccacatattttaactctacctttacaggctcaaatgaacttattccatgtacttcgagtttaaaaagcgctttcgaaaactttgattcattcacattattgtacaaattacaaatggaagaaatattcatgaaagggatggaaagtttaagctggagatatttggcgctttttccaaattctcgctctgtgaggagttactttaccgaatggatattgcatactcttgaagaagacagccattggttcgacaaattgtattcggttttcaatatgaatataggaagactatttcaaagttattacagggacgtgacagtgttattaaagctaaacggtctccaaaaatcttcagagaaagaaataaaaggtgaagaagaagaatcgatagctaacgttagccagatggccaatacagatacccacgatctcggctcagacagcattcaatggaagagcaaacaagttattttggatttgattttaacattgtgtttggaatccgaaaaacatgaaaaattacttgttgctttgagtaaaaagcttgcggatctcattgaaatctcattccgtggatctacagtcaggtgcgaggatatgaagttgacaggattacaaattttgaattttgtgctcaagaactactcatcaatgagagatcctcagattcctgaatcgtcgatattagaacaacaggaagctcaaataactagcgcgttgatgcctgcattcagtaaaggaagctcacctacggtaatatccttcgctatcactgttgccgctgaagtgctagcttccaatatcatgccacctactaaactaggaagaatttcccaactattgattgatcttttgcgcaatttgaaagattctacttccagcataaatgtaggtgaagctgtcattgttacgccaaaagcaaaacggaaaattgaacttgccgttttggacgcttgggcggaggtagtacaaaggtccatcacctcatcaaacgaagaactcgtctctttcacaaagaagtattggaatattttggttccattatggatcatttctcttcgcgaatacatgatgataaaatatgatgagaatgacgctacactggaattgaaaaatcaatcgaaagacaatacctttattgaattaagaagtacaaagattgaattatatgagccagtctggttaaattttgtagaggcacttggatgcacgcttgattcagacgttaacattattctaggatctcttgataacgaggaattggagtattttatttttgttttgtttagccaatgcttggaggctatcgtcaagaatattgatgaccattcaattaagatgcaggtcctacctgctttgcataatgttttaaaatgtaatttatgcaccaaacgtttatttgaagatgatataattgctgaagttgttgggataatggataggcttatttctacaggtgatagcaaagaagaatttttacttgttgatatcatcaacgacttgatcattggttatacaaaatgcaatactacacctgagacgtttctacaagatatcgacaaattatatgaattactgcggctgttaatgatgataatttcaaaaagactgccatttatcaagtataatgtgttagacagcaatgataacaataacgaaataaagctatccaccactgacattgatttgctgaaaaaaacgttcatcgcattcgagtcaaacattagtaagtttgacaatatgtttaagttagatctctattcctgtcttttattcatcatagggaagatttatgaatgcggtgatcgcgacttgataatcccaattatacttccgcttttcaaggcattggtaatggcacttacagactctgaggatgataaaaacattgcgttacttgaaattttttacgggtcaataaaggatgtgatttataataaactaaactcaaacaacaaaattgctaccattttaattttactgtccaacggatactccaatctaagcaatcaagaactgagtggctgcgcagatatcctattggaagcactaaacaactctactacacaacctattactttccaaggtttcaaaagaataatatcgaataccgctaaatactcgtcattacaatacttgatgaagttggtcataaagagatttttccaagatatccaagctaaagattctttatctctagcgaacattgaaatgaagctaataatacaattcacaggggaagtaattaagcaagataactcaaaagcgtcatcgtcaattgcgttatgtctttctttctttgtcagatatcatgaggcttatatgaacaaagtggacaaagaggttgcaaaggaaatcatggctctggccaaattggacaaaaattccttcaaaggtgctattgcaaatattttaaatcccgaacagaaagcaagtattgtttctttaatggatgcttatgctcagtcagaatctgtaggatctgtcgaagaaccctttcaattgaaatccttcaactaa

SEQ ID NO: 1313 - DNA, 2526 bp, Saccharomyces pastorianus
atggacggcctactaaaagttcccaaggtcgtcattaatattgcatcatttttgcccactacagattatttaagttttcaacaggtaaataaacaggttcatgattcagttcttcaaggtgagaatgattcaaagtactggtcgttgaagttaaccagaatgggccttcaaatggtccgctcgcacgacacagaagatagtaaattattgaacgacaatgataacgaggatcctatagcaatattcgaggtatacaaatctttcacttctcaagaatccaaaaaaatctttgcaaaattttaccattgttataattcatttgctaaaaaactgtacaacaacaacctagctaatttctttccaaattcatactccaacgatccattgaaacaaataaaaactctaaatttcatcaaacgctacaatttatcaaacagaaatgatctgaaaacatatagtaagatagatacgaactttaacatccttagagaaatctttataaactctgttctcaaagaaatggaattaaattaccagtccaacgatttagtcacagtggcgcgctttattaaagtcttactggtatcaaatgaggaaaacaatgctatcgaatttttcaaatcgaaagcagatttacctcctagtttaacagttttaccttccaatgacgaactgtttttgagagagcaaccccaaagaggggaagatagtaaaagtacagacatcattaatcctgagactttggacaaacttctcgacccattaagagactttcttaatgaaaagatcaaattagccgacatcctatttcaagaggaatttcctgtaattttacagttagttgaatcttttattcaggatgttttactggacattctaagtaacattctatcaaattatagcgggtttttgaaatcaaacgataaagattccaaggcaaattatgaatgtttaccacagctttattttacgtttataaagaaatttggtaccgaattaaatgattctgtcaacgcaggttcaacttttcgtaaggttgctgacgaatttttagacctgtatctggagccctttgttgtcaactatttaaatcagacaactagagtctttgaatcactgattagttcacagttagttaattacgatatccaatttcaagacaaagaacgagagcagaatgaaaaaatttataactctctgaaagatcaaacagatactacgagcacaaataataacgattcatcaaatagccattcaacaacaataatttcggcaactacaccagaagcagaaccaaagttaaagacaccaccacaatcggtgcactcaactaataacatatctgatgataaactggattttttaagttcctttactaagatcttcaaattttccaataacgaaaatcaaaaactaaaacaacaactacaattagcatataatttgaatttgatatctaataatctacaaaatattaaatcgctgataagtcttgacctttgttacaaaattctacacgagacaagcgaaaagacagatgaaatctatagatttcatacgatggaaaatttgttaccgttaattaagttgcgatgtcaagagatttttaaaattttgattacccaattgaataaaaatcacgttaaacctgcttttgagaaggcgattatgctactacaaaagtataatcccaatgagttagagcaaatagaaataaagtttgattcactttcaccgggaaatagtcgggtagaaccgttggtacaatttactgagctgatcaatataggtgacatcatattacaaatgatttccattttttacaaaaacgaactaattcctaagaagattatcgacaagaacaaagatttcctcaatgatgttatccaatcaaaaaaaaattttgaaacttctattgatgactttgtagcagaagggttaaatattggtataaacaaactaatggatgaaatttcattcgttttcaagactctacagttacctgacgactacaacccaccgcccccttccacaaattcaccaatacgggatataaaaccgacaaaatgtgctattagggtcgttgagttactttctaatcattgtttcctattgactggggcgaccgataagggtaccattgatgtctaccaacaagaaatcggtgaaagatttttcaacgagatcgtaaaacatttgaaaaaaagctttatatctacagaaggcgctatttggttgatctgtgatctaaattacttctatgattttattgccaataaattgaaacaaaaaaacgttgtaccttattttgttggattgaaatctattgggcaattgtatatcatatccggaaaggactcgaaagagctagggaagttaatttccgaccttgggaaattcaatggaattttcacgcaagaagaaatatatgagtttgttcaaagaagaagcgattgggttcgtgtacgaaaagacgttgaaaaggtgatgtatggtctcggcatacgtgattgctgcattatgtaa

SEQ ID NO: 1314 - DNA, 843 bp, Saccharomyces pastorianus
atggaaccgcaagatccacaaataagagaggacattaaaactactgcaacatacattaaacagcacggggctagtttcgaaagcaaattattagaggatgagagattttcatttatcaagaaagacgacccactccatgaatactatatcaaagttttgaacgagccagcaacgaattcaggaaatgaggaagatataggaaggagggagcacgagatagctaaaccacgaaactttttattttcccagtatgatacagggatctcacggagagacatggaaataatcaaactcacggcacgctactgtgcgctggatgaaagtaaccttggatgcatagcctcgaaacatggcgagggctctttacagtttttaaacagttcacatccgttacacaacacgtttaccgattttgtcactcagtataaacgcataatctcttccgaggatcaacaaataaagaaaaccaagagtgaaatcatcgacgagtgttttggcagagcacaatattgggaattcgctaaagatcaagaccaagagcacaataaacttgtagagttgtgtaaaatacaatttgcggcgatcccgtgggatgaattcactcaagtggcgaaattctttattcctgaccacacagatacattggtagatgctctcgatttatcccagatgaggctgcgaagagtacaacccaatatgaagatatttgaccgtgtcagtccagtgaatgaagaacaaaaggcggccctggaccaggtgaagtctaagggaggagcccctggaagtaagaaacgtaaaattagagcagcaggggagacaaggctaaagaagaacaagaaataa

SEQ ID NO: 1315 - DNA, 2370 bp, Saccharomyces pastorianus
atgctatcttccgctaacaggttttacataaagaggcatttggcatcacatgccaatatgttcccttctgtgtccaagcaatttcaaacaaaagtacctccatatgctaaacttctaacaaatctagataagatcaaacaaataacaaataatgctccattgacattagcagaaaagattttatactcgcatctctgcgatcccgaagaatcgataacttcttcagacctatccactgttcgtggtaacaagtacttgaaactgaatccagatcgtgtggctatgcaggacgcatccgctcaaatggcacttttacagttcatgaccactggtctaaatcagacatccgtccccgcatctattcattgtgaccatttgattgtgggtaaggacggtgaagcccaagatttaccatcctccattgctactaaccaagaagtctttgatttcttggaaagttgcgccaagagatatggtattcaattttggggtccaggttctggtatcattcaccaaatcgtcttggaaaatttctcagctccaggtttgatgatgctaggtactgattctcacacaccaaatgcaggtggtctgggagctattgctatcggtgttggtggtgcagacgcagtggatgctctaacaggcacaccatgggaattgaaggctccaaacattttaggtgttaaactaaccggaaggcttaatggatggtcaactcctaaggatgtaatcacaaagatcgctggtttactgaccgtaagaggtggtactggttacattattgaatatttcggtgaaggcgtctctacattatcctgtaccggtatggcaaccatctgtaatatgggtgctgagattggtgctacaacatcaaccttcccttaccaagaagctcacaagcgctatctacaggcaactaatagatccgaagtggccaatgcagctgatgttgccttaaacgaatatggcttcttgagggcagatgaaggtgcccaatatgaaaaagtcattgaaatcgatttatccgccattgaacctcacgttaatggtccattcacacctgacttgtccacaccaatatcccaatatgctgaaagaagtctgcaagagaattggcctcaaaaagtcagtgctggtttgattgggtcatgcactaattcatcatatcaagatatgagtcgtgtagttaatttagtcaaacaagcttctaaagtaggcttaaagcctcgtattccattctttgtgactcctggttcagagcaaatcagagctactttggaaagagacggtataattgatattttccaagaaaacggtgctaaagtcttggcaaatgcatgtggtccttgtataggacaatggaatagagaagacgtttccaagacatcaaaagaggcaaatactattttcacatcgtttaatagaaatttcagagcaagaaatgatggcaatagaaatacaatgaatttcttaacatccccagaaatagtaacagcaatgagttattctggaaatgctcaatttaatccattgacggactccatcaaattacccaatggggaagatttcaaatttcaaccacccaatggggacgaattgccaaaaagaggatttgagcatggtagggacaaattctatcctgaattggacccaaaaccaaatagcaacatagagatcaaagttgatcctaaatctgaccggttacagttattggatccattcaaagcatggaatggcaaagaattgaagacaaatgttcttttgaaagtggaaggtaaatgtacaaccgatcatatttctgctgcaggtgtttggttgaaatataagggtcatcttgaaaatatctcctataacacattaattggtgcacaaaacaaagaaactggtgaagttaacaaagcttatgatcttgacggcactgaatatgatatccctggtttgatgatgaaatggaaatccgacaatagaccatggaccgtaatagcagaacataactatggtgaaggctctgcaagagaacatgctgctttatcgccaagatttcttggtggtgagattcttttagtcaagtcttttgcaagaattcatgaaacaaacttgaaaaaacaaggtatgctaccattgacctttgctactgaatctgactatgataaaatctcgagcggagatattttagaaacattgaatcttgccgacatgattgccaaagacggcaataatgggggagaaattgacgttaagatcactaaaccaaacggtgactcatttatcattaaggcaaagcataccatgtcgaaagatcaaatcgattttttcaaggctggttcagcaattaaccatattggtaatatacggaggggcgaataa

SEQ ID NO: 1316 - DNA, 3768 bp, Saccharomyces pastorianus
atggactcttcgaatgcttcaagttctgagacttctttggtttataatgaaaaccaacaatctccaggtggcacgacaccatgtgatcggttgggagtggatttgatgaatgttttagagaataatgatgaagtaaagcaagaagcggctccagtaacaaaccgtgaaattggggacacggaatcagatgcttctacaggttcttcgtttgctagtgctaatgaattgcttcgtgaaactaataccaaaaatgaaactagtgttgatgctaatggcggccttacgttaacacagcaaagagaaatggtcgctcgactgacaagagtacagagggaagcgcaaaaagaaggtgataaagtctgcattgttccaaaggcatggtatgataaatttttagaccccgatgtcactgattctcaagatattggtcctattaatacacgggtgatttgcagagattttgaaaatttcgtgcttgaggattacaacagatgtccatacctatctgtcagtgagtctgttttcgaattcttggcagaaatttatggactgactagtggctcttatccagttattactaatttagttatgaaccaaactacgggggaattagagacggagtacaataaatggttcttcaggttgcatcacttgacagagaagcaagagatacgtaaaagagggtatagtcaggatgattcagtcttgtacttgtcaatgtctgcgttggatttggtacgcgacttagttgagaagagtatgaatttatttttcgagaaagcggatcatttagacataaatgctgtagactttaaaatttggtatgtctcacagggatcagacgtttccgcggatacaaacaccagtaatgttttgaatgcatcatacgaaataactccattgcagtttttagagctaccaatcaaaaaactactcattccagatatgtttgaaaatcgcttggacgtgataacttcaaacccaagtgatctagttatagaaattaaacctatagagggcaattaccattgggtttcgaatcactttgtttataataaactcgagtcagcttcaggaacgaccggtctggtcaatctaggaaacacgtgttatatgaattcggcattgcaatgccttgtgcaccttccccagttgcgggattactttctttataatggatacgaaaaagaaataaatgaagaaaatcctctcggttatcatggttatgtagctagagcatttagtgatttgattcaaaagttgttccaaaacaaactgagcataatgcaaagaaatggagcgtttcctccaacgatgtttaaatctactattggacatttcaattccatgttctccggttatatgcaacaagattcacaagaatttttagccttcctattagacagtttacatgaagacttgaataggattataaagaaggcgtacatagagaagccatcattatctcctggtgatgatgtgaacgattggaatgtgattaaaaagttggcagatgatacctgggagctgcatctaaagagaaatcactcagttataacagacttatttgtcggtatgtataaatctacattatactgtcctgagtgtaaagatgtttccacaacttttgatccctataatgatgttacgctcccgcttccagtagatacggtatggaataaagctgtcaagatttttcctatgaactctccgccacttcttcttgaagtcgagttaagtaaatcttccacttacttggatttgaaaaattatgtgggtagaatattagggttagatccaaatacgctattcggttgtgaaatcttcagtaatcagatatatgtcaactacgaatcaatagaatccaatgctaagtttttaaccttacaagagttgatcaaacctgctgatgatgtaattttttatgaattaccggtggttaatgataatgagattattgttcccgtggtaaataccagaattgagaaagggtacaggaatgcgatgttatttggagttcccttcttcactacacttacaaaagaacaaaggaataatccggcggcaataagaatgaaactccagaaaagatttattcatttgagtggtggatttatttcctttgcaacccccgttgaggatcaggccgacttagtgcatagttttcctttattggcagaaaaatatccagatattgaacttcgggattatgaagatatactgcaatatgtatcaaatatggcagtcgataaggataaatcttttttctcagtcaagattctacctgtagaaaaagagcaacaatttgttagcaacaaccaaacaggaccaagcttttggaccccgttctctcagttgaattacaacagagccacagatataaaggatggcctaacagatgtggttagggatatatacagttatccagccctagtaaaatctgctcaaggaacccctatgcaggtggacgatgaaggcgaggccggacttgatgaggaacacgattcctcaaaacccttacaggctgaagacaaactagaggatagaaagatagaaacaatcagtgggattagaagtgatgttaatgatcaagacgaagatatggaatcaatagacgatgttgacgaagatgggagtacacagccactaccaacagatagttgtagaaaggaagttttggataaaagcgagaatagcttacactctatttcgcacgaaattatttctgcagatgatattattgtttgtgaatgggaagaatcggcttcaaacgaggccttctctgacgacaagatttataactgggagaatccaagtattttgcctaatacagagctggaaaaggtcaaattggaaagacgcaatgctaaagaaagaactataacattagacgactgcctccaacttttctctaaacctgaaattctaggcttaaacgactcatggtactgtcctacatgtaaggagcaccgtcaagctacgaaacaaatacaactttggaacacgccagatattttactaatacatctgaaaaggtttcaaagtcaaagatcttttagtgataaaattgatgataccgtgaattttcccattacaaatttggatctgtcagaacacgttgtttataaagatgatcctaggggctccatctatgatttgtacgcggtagataatcactacggtggtttaggtggcgggcattacactgcatacgtaaagaatttcatggacaacaagtggtattactttgatgattcacgagtaactgaaacggtacctgaaaacagtattgccggatcagcatatttattattttacattcgccgtactaaggatgggaatgaattgggcggctctaaactacaagagataatcagggagtcacgccaggaatacgatttacgtattaagagtatatatgatgagcaaatgaaactatatgaaacgaataagacggatgatgaggaggatatgtctgatgatatagtggaaagtaatgaggatgttcaaacccctgaatacagcaatcgcagtttagaggttggacacattgaaacgcgggattgtggtgatgaagacgacaacgatgatggcgaaaggacaaactcggggagaagaaaactgaggctcttgaaaaaagtttacaagaatttggactcaggttcatcgagtacgtctgaagtatctgaaggaggtctagaaaatgagagcactggacttgaagacttgggttataagaacgacgtaactctcgaatctccagaatga

SEQ ID NO: 1317 - DNA, 1209 bp, Saccharomyces pastorianus
atgttccaacgactgtcgatctccattagacacaatgcacacatcatatttttatgtatatgctggtactttatttcttcattagcatctcaagtcactaagcaggttttaaccgtatgcccgttaccattgtttttgggtgagtttcaattcatatacactgctatgctagcttggtgttcctgtttcattgcatacaagtatcagaaattttatcacatatttcccaaaggcacatttccagaatattatggcaacgctggcgacagcaatcgtatgatgagaaaaccatccaaattaagttctctcattatatcaccttccaggccaattttacaaacagttttgcctttaggtctcttccaatttgtcgggaaatattttggccatacagctacttctttggtgcctgtttctaccgttgccagcataaaaacgctttcccctatgtttattcttttacttcaaaagcttctaaagatttccactttgaaagttacattaactcttacctttagtttatgcacattggtttttggggtttggattattgttcaggaagacaatcgtttacccgcttcttccagtgatctaagggaattctctaattatggcatcatatgcgctgtcatatcgatgttcatttttgtcctgcaaaatatatatggtaagactgtgtttacattcagatctcaaaaggatggtgtccaaactaactcaggatcttcccgggaagattcccctttacctatctatgaaaaatctaatgaaagacctgccatgcagaatgtacctaaatcgtatgacaaattgactttgatgatttacatctccctcgtgggattttgcctatctttttgctggtttatcaccttagaattccctatattattcaaatacttccttggaactgacaattcggtaactgtgattcaatcttttcccgtgtctctgcttttattgaacggaactttccacttcattcaagcaatgataactttccacttattaggcgaagtctcaactttaacatattcgatagccaatcttatgaaacggtttgccattattgcagttagttgggtctttattggaagaagaatcacctggctacagatcctcggcttggttttgaatacgttaggattgtttctctatgaacgatgcacgtcgcaatcgaaaacgaaaataaaatttcgccctgaataa

SEQ ID NO: 1318 - DNA, 2556 bp, Saccharomyces pastorianus
  modified_base (2241)..(2290): a, c, g, t, unknown, or other
atgagttctttggacgaggatgaggaggactttgaaatgtttgacaccgaggactccctgttcatggggaagaaggcgtttgggaaaaaggttgatgaggatgatgaggacgacggtgctgtaggagggagtactccgacgaataaattaaaattttatccgtactcgaacaataaactgacgagaagtacgggtactttgaacttgtcgttaagtaatgccgctttatcagaatctaactcgaaattcttaggtaagatcgaagaagaagaagaagaagaagaagacgaagaagaacataaccatgatgacgaagaggaggaggaagaagaggaagaaaccatggattcccgtataaatagatggtctcccttcaacgaaaccgataatgttgctacgcctactgtcaagagatcgatggacaggaccagcagtcccagcttccttgggcagtggaaccagcgatggttccccgcaaaccagagtcgcaatgatagtaaccctccttcctcttcatacaccgttgctaagcccaaccagtctgtcttcacctcttcgggactcatatctaagatgtccagggattcttctttataccctacaaaactaagaataccagaaacaccagtcaaaaaatctcccttgatagagggaagagaccatcatcatatccatctttcgaattctaaaatcatatcctcttcactaagcgtgtctcccttgaactttgtcgacgataacaatttacacgaagatcttttattttcagattctccatcttccaaagctttaccctccattcatgtatccgccatagactcatccccattaagcgagaccaaataccaatcacatgaccgtaacaatagtcatagcaacattctgtcccctactaccagtttgatcacaaataattctccacagacattgcattccaacaaattcaaaaaaatcaagaggactaggaattctgtcattttaaaaaacaaagagctaacgaacagtttacaacaatttaaagatgatctgtatggtacagacgaaaatttcccacctcctattataatatcaagccaccattcaatcaggaaaagcacccagcattgtcaacttcgtaaccctaacgacaatgacaccgatgaagagatttctactccaactaggcgaaaatctatatcaggcgcaaaacctcaaactcattatgaaacgaaacctttatcattatcttcagcatcggtaccaactaagtcaaacgcagagacgcattctatatcttccacagactcctcccccttaaattctaagaggcgtctaatttcctcgaacaaattatctacaaatccagattctcatttgtttgaaaaatttacaaatgtgcattctattggcaaaggccaattttccactgtttaccaagttacatttgctcaaacaaacaaaaaatatgccattaaagccattaagccgaataaatacaactccttgaaacgcattttgctagagataaaaatactaaacgaagtaacgaaccaaatcacgtcggaccaagaaggtaaggaatatatcatcgactacattagttcgtggaagtttcaaaactcgtattacattatgacagagttgtgtgagaatggtaatttggacggattcttacaagaacaagtaattgccaagaagatgagattagaagattggagaatttggaaaatcatagtggagttaagtttagcgctaagattcatccacgaatcatgtcatattgtacatctagatctaaaaccagccaatgtcatgataacttttgaaggtaatttgaaactaggtgattttggaatggctgctcaccttcccttagaagataaaagtttcgaaaatgaaggcgatagagaatacattgcaccagaaataatttcagattgcacttacgatttcaaagcagatattttctccctaggtttaatgattgttgaaattgctgcgaacgttatattgccggacaatggtaatgcgtggcacaagctaagatcaggcgatttgtcagacgcagggcggttaagttctacggatatccattcagaatcattgttttcagatactacgaaagtcgataccaatgatatatttgattttgaaagagaaaacactacaaacaacagcaacaacaacaacaccgccaatactgctactgctattactaccgctactaataccaccaccaccaccactaccactactaccacnnnnnnnnnnnnnnnnnnnnnnnnnnnnnnnnnnnnnnnnnnnnnnnnnnctccaacaggtaatatcactactactaaaaatggtctggttctgcataaaagtctcaaaattcccgcatgggtaccgaagttcctcatagatggcgagtcactcgaaagaatggttcgatggatgatagaacccaattatgagaggagacccactgcaaatcaaattttacagactgaagaatgtttgtacgtggaaatgactcgtagtgcaggcgccatcattcaggaagatgattttgggcccaaaccaaaattttttatatga

SEQ ID NO: 1319 - DNA, 1761 bp, Saccharomyces pastorianus
atgttgatcaggctgaagaaaagaaagatcctgcagctccttttcagcgcggtggtgctggttgtattcttctgcactgtacataaagacgcgtcctctagttggctcgatgccagcaagtcgagattgtcaaatctgactgggtccagcaacagaaacagcttttatacgttactggttgatgctatcgtcaaaaccaaacctttgcacgcacaccccgatttgcgtgagctgcatgctgtggaagggtgtgtatttgcgaacaacgtggctgctcatgatacttcgcacgatgatagcctgagttacgagagcttgagtaaatgttacaagctgaatagaacggtactggcaaatttagcggatatgcacaatgagtttacggatatcttatcaggaaagctaaattactccacctcgcaaatagaagctctttttcccgaatccgaagggatagtcaccatcggaggtgggaagtactctgtgctggcttatacgatgatcaagaaacttagacaaacaggcactacattgcctattgaagtcatcattccaccgcaggacgaaggcgacgatgatttttgtaaaaactggttgcccaaccataacggtaagtgtctttatttctcggatatcgttccttcgacgtcgttgcgtgatctggaactcaccaattttcagctaaaagcctttgggttgataatttccaatttcaagcgcataatcttcatcgatgcggataattatccagtgactaatcttgatcttgtcctcaacacaacatccttccaagatactgggttgattatgtggcccgatctttggagacgtgtcactcctcctgccttttacaacatcataggttccaccatcaacactagcaaaagagttcgttttgtcagtgatgatgtttcccccgtgtctcgttatgatcctttcgtcagcaagtcagaggaatacacgtcagaggagatgcaagaccatttcttgagacacgttcctttacatgatatggatggtaccatgccagatttaacttctgaatccggtcaaatggttatcaataaggttcgtcatttccacacactgctattggcattatattataatgtctatgggcctagctggtattataaaatgctctctcaaggtactgcaggcgaaggtgacaaagaaacctttattgccgccgcccatgctctgaatgtaccatattatcagattaaaaccaaatttgaattcgatggctttttttataaaacgaacgattaccaaggccttgctttgctccagcataattttgagcaagattacaagcaatatcaaaaagcccaggaaaaggttaaagctaacatcgatcaatattccaaactggatttagactataacttggatgatggtttcttgaaaactttgatgttaaatgacgatggctctgatttggatattatgtttattcatgcaagttattacaaggcggatccatggactttgttccgcgaaaataggtttattagtcccgatggtaaacaagtacgcggattctggaaaccgcaacggtatgcaatggatttcgaactgtttttgtttgacgatatgaaagaatccttctgtactcctgtgaaggacaaagttataaaattcaagtatttcgaagataagatcaacacacccaaatgggatgaaatgtgcaaatacttggctaatcatgttgattatttaacgagcactcataaagaattcatggaaaagaaagattaa

SEQ ID NO: 1320 - DNA, 882 bp, Saccharomyces pastorianus
atggcggccatgaacaatatccaggtagaacgcgggttgaggtctactcgcatccagcgcaggagtgacagcagcgttcatgatgaggtgtcaccgtttgagatggtggagttttctgggaggaattttgagcttgatttccataggttagagtcgtttgatgatgtacgggttatcaataaccctgagctttcgccgaagagctcatatactgccattagtcacaatgaggggctggagcctgcaagtagtgcctttgaagttccctccgacgagattgctatactatcgatatctagcagcggtactaaaagttcaccaccatcagaccagccgggcgccaatcttcgcaatattcaatattctactaactccgatagaatagatgagtggtgtttgagcagccacttcttaaatgggttgcgacagaatgtatctcagccaaacgatagcaccactcaggggttcccggtttcctctttcagggaaatggaactccacacatccgcaaaactaaagaagctcacaaacagccaaagaattgcggtgcaacagctatcaagagacttgtatcccattttgagaacctgtcgccgtacaaaatcccggggacctcttttgatataccgtcaagaaagactatatgatgatataccatcgtttttcccacagcgtgactccattttcaggtattattcgttgccttttgaattcgacagattttctgacgtcgatatagagtcctcgtcgccttcacgactggcagacgataattttcgagaaccgtcgaaccgctcatcaagtactgcatcttcttcggtggaaaacaggtcttggtttgggtggactttgctttctaggtttctagatagggaatggtag

SEQ ID NO: 1321 - DNA, 1269 bp, Saccharomyces pastorianus
atggcaattaaaccaagaacaaagggcaaggcgtattcgccgaaatcgacggggtctcaatggtttaatagaattggtttcaagcagaacaaatatggcacttgtaaatttctatcaatcataacgaccttcatttgcattctttacttcttctccagccgattctatccaatgtctcgttccatgagtgtatcccatcctccatctcatggactctatattaacgaaattcctgcttccagccgattgatcttcccacatgtagagcatttacccgtattgaagcaaattactgtaagggggctttacaatacaagactggaagtggacggtaccaagaggttggttttaaaagccgaagagaatgcctttaccgatgaagagaaaaaaaagaccacagatcaagttctactggtaaagcgctctttcttggaccacggtaaattggtataccgtaaaaccaacgatgctccgaaagtggttgtggtcacattgatagatttcgaaaactacgatatggaaaccgttattcgaattgttcaaaatagagtcgattatgctcaaaagcaccaatacggtgtttacgtccgttggatacaggaatttttgcccgttttggagaaccaaaatttggatcaaagctatgacttcattaagccattgatgataagagctgccatgcatgctttcccaactgccaaatacattcattttgttgatcaagatgcactattgatgaaccttgacctttctttacaaaaatacctattggatcctaagattctggatctggctctactaagaaacgttccagtcgtggctaactcaaacatcaaaacgtataatcattttgaattgaattcagccaagatcattattccccatgatacagatggtaatatcgatacatattccttcgtcgttgctaatgacttccatggccaagctctggtagactatttgaatgatccactgctaagaaattttccatgggaaactaaaggtgataaatttggttatgctattggtcaccttttacaatggcatcctaccttactgggcaagacagcaattgttataccaaaggtcttagcaagtcaacacgatgcttctttggattcagaagacgaggcaggaaacggtgcttccagcggcgacgcgtaccattacaatgaaggtgatttggccgcttccttcaagggctgtaggtcaagaggtacatgtgccagcgagataagaaacatgtacgagaaaattaagaaatcctga

SEQ ID NO: 1322 - DNA, 981 bp, Saccharomyces pastorianus
atgttgacatcattgaaatacgggaactgtgttgccaggtcaattagatcgacaatccctcgtttctattcactaaacgctcagccattgggcacagacaatacaattgaaaataactcacctacagagacaaacagactgagcaagacttctcaaaaattctgggaaaaggtgtcattgaatagaaacgctgaaaatggaaaaattgcattacaattagatgggaagactataaagactcccctaggaaacggtatattaattgatgatacaaggtctcttttagcatacctattaaaactagaatggtcatcgttatccagtctctcgatcaaaacgcactctttgccattgacctcattagtgtcgagatgcattgatttagaaatgacaaacaaacccggctgtgatcctcaattggtcgcaaagatcggtggtaatagtgatgttattaaagaccaattgttaagatatttggatactgataccttgttagtgttttcgcccacgagtgagtttgaagggaaactacgtgctgcccaaaatgagttatacttgcccttgattaaaggaaccgaagaattcctatccaaattttcttcccagcatgatgacattcatttacaggttttagatgctgatatccatgggttacgaggtaaccaacagccaaatgtagttagggacgcagctatgaactacatgaacagcttatcaccatgggacctggctatccttgagaaaactgtactaactaccaaatcgttcatctgcggtgtgctattaatggaaaacaagaaaatctctgataatctactccctggcttgaaaactgacatggaaaaaattgttcgtgctgccactttggaaaccatctttcaaattgaaagatggggggaggttgaagatactcatgacgttgacaaaagggacatcaaaaggaaaattcatactgccgccatagccgcctttaagcaataa

SEQ ID NO: 1323 - DNA, 330 bp, Saccharomyces pastorianus
atgtctcagatagcacaagaaatgacagcgagtttaagaaactctagaacgcaactagacatggttaaccaacaattagcatatttggacagacaagaaaagctggctgaactaacaaaaaaagaactagagtcttacccaacggataaattgtggagatcctgtggaaaatcgtttatcttgcaagagaaagccaaatatgtcaatgacttatcacatgatgaaaatgttcttttagaacaaaggaaaacattgaagataaagcaaaactatttagaaacatctgttgaaaagactatagaaaatctaaaggcaatgatgaagaattga

SEQ ID NO: 1324 - DNA, 2472 bp, Saccharomyces pastorianus
atgggaggtacgctgggcgacggatccacgacaggacttgccggggacgctattgaacaaggtgatggcaataacaatagcagcagcacgaacgtgacaacaactgttactacaaatacagaccttggcgacgagaagcagcagcaacaaagcgattcttcgaaggatgaagaggctgacacaaacacgggcgacgcggggagcgatgtggcagcagtgccagcagcacagcaaccgtttatagcggaaagtaaaccggaccctccgaaaacaatctctgtggaagaagacgacgatcaggttttgttcggccaagaccataatgatagcgataacttgtttggcgaaacagagagctctgtttcgaataacgagacaaacactcccgatatagctattaattctgtggagaaggataacaataagcttgctgaaaagaaggatggcgtgatagaagattcgagtaatgacataaaggacatagaggaagaaaaggtacagacgaaagaaggagcaacggagaatgaagaaattgacagtgtcaaagaggaagagccaactgaaaaggcagaggatatggacgaggacgagaacgaagacgaagaggacgaagacgaagacgatgatgaccaaccgatgatgagtcccgacaactctatttttggagatacaaagagtgagaccaaacagttagataatgcttcgtcgttcgttgaaacaccatctgaaatttcggatgcgcataaaaatgtccaggaagaaactataaataaaacggaagatattaatgaaaaagaagatgcaatcgaagagggaaacgagcatgcaaaggataatataaatggccacccagaagatgccgataccaaaataaagctcaccactaaaacagaaccagaaacgttcgatataccgcaagcacatgaaattgttattccaagttattctaaatggtttagtctagacaagattcattccattgagattcagtcgctacctgaatttttcacaaacaggattccatcaaagacaccggaggtctacatgagatatagaaatttcatggtaaattcttatagattgaatccaaatgaatactttagtgtcacaacggcgagaagaaacgtctctggtgatgctgctgcattattcagattacataaattcttaactaaatgggggctaataaactaccaggtcgattctaagctactacccaagaacatagaacctccactaacatctcaatattccacaaggcatgatgcccccaggggacttttccctttcgaaagctacaaaccatccatacaattaccagacatggctaagcttaaaaaaatgatgaacactagcgattctgaaagtactttgtataaatatttgaaggaaagtaaaagaaaatacgatgatatatcgcgtttatcgaacactccagataatgataatggcgataaaagcaataagaatatagagaaatcacctgatgagtctgatgagaatttattggaatacgatgaaacttcacgtcctctgaaaaaaattaaaattctggaacaaattgacaagaattggtcaaaggaagacttgcagaaattattaaagggaatacaagaatttggtgctgactggtataaagtggctaagcatgtaggcactaagtcacccgaacaatgtatcctgcgctttcttcagttaccgattgaagataagtttttatacggtgacggcaataccaagggcgctaatgaaagcggattgggaccattgaagtatgctcctcatttgccgttttccaagggcgagaatccggtcttgtcaacaatagcatttttggtgggattagtcaatccaaagactgtacaagccatgactcaaagagccatccaatctgaagaaacaatagaatctcaaaagaaggaaatttcagataaaggatcgtttgaaaatgttaaagaaggttcagaaattgctctatcatcgttgggcctaagaagccatgtttttgccacccatgaggagagacaaatgaatttattaacaaatgaattgatcagattgcaaatggaaaaactagactcaaaactaaatcacttgaaaaaaatagagagttttatggagttggagaggaaaactttagaaagacaacaagaaaacctactaatccaaaggttgaactttaatcagaattccaacaagattgttaacgtcctaaccaaatgcttgaattcaatatcggacagcaatattgataatagctcaatgacggatagggacgaaatcaggtcgcagataaaccactttcgaaacatgttatccaaacccgaaagtttaagtattggaaagaatcctttcggaaagtccaatattgaaacaggcgagacccttaatgaacaaaacacatctaacgaaaatgacgttaaaccgatttccatcgaagcaccccaattttacagatattggtcggcatga

SEQ ID NO: 1325 - DNA, 834 bp, Saccharomyces pastorianus
atgcgtttaccaacaggctccattttatacgcttgggtgtttttaatcacatgtgttctgggtgatgtaaacaccgtttctccattagccggagccaaattcagcccaagcggtggtacagtctctattcccgtcaaatggatggataatggtgcgtatcccccattaagcaaaatttcatactacacactcagtctttgtactgggcccaacaatgacattaattgtatagggacaattgccacacaggtcaaacccagtgctttggctcaggatcaagatggtgtttactcttacacagctacttttccctcgactttaactggtaacggtcaatattatattcaagttttcgcatgggtgaataatcaaggttctaccacccattatacgccaagattccagttgacatccatgggaggtactacagcttatacatacagtgactcggcggcgcccaccccacagacctccatccaaactaccactacgaataccgcacaagcatcttccatcgatagtcgttcatttactgttccatacaccaaacaaaccggtacttcacgtttcgctcccatgcaaatgcaacctatgaccaaggttaccgctacgacatggacaagaaaatacgctaccagtgcagtgacatacttttctactttcgggaaattgccccagcaagaaactactctaactccaggttggtcttattcgatatcttctggggtgaactacgccactcctgcagccatgccatccgataatggcggctggtataaaccatcgaagagattatctttgtctgccagaaagatgaatttgagaaaagtataa

SEQ ID NO: 1326 - DNA, 369 bp, Saccharomyces pastorianus
atggccagtgaaacacccagaatcgaccccaccgaaatctccaatatcaatgcccccgtgtttagaattatagcacaaatcaagtcacaacccacagagtcccaactggtcttgcaatcgccgaccatgtcgtcgacgaacggtggtgagatcgaaatgatcacattaaacaatatccgtgtctcgatgaacaagacgttcgaggtggattcgtggtacgaattcgtttgtaggaacaatgacgatggcgaattaggttttttaattcttgatgctgtactatgcaaattcaaggaaaacgaagagctaagtttacacggtgtggtcgctttacaacgactatgtaaaaaatacccagaaatatactag

SEQ ID NO: 1327 - DNA, 1737 bp, Saccharomyces pastorianus
atgattgccttgccagaagataaggcagttaaaaagcccatatggcaaagacatagagccttccttagcggaatagttgctcttataatcatcggtacttttttcctcacctcaggtcttcatccactcccaccatcaccccatgggcataagccgccacatgggggcaagggcgatcgtcacaagcccagatgtgagaagattgacgccttaagtccttcatttaaccgttccattgacacaattcttcatgattctgcttttagaaacagctccattaaaaaattgtccgacgctgttagaatccctactgtagtccaggacaaaaaccctcagcctgcagacgatccggactactataaacacttttatgaactacatgattatttcaacgagaccttcccccatgtgaacaagcatttgaaattggagaagatcaacgaattgggccttctttacacatgggagggctctgaccctgagttgaaaccgctattgctaatggcccatcaggatgttgtccccgtgaacaacgaaactttatcatcctggaatttccccccattctccggtcattacgatccagagactgatttcgtttggggccgtggctctaacgattgtaagaacctgttgattgctgaatttgaagccgtcgagcaactgttgattgacgggttcaaaccaaacagaaccgtcatactgtctttaggtttcgacgaagaagctagtggtatcctcggtgctgccaacctagcctcatttcttcatgaaagatatggcgatgatggtatttacagtattattgatgaaggtgaaggtattatggaagtcgataaagatgtctttgttgccactccaatcaacactgaaaaaggctatgtcgacttcgaaattagtattttaggtcacggcggccattcctctgtgccccctgatcatactacaattggtatcgcttcggagttaatttctgattttgaggccaacccatttgactatgaatttgagtttgacaatccaatctatggcttgctaacatgtgctgcagaacattcgaagtccttaagcaaggacttgaagaaaacaattttaggtgcaccattctgtcccagaagaaaggacaagcttgttgatttcatttccgagcaaaaccatttacgtaatttgataagaaccacgcaagctgtggatatcatcaatggaggtgttaaagccaatgccctacctgaaacaaccagattcttgatcaatcacagagtcaatttacactcttctgtctcttctgtctttgaaagaaacatggaatacgccaagaagatcgccaagaaatacggttatgggttatcaaagaatggcgatgatttcatcatccctgaaaccgacttgggccacattgacgttactgttttgagagagttggagccagcaccattttcaccaaattcaggccctgtttgggatatcttggcaggtaccattcaaaatgtctttgaaaatggtgtcttacaaaacgatgaagaattctatgttaccactggtttattctctggtaacacagacaccaaatactattggaatttgtccaagaacatttataggtttgttggttccattatcgatattgatttactgaagactttacattccgttaacgaacacgtagatgtgccaggccatttatccgctattgccttcgtttacgaatacatcgtcaatgttaatgaatatgcttaa

SEQ ID NO: 1328 - DNA, 1059 bp, Saccharomyces pastorianus
atggcttcagaaaaggaaattaaaagagagaaattcttgagtgttttccctaaaatagtggaagaattgaatgcatcgcttttggcttacggtatgccaaaggaagcctgcgactggtacgcccattcattgaactacaacaccccaggtggtaagttgaacagggggctgtctgtcgtggacacctacaccatcttatccaacaagaccattgaccaattaagccaagaggaatacgaaaaagttgccatcttggggtggtgtatcgagttgttgcaagcctacttcttggttgctgatgacatgatggacaagtccattaccagaagaggccaaccatgttggtacaaggtccctgaagtcggcgacattgccatcaacgacgccttcatgttagaggctgccatctacaagcttttgaagtcccacttcagaagcgaaaaatactacatagacgtgaccgaattgttccatgaagttactttccaaaccgagttgggccaattgatggacttgatcaccgcacctgaagacaaagtcgacttgagcaagttcactttaaagaagcattccttcatagtgactttcaagaccgcttactattccttttacttgcctgttgccctagccatgtatgttgccggcatcaccgacgaaaaggatttgaaccaagctaaggacgtcttgatcccattgggtgaatacttccaaatccaagatgactacttggactgcttcggtaccccagaacagatcggtaaaatcggtacagacatccaagacaacaaatgttcgtgggtcatcaacaaggctttggaacttgcctctgcagaacaaagaaagaccttggatgaaaactatggtagaaaggactccacctcagaagccaagtgtaggaagatcttcaacgacttgaaaatcgatcaattgtacgaacaatacgaagagtccattgccaaagagttgaaattgaaaatttctcaagtcgatgaatctcgtggtttcaaagccgatgtcttgactgcgttcttgaacaaagtctacaagagaagcaaataa

SEQ ID NO: 1329 - DNA, 285 bp, Saccharomyces pastorianus
atgggtcctccaagcggtaagacttatatgggatggtggggtcacatgggtggtccaaagcaaaagggtataactgcatacgcggtctctccatacgcccaaaaaccattgcaaggtatattccacaacgccgtattcaacactttcaggagattcaaatctcagttcctgtatgttttgatacctgcagggatttattggtattggtggaagaacggtaacgaatacaatgaatatctatatagcaaggctggtaaagaagaattagaaagagttaacgtttag

SEQ ID NO: 1330 - DNA, 2547 bp, Saccharomyces pastorianus
atgggagatgagaagctttcacgccacacgtctttgaagagagccaggtctctgtctgaatccatcaaaggtttgttcaaaccctcgggtatatcaggtggtagcagtactgggcaaccttcaccgcgtccaggtcaggaccaggcgcatccacatcaacctgcaagaatcatcactagtaatgtatcttctccatctgtatcccccattcaaagtcctgttttacaagtggctcccaaacatcataaactgggtgtccctaatattgctaagttatcattatcgcctagcagggaaccatctttgaattcggaaaatgaaatgttttcgcaggaatcttttataagtgagaaggatgaagatgaagccaatttgttggagagagaagagcttcaaaacaaaaatgaagagcaaaatcaaaggaaacaggcgcgttcaaaggacgctcatgtgcctcatcatcgttatacaataggcagcgatgaggctgaaaggcgaccaagggaaagacagaaaaactttccgcaaaatgctggtcaatcaaatccgacaaataacagtgctaatcatgttttggaccaggaaaataacttttctattgacgctatgcttgattatgacgacgaatccaaatttagaagaagaaacagtttgggtgtacgtaccaacagtaaccggacaagaagcaggaagaatagtttgtccacaccaagatcgccacctatgaaaactgtaaatgatggggcaaatcccaatgccagcaataatgctatgaataatacaagcaatagagtatatatgagaggaagaaaccattcagattctattagtgcctctagtttgccgaaattccaagaaatcgaatgcaagtgtattttagacttagaacaatttaaagtttttgagaacggatatcatgaacataatctaaaagtcttgcctattatcgaaaataataaaaacgtggacagtggcgaagataaggatgctgatgcccctgcaaacaacagtgaagatggcgacaacgatctcgaaacgaatattcataaacaaaagtctgtattttcattaagcggattattcaaatatcataaagatgcgaatcaacagcaacaacaacaagaagaagacgatgaccaaatcaatttggagaaggccttttcgataataccatcccagaaatttatcaaatctcaagtgttgaaaaaatcaagaactagtactcccaaaaatggtaataatgatgaactgatgaaaaatgatggtaaaaatatcccgcaaattgtgaaccctaatgctgcagtaggcgccgaagaattaaagttaattaatgcattgtctgagaagatacgaaaaggtctgaaaagcgaaaacgcaaagaatagtggcagtgaaaccagaagtaatagcaacaagcaggaagttatcgacgacaccgagaacaagtctcgaacagcaaacaatgacacttctcacaggccttgttctcaaaaatacggaaaatccattggagtagtcggtgcaggcgcatacggggtcgttaaaatttgtgcaagatgcaaaacttccaaagatatattaccgtatagtacctattctagcgggaaaaaattatttttcgcagtcaaagagttgaaacccaaaccaggtgatccaattgataagttttgtactagattaacttctgaatttattattggacattcattaagtcatccgcattttgaagcaaatacagcagtttcgggtagtattacaagacctacaccaccaagacatgttttcaatgcgccaaacattttgaaaattctggatctaatggaatataacaactcctttgtagaagttatggagttttgtgcgtccggtgatctatattcattattaaccagaaataatatttccagtgaggcaaataatggtagttcaagattgaaggaaggttccgggagcccattgcatcctctagaagctgactgctttatgaaacagctattaaatggtgttcagtatatgcatgatcatggaatcgcacattgtgatttaaagccagagaatattctgttccaaccaaatgggttgttgaagatttgtgattttggtacaagttcggttttccaaacagcatgggaaaaacatgttcattttcaaagtggggctatgggctcagagccatacgttgcgcctgaagagttcataagggatatggaatacgatccacgattagtggactgttggagttgtggcattgtctactgtacaatgattatggggcagtatctttggaaaattgccattcctgaaaaggactccctgttcaaatctttcctcagcgaaatcaaaaatgatggacagttttatctctttgaggaattaagacatgtcagtagtgaactaaacagattgagaaagatcgcattgtatagaacattccaggtcgacccgaccaaaagaatctccattgaacaactgttgcaaagctcttggatgagaaggacgaagtgctgtgtagtttatagacccttacacaacaaggtgagtaaataa

SEQ ID NO: 1331 - DNA, 1194 bp, Saccharomyces pastorianus
atgtcgactgaaaaacagagcgatggtggtcaaggggctccacatgatagacaaggtacggaagcacactcggatgaaggatctgagaagaaggtgaccgctgtaggaaacgaaaatgaagaaaagacaccggagaagggtggtgaggaaattcaagagaagccaaaaaatccccatattacttattacaatgaagagcagtacaaacagtttatcggccaggcaagagttacgggaggtaagtacagcttacaagatttccagatattaaggacattagggacgggttcctttggcagggtacatttgattagatcaaggcacaatgggagatattacgcgatgaaagtgcttaaaaaggaaattgtggtgaggttgaaacaggtggaacatacgaacgatgagcgattgatgctttccatcgtcacacatccatttattataaggatgtggggcaccttccaggacgctcaacaaatctttatgatcatggattatattgaaggtggcgagttgttttccttattaagaaaatcccaacgatttcctaacccggtcgccaagttctatgctgccgaagtttgtttagctttggagtacttgcatagtaaagacatcatttatagagatttgaagcctgaaaatatactgctcgataaaaacgggcacgtgaagataacagacttcggatttgctaagtacgttccagatgtcacgtacacgttgtgtggtactccggattacatagcgcctgaagtagtcagtaccaaaccatataataagtccatcgattggtggagttttggcattctaatttacgaaatgctggcgggatacactccattttacgattctaatacaatgaaaacttatgagaagattttaaatgccgagttaagattcccgccatttttcaacgacgatgtcaaagatttattgagtagattgattactagagacttaagtcaaaggttgggtaatttacagaatggcacagaagatgtcaaaaaccatccttggttcaaagaagttgtctgggaaaaactactgtctaggaatatagaaacaccgtatgaaccccccattcagcaggggcaaggtgacacttctcagtttgacaagtaccccgaggaagacatcaactatggcgttcaaggagaagacccatacgctgatcttttcaacgacttttaa

SEQ ID NO: 1332 - DNA, 540 bp, Saccharomyces pastorianus
atgctatttacaagaatattatgtcaaggcgtgaaattcactaagggaacagctacacagcccaaactcagtccaaaatcactaccgaaaggcaatttgtataccaatcttttagtaacaacactatatgggacaggcctggcatctttatatttggaatcaactagcttgaaaaagtctaagacgaagcgaggtcctcctgctattacagaagatgacgttgtcgatatagtccacgattcaccaaataggatattcaagccaaaactcaacacgcaagaagagaaaagacaagatttgcaactaagtgactttcgtaaagtggttcattcgttaacatatggtgatgtctcacaatttgcaattgcttggggttttcttatgcaattatcaagccttatcggcagttcttctttggggaggaaatctctattttataagggaagtgtagttggtgtcgtcgggttcccatccctgatatatatggcccttagactcagaatgaagcaattggaaaaagccggagtccactttgaatga

SEQ ID NO: 1333 - DNA, 693 bp, Saccharomyces pastorianus
atgcaattcaagaacgtcgccctagctgcctccgtcgctgccctatctgccaccgcctccgctgaaggttacgctccaggtgaaccatggtccactttgactccaaccgccaccatgtcctgcggtgccacccaatacacctctactttcggtattgccgttcaagctgtttcttccgccaaggccaagagagacgttatctcccaaatcggtgacggtcaagttcaagccactactgctgcttcctctgttgctgccgctcaagccactgacggtcaaattcaagcatcaaccaccgctgccacaaccagttccgtgaagtcctcttcctctgctgcctctaaatcctcttcctccgcttcttgcgctgccactccatctttgaaggacagctcttgtaagaactcaggtactttagaattggtcttgaaggacggtgtcttgactgacggtaagggcagaatcggttccattgtttccaacagacaattccaattcgatggtccaccaccacaagccggtgccatctacgctgccggttggtccatcaccgaagatggttacttagccttaggtgacaaggacgtcttctaccaatgtttgtccggtaacttctacaacttgtacgacgaaaacgtcgccgaacaatgtagcgccattcatttggaagctgtttctttggtcgattgttaa

SEQ ID NO: 1334 - DNA, 1359 bp, Saccharomyces pastorianus
atgggttacagtactctttctaatgataacgatatcaaagtatgcgtgataatggttggtttacccgcgagggggaagtctttcatctcccaaaaaatcattagatacttgtcttggttatccataaaggccaagtgttttaatgtgggtaactatagaagagacgtaagtgggaatgttcctatagatgctgagttttttaattttgataatgccaatggttttaaactcagagaattggccgcccaaaatgctatgaaagatattttggattggtttgaaaaagaaaacggttctgtagcggtattcgatgctaccaatagtacacgcgaaagaagaaattggcttaaagacgtgtgtgaaaaaaatgcgatccaaccaatgtttttggagagctggtgcaatgattatgaatctattgtaagtaatgccaaggatatcggcagcacttcaccagactatgaggattttgaaccttgcgtagcggaagctgatttcttaaaccggattgcacaatacgaaagattttatgagccattagacgcgcagacagacagagacatgacgtttgtcaaactggtcaatattgtcgaggaagtaataataaataagatcagaacttatttggaaagtaggattgtattctatgttatgaatattcgtcctaaaccaaaatgtatctggttatccagacatggtgaatccatttataacgtagagaaaaagattggtggggactcatcattatctgaaaggggctttcaatatgccaaaaagttaaggcatttggtgaaggagagtgcaggcgatgtgaagttgacagcatggacgtctactctgaagagaacacagcaaacggccaagtacctcccttacaagaaattgcaatggaaagctttggacgaactagatgctggtgtctgtgatggtatgacttacgaagagattgagaaaaaatatcctgaagacttcaaagctcgtgacaatgacaagtacgagtatacgtaccgaggcggagaatcatacagagatgttgtgattcgtttagagcccgtcattatggaacttgaacgtcaagagaatgtgctaattataacccatcaagctgtgcttcggtgcatatatgcatactttatgaacgtcccacaagaggaatctccttggatgtcaatcccactacatactttgatcaaattggagcctagggcttatggtacgaaggtcaccaaaatcaatgcaaacattcctgcagtaagtacgtataaagagaagggtacaagtcaagtgggtgaactttctcaaagctcaactaaacttcaccagctgcttaacgattctccgctcgaagacaaattttaa

SEQ ID NO: 1335 - DNA, 2838 bp, Saccharomyces pastorianus
atggcatatgcagacacaccagaaaacgcgatctctgttatcaagcagcgaacggcactgatgaatcggtgtctttctcaacacaaacttatggaatcactgcagcacacttcaataatgctgacagaattgagaaacccgaatttgtcgcccaaaaaatactacgaattgtacgttgtagttttcgactcattaaccaatctgtccacctatctcatagaaaaccatccccaaaatcaccatttagctgatctttatgaactggtccagtataccggtaacgtggtgcccaggctttacttgatgatcaccgtcgggacaagctacctggcattcaacgatgcccccaagatggagattttaaaggatatgatcgagatgtgtcgtggtgtacaaaacccaactagaggccttttcttgcgctattatttgtctcaaagaaccaaagagctactacctgaggacgactccttgttcaactcccagttcatcatgaacaatttcattgagatgaacaaactgtgggtaagactacagcaccagggcccattgcgcgagagagaatcaagaactcgcgagaggaaagaactgcagattttggtcgggtcccaactggttcgcctgtcccaaatcattgatgacaatttccaaatgtacaggcaggacatcctgcccaccatcttggaacaagtcattcaatgtagggatttggtatcccaggagtatctcttggacgtcatctgccaggtgttcacggacgagttccatttgaaaactttggacactttgctgcagaccactttacatttgaacccagatgtttcgataaacaaaatcgtgctcactttagtcgataggttgaacgattacatcacaagacaacaggaggaagagccaaacgccaccgccgcaaatgcgtacctggatatggacgtgttcggtaccttctgggattacttgaccttgttgaatcatgaaagacccgatctttcgttacagcagtttattcccctaatcgaaagtataatcgttttaagcttaaaatggtatcctgaaaattttgaaaatttaaacaaactattcgaactggttttgcaaaagactaaagattatggccaaaagaatatctcgctggaatcagagcatttattcttgaatctattatcttttcaaaataacaaactccagatgtcctcctcgtccacagcgtcttctaaccaatccatcatttctaagaaacattttatttttcaattgatttctaaatgtcaggcatataagagtattctggccttgcaaaacatcactttacaaaagaaagtcgtcaataagattctagacatattgatggatgcagacactgaagaattaacggataacgaacctgaatcaaagttgcatgcctcttcacgggacaaatttcatctagtcattgaagataaattacaagtgcaacgcttactgtcgatctgcgaacctttaataatctcaagaagcggacctcccacaaacgctacttcctctgaaacaaacatcgatgaagtatttttcaatagacacgacgaagaagaatcgtggaccttggatccaatacaagaaaaattggcacacttgatccattggataatgaacaccacttcacggaaacaaacagaggaaagcagaattcaattcagcttagaatcacaattggaaatattactacttatcaagtcctcatttattaagggcggcatcaatgttaaatacaccttcccggcaataattacgaacttttggaaattgattagaaaatgccacatgatacttcagtatctcctgaagaaaagggccgacaacaagacattgtcatctcattattccaatcttttgaaacagatgttcaaatttgtttcacggtgtatcaatgacattttcaattcatgcaacaactcgtgcacagatctgattctgaaattaaatttgcaatgtgctacattggctgaccaattgcaactaggcgaaatttcatacgactttttctcgcaagcctttacaatatttgaagaatctttaagtgattcaaagacccagttacaagctttgatctatatcgctcaatctttacagaagacaagatctctttacaaggagacctattacgattcactgattgtcagatgtacattacacgggtccaaattattgaagaagcaagatcaatgtcgcgctgtttatttatgttcacacctttggtgggcaacggaaatttcaaatattggcgaagaagaaggtatcactgacaattttttcagggacggtaaaagagtattggaatgtttacaaagatctcttcgcgtggcggattccataatggataatgaacaaagctgtgaattaatgatcgaaatcctaaacaggtgtctttattatttcattcatggcgacgaggctgaaactcatatatctatgaaatacatcaatggcttgatcgagctgattaaaacaaacttaaaatcgctcaaacttgaagacaacagtacttctatgatgacaaactcaatgaacgacctgcacatcaccggagatagtaatatcaagtccaacgtcaatccggaagacggatctggaatcgccgataaggacactaacgttgccgttgggtcagatggcacatatatccaactgaacacattgaacggatcttctacaataatacacggaatagtagcaaccgcttcaggtagcaagttgttgcaccaactaaagtatattccgattcaccatttccaacgtacttgcgaatatatcgagggccaaagggaagttgatgatcgattcaaagtcatatatgtatag

SEQ ID NO: 1336 - DNA, 2022 bp, Saccharomyces pastorianus
atgccgtttcaagactattttcagaagaaaaaggctgctttcaccaacagaaacaataaaaatagcgcagaggcatcgacactgcgaagcattgctggcagtgtggaggccgccgcggccgcagctgctgcagcagcagcagccaaagataagaactacatattcccactaaccaaactccccgatgagctcatgcacgaggtgttctcgcatttgccgcaaccagaccgtttgcagctctgcctcataaacaaaaggtttaacaagattgctaccaaactgctctatagaagaatctacttgaacgactccaacgtggtgaagagtgacttcatgcacctggccatcaactggaccctgttgaacttgccgtcctcgttgaaggaggaagagtcccgtaacatcgctaactacaaactggagaagcttataaaaaccctgcaaaataatattcgcatcacacagaccgtccagtggataagaatcaactgggatttggactccgtgctccaaagatccattctgaacatcctttgcaacgagggcaagtctttgcaaagactggaaaatgtcaccgacccgagttgtaacgacatcatctccaatggccacttctccaagtttaacgtctcgagtttcgacatggctccgccaaattcattgccggaaatgtccgtccccgacaattacatcccgaacctcaccaaatatctgtcccaacgaatctcatcccgcctgtctcacatgactcttttcatcgaccccttgaaactgttcaactacctttacccactagacatcaagttgcaaatcgtcgacttgaagttgcactggaggagggagttttacaacaatgactacttcgttagcaaggtacgacccggtaatcccttgactaaactatctgaagtgtttgacaagagaactttgaagatcctcaccatcatctcatggaatgacactctgttgaagcgggagaccgaaatgctcaaggatttcaaagaattcgaacagttggaagatttgtctttgatttccatcaagcaggacgttcacattctcgtagatcttttcagctcgttgaccaatttgaaaagacttaaaatggatttcttagtggattttatagccgagcctacgagtcctcacatcttcttgtctatccttctggcttgctccaaattgcaattcatagatttgcggtacgacggccttattcctcaaatcgtcaatatccaagaaaataagttccaattgaaccagcaatgcaattgcacaaactgtcaaatagtattcagtgacattctcaagggcaaagttttcatgttcccggaggactactatattcatgatatccacgatattgcagcaaaggatattttcaaaatgatgaaatatttgtctttattaccgtactcaaaggcttgtgatgcttacccgagcgtgagaacccaaccaatgaacttggccaattttgtcaacaagatgaacttgaaccttttgaaatacagaaactccaaatcgcagctagtacctaagattgttaataatccataccaccactctacggtgacttccgcaaccactgcccgcatgagcgagcctgaaatggtagtcatcgatgacgattatgatgaagatgacattaatatggatctgcctcaggatagtgatgacactgctaccaccatttccgatgacttagaactcccacacgattccttgaccaaaagagatatcattatgtgctaccacgccctaattcatcatttcaaatcgatatatatcacttttttgaagagctttcctcaattaagattcctcatgttgaatgatatcccgacaatagtcatggaggaggataacgaacgtatttttgagcccgtcttttatcactatgattataagagtaatttacatggatggtctagggaatccaacaagaatttggaaaacgatggcaacaacaataataataataataattccgataccattgcaagaatagccactgtcatgtaa

SEQ ID NO: 1337 - DNA, 693 bp, Saccharomyces pastorianus
atgtcaaagctttcgaaagactacgtatcggactcagattcagaagacgaagtgatatcaaacgagttcagcataccaaatgggttcaagaaatgtaaacatttgaaaagctttcccctcgacagcggtaacaacaagaagcctaaacagcaacagatctggctgatcaagtttccgtcaaatgtagacatctccaaattaaaatctttaccaatagattttgaatcctccacaactatgaccgttgacaaccacgaatataaaatcacggaaaatgcgaacattgagactttattgacacagggcaaccaaagtagtatgagcttgttggttccttcagaggataaggaaaccctaaagattgccgccacaggcaaggatagcacaccattacaattcgacaaattattctctatcagcgaaaattccaaggtcccagctattgattataagaaagtgagagttcctcgtaaagacgttccaaaagtggaaggcttgaagctggaacacttcgccacaggttatgatgccaaagatttcggcgtcactgagaatgtagtaacgaaagaatataagaaggaatcaaagaaacgttcacatcaacacgatgaagagggagattctaaagataagaagaagaagaagaaggagaagaaggagaagaaggataaaaaaaagaagcatagagattaa

SEQ ID NO: 1338 - DNA, 1149 bp, Saccharomyces pastorianus
atgagaaggactttttctctgttagcaacacggcttttaaagtctaaagatgatgagctaaaatcgactctaaagtttctaaccaaaggatctatgaagtcgttaggatctctgtttaattctcctgactctaaagaacaaaggcacatgttgaaaaatacaggtgataatcaaaagagccctgaaaatcatcacgtcgataacattttaaggatattgaattcaaacttgcctgaagtggaatccaagaaacaaaaggtggccattcattatgacgtacttttctcgcatttaagatcaatagtcacacagtcagtggaaagcaaggacattgcatcgaagcaattgcgaatggcatcatccgaggatttatatgataaattgttgttactacagtatatgggtaaattaactaatgtacgccaaatatcggaaatcctactatctaaaaactttcgtaagtttggcgaagtttgggagcacagggcgttgttcgataatggtcagaaactagtcatatccatcttactatactacaggtcacgtattgcgcaaataagaaaagaatacgaggctcgctggttgtcagactacaacgatttacagtttcccttgcgacgccttttatggagatgcttaacttttaatgtagttgatgagaatattcaacaaacagtatcacattataaaaagcgtttaggggaaaattggaaaaatacggatttagtcttgatttatcaatctctgtatgaaaaatcctacttgttacctgaactaacatccatagaagacagtaataatgaaacgatcaccttcaccaaaaatcaaagattacttgtttgtgcactgaggacgatttcgaaacattttgagggggatgcaaaaacggtcaaaagatggctaaccgatatagtcaagttgagtatacagagcaaaataatgctggaatcatcagcaccatcttctacatcaataatggatcaataccgttttatcagatccttagacattttcatacaaagcatacaccggacttgccaaaataagtctacctttgaagatttaaaaaacgatctcgagaatatatcaaagctagtcaacgacgaagaacacgaattaaagacacatttaccactaaaccttgtataa

SEQ ID NO: 1339 - DNA, 1422 bp, Saccharomyces pastorianus
atggataatcagcaggagcgtatatcagaagatatcaccggcgaccttgctgctgctgttaggaaatcatggtctgaaccgcaagacaatccgctgttgctcaatgttaataactctcctataggaactcccacggatagatactcccctgaaccagtcatgatggtggaaggaaatgctttgaacccgctatctctagcaagaggatctgcacagcaccagcaaaggctgtatggctcctctcaatctcgcgaaaaatcagagcagcaacaacaggactaccaattgtttaagcatcattactctctcggacaggagacaagggagtctgtttccgacattcttaacgatttgactctgggatctccagaaccaagtgaaagtagaacaccaataagacaaccatcagtggatgttcctcctgtaaccacaaggcgtagttccattcaggatgttcaatggatcagacacttactaaacccaaggagttcattttctggtgtatcctccaatgagcctgccagttctcccgacaattcttccaatgaaagcaaagcttgggtgacgatattacatgattcatctgcagaatcattacaggccgttattgtgttggcgcagtcattgaaaaaagtcaattcccaatacggtctttgtgtattgcattctagtgaagtcaatgcctctcaattgaatcaagtggggatcaagacgttaataatagatgaatacatcaacgtttttttgaatttcggatcgtgttcaggatttagtgggagcttacaagagaccgaaaccaaaaatgatttaaattttaagtggtgtaaactatttcttttcttttcgttgattgataggttcgagttgatctgctatttatcccccacatgcgttgtattgcaaaacattgacgaactgctggaaagccctgaggtgtctgatgagattgataatgaaacctgtgttttattatcgaataaggaaaactatatttgcggagatcttacaaccgtaaagcaagacccaattcttaacgaagaagataacgaagaagataacgaagaccctcagattatcatattgaaacctaatagtgcagtcgcaatgtgtatcaaggagtacttcacgatttatggaaatgagtttgaaggtgaaagtaaaaggtcgatgtttcatcaaatgaacgatttacaaattatgaaggcattgtttggtgacaaatggggctacctggataatgatggttactgtgctgtgcccgtgaccactattcccacggacaggttaaattacaagataatcgaattcaaaatcttaaagccgtgggaaagacagaattatgttagtgctggcctgcaaccaaattctataatgaacgaatggctaaatctatggcgggactttctaaaccaagtgaattga

SEQ ID NO: 1340 - DNA, 330 bp, Saccharomyces pastorianus
atgttaagaaaaagcacttcaacgatatacacgacacacaagaaaagcaacagcagcatactcaggagccggaaggaccagaccaaggtggacccgttagtagaagaatatcccatgggtgaattcgggaccactaatcaacccgcccagcctagtgtgatatactactttgtggagttgaccaatgcaggcatacaagaaaatacaagcagcaacaacaacaacaacaacaataacaataacaataaccatgacggtggtgagagcggtgcccgttacggccacggcagcagtctgggcgggaacgtccacttgcgccgttattcgtaa

SEQ ID NO: 1341 - DNA, 477 bp, Saccharomyces pastorianus
atgtcagccgatcattccagagatccatgtcccatagtcatacttaatgatttcggtggtgcctttgccatgggtgccattggtggtgtcgtgtggcatgggattaaaggttttagaaactcgccattaggtgaacgtggttcaggggctgtgagtgcggtgaaggcgcgtgctcctgtgcttggtggtaattttggtgtgtggggtggtttgttttctacttttgattgcgctgtgaaagccgtcaggaaaagagaagatccatggaacgctatcattgccgggttttttactggtggtgccttggctgtaagaggtggttggagacatacaagaaacagttctatcacgtgtgcttgtttgctgggtgtcattgaaggtgtggggctcatgttccagagatacgctgcttggcaagccaagcctatggctcctcctttgcctgaggctcctccttctcaacctttacaagcttag

SEQ ID NO: 1342 - DNA, 2430 bp, Saccharomyces pastorianus
atgaaaacatcaaacaataacaactccagcagcagcaacagcaataagaatacgtctctgagcccgactttactcacacacagtgacaccagtatgacctcgagtagagagagccaggacactagtcatttggggggcggtatatggaatccgtcatacatgggccaaacatctcaaaggcccacactgcagcagcagcagcagcaacaacaacagcaacaacagcaacaacagcaacaacagcaacaacagcaacaaaaccctcaattctcatttgtgaacccttggggcgaggaaaaaatcactaattctcagcagaatctagtctatcccccaaaatacgatgatccaaacactaatgagagcttggatgcctacagacgacgcaaatcgagtctggttgttcctccatccagggctcctgcgccaaacccatttgaatacgacagctatcctgcttttacgaactctaacacgagtctgtcagccaacgccaacggccagttctcttctgcttaccagcaacagcaacagcaacaagcatatcagcaaagcgctatcaatccttcacagtttggctctagatttgtaccctccctttatgatcgccaagagtttcaaagaaggcagagtttggctacggcgaattactcgtctaattttccctctataaattcgaacgctaaccaaggaacaagctccataccggcgatgtcaccttataggagactgagtgcataccccccaagcacaagccctcccctgcagccgcctttcaagcagttacggagagatgaagtgcaagggcagaaattatctattccacaaatgcaaccatgcaattctaaaaacgaccttcaaccagttataaacgcaactccaaaattcaggcgtgcgtccctcaattccaagacaatatcccctttagtgagtgtaacgaaaagtttgattaccacgtattccttatgctctccagactttacctaccaaacatccaagaatcccaagagagtgcttacaaaacctagcgaaggcaaatgtaataatgggtttgacaatgttaatagcgattatatcctttatgttaacgatgttttgggtgtagaacaaaacaggaagtaccttgtgctcgatattttgggacaaggtacgtttggtcaggtggtcaaatgtcaaaatctgttgaccaaggaaatcttggctgtgaaagtggtcaagtcgagaacagaatacctgacgcaaagcatcactgaggccaaaattttggagctgttgaataaaaaaatagaccccgctaacgaacaccatttcctaagaatgcatgactcctttgttcataaaaatcatttgtgtttggtcttcgaactattaagtaacaacctgtacgaattgttgaaacaaaacaagtttcacgggttgtctatgcagttgatcagaacattcaccgcccaaattctagattcgttgtgtgttttgaaggaaagtaaactaatccattgcgatttaaaaccggaaaatattttgctcttcgccccagataagccagaattgaaaatcattgattttggttcatcttgtgaagagacaagaactatttacacctatatacagtccaggttttatcgtgctcccgagattatactgggcatcccatattcgactagtatcgatatgtggtctttgggttgtattgtggctgaattatttttgggtataccaattttcccaggtgcatcagagtataaccagttaaccagaataatagacacgcttggataccctccatcgtggatgatagatatgggcaaaaattctgggaagttcttgtcaaaattagcaccagaagatagcggcaactcctcccaaaagcatcgtatgaaaactatagaagagttctgcagggaatataatatagtggaaaagccaagtaagcagtactttaaatggaaaaaactgccggatattatcagaaactatagatatcctaaaagtattcaaaataatcaagaactaatcgacgaggaaatgcggaatagagaatgtctgattcatttcttagccggtgtgcttaatttgaatccgttggaaagatggacaccacaacaagctatgctacatccatttatcacaaaacaagtattcacaggtgaatggtttcctccaggatcttctttacctggcccatcgagaaaacacgataatacaaaaggacagccaaatgacaacagaaacactaaaaactccgacaacgatgctaatcataactacgtttacaattttaatgctggcgacggcagtgctgatagcgttgatatcggctctattggtaaaagaaatgttaatttgtctaacaacttctctatagaaagtcattccgttcaagaaggcccctcaagtgaattcaataaacttcatattgtggaagagtaa

SEQ ID NO: 1343 - DNA, 660 bp, Saccharomyces pastorianus
atgaatgtttccacatcgacgttccaaacaagacggagaagattgaagaaagtggaagaagaagaaaatgctgccactttgcaactgggccaggagttccaattgagacagataaatcaccagggtgaagaggaagagctgattgccttgaatttaagcgaggccaggctagtgatcaaagaagctctaatagaacgtaggagagcgtttaaaagatcacaaaaaaaacacaagaggaagcatatgaagcacgaaagcgccaatgacgaaacgactgctgtggaggaagacgacgaggatttagacgaagacgatgctgacgaagatgacttcatgcattctgaaactagagaaaaggaattggagtccatcgatgttctactagaacagactacgggtgggaataataaggatttaaaaaacactatgcagtacttgacgagtttctcccggttcagagaccaggaaaccgtgggtgctgttatacagctgctgaaaagcaccggcttacacccgtttgaggtggcgcaactgggctctttggcctgtgacacagcagacgaggcaaaaacattaattccgagtttaaataacaagatatccgacgacgagttggagagaatgctaaaggagctatcaaacttagaaactctctattga

SEQ ID NO: 1344 - DNA, 1191 bp, Saccharomyces pastorianus
atgtctgaaggtattactgaaattgaagactcccaaatcagtctaaccaactatgacaaagttgtctacaagttcgacgatatggaattggacgaaaacttgttgagaggtgttttcggttacggtttcgaagaaccatctgccattcaacaacgtgctattatgcctattattgaaggtcacgatgtcttggctcaagctcaatctggtactggtaagaccggtactttctctgttgccgctttgcaaagaatcgacacctctgtcaaggctcctcaagctttgatgttggctccaaccagagaattggctttacaaatccaaaaggttgtcatggctttggctttccacatggacatcaaggtccacgcttgtatcggtggtacttcttttgttgaagatgctgaaggtttgaaagatgctcaaatcgttgttggtaccccaggtcgtgttttcgacaacatgcaaagacgtagattcagaactgacaagatcaagatgttcatcttagatgaagccgatgaaatgttgtcttctggtttcaaggaacaaatctaccaaattttcacattgctaccaccaactactcaagttgttcttttgtccgctaccatgccaaatgatgtcttggaagttaccaccaagttcatgagaaacccagttagaattttggttaagaaggatgaattgactttggaaggtatcaagcaattctacgttaacgttgaagaagaagacttcaagtatgaatgtttgaccgatttgtacgattctatctccgttactcaagccgttatcttctgtaacaccagaagaaaggtcgaagaattgaccaccaagttgagagacgacaaattcactgtttccgccatctactctgatctaccacaacaagaaagagacaccattatgaaggaattcagaagtggttcttccagaatcttgatctccactgatttattggccagaggtatcgatgtccaacaagtttctttggttatcaactacgatttgccatccaacaaggaaaactatattcacagaatcggtagaggtggtcgtttcggtagaaagggtgttgccatcaactttgttactaatgaagatgttggtgctatgagagaaatcgaaaagttctactccactcaaatcgaagaattgccatccgacattgctactttgttgaactga

SEQ ID NO: 1345 - DNA, 1233 bp, Saccharomyces pastorianus
atggtagacggattgaactcttcgagcatcaggaagagagccaggacgctttccaaccccaatgacttccaggagcctaattacttgttggaccccggtaatcatccttccgaacattttcgaactcgaatgtcgaaattccggttcaatgtgagggagaaactgctggtgttcaccaacaaccaatcattgacactaagccgctggcagaagaactatcgttgcgcgtttaacgatttatacttcacttacacatctttaatgggatcgcatacgttctatgtcctgtgtttacctattcccatatggtttgggtattttgagactaccaaagacatggtctatatcttgggatactccatctatttgagtggttttttcaaagactactggtgtttgccccggcctagggccccaccgttgcatcggatcacattaagcgagtacacaaccaaggagtacggtgcgccaagttcgcacacggcgaacgctacgggagtgagccttttatttttgtacaacatatggggggcagaagcgtgccctgtcacggtacggttgctgttgacgtgtttggtcgtgttttattacatgactttagtctttgggagaatatactgtggcatgcatggactactggacttggaaagcggtggaatcattggtatagcgtgtttcttaatcagaatatacttcaagtgcggcttcccgaacctacatatcgaaaagtactggtggttccccctgctcagtgttggatggggccttattcttctatttaagcacgtcaaacccatagacgagtgcccttgtttccaagacagcgttgcgttcatgggtgttgtgtcgggcattgaatgctgtgagtggatgggcaagaggttcgggttcacatcagtgtacaacttggaacccaactgtgggtggcaacaaacccttgccaggttactggtgggcttagcgtttgttattatttggaaggaggtgatcagcaagccgttggtgtactctctgctaattaagggcatgcgcctgaaagatgacagagacatggcggcaagaagaagattagaagccacgcggaaagaggggggcagcagcaagctcgaatgtccactgtatatcggagaaccccgaatcgacatagtgggacggttcgttatttatgcgggaatccccttcaccgtcgtggtgtgcagtcccgccgccttttcccttctacatatagcatga

SEQ ID NO: 1346 - DNA, 225 bp, Saccharomyces pastorianus
atgatcgctcaaagtacaagattagccgccgccgcctccgcctccgttgcctccgcaagcgtctcgagaatagccgccggagccattgccagcgccgttttcaagagatctccgggcaactcgttcacgtcgttcaaagagtacagagagaatgccaagacgtacgggcccttaagcgcctcgttggccaccagaagacacttggctcatgctcccaagttgtag

SEQ ID NO: 1347 - DNA, 945 bp, Saccharomyces pastorianus
atggtagaggactcgtcaaatagcaatgtagtaaggccaattccggccatacccatggactcgcccgactacgaagcgttgccctctcatgctccgctgtaccatcagctaatagcgggtgcgtttgctggtataatggaacattcagtgatgttcccaatagacgccctgaaaacgcgaatacaatcaacaaacgggaagtcgctgtccaccaagaatatgctttcgcagatatctcatatatccacttcagaggggaccctggccctgtggaagggtgtccagtccgttatattgggtgctgggcctgcccatgctgtatacttcgggacgtacgagttctgcaagaagaacctgattgacccaagcgatacgcaaacacaccaccctttcaagacggccatcagtggtgcctgtgccacaacggcctcagacgcactaatgaacccattcgatacgataaaacaaagaatccaactaaacacctccgcatcagtatggcagaccacaaagcagatataccaatctgaaggcttggcagcattttactattcttacccaaccactttagtaatgaacatcccattcgcagcatttaatttcgtcatttatgaatcatcaaccaaattcttcaacccatcaaacgagtacaatcccctcatacattgtctgtgtggcagtatcagcggatcgacatgtgcggcgatcacaacacctttagactgcataaagacagtactgcagataaggggcagtcaaacagtttcgttggaaattatgagaaaggcggatacttttagtaaagcagccagtgccatatatcaagtttatggctggaaagggttttggagaggttggaaaccaaggatagtggcaaacatgccggctactgctatatcatggacagcttatgaatgtgcaaaacatttcctaatgacgtattag

SEQ ID NO: 1348 - DNA, 2022 bp, Saccharomyces pastorianus
atggaagacaaatttacgaacctcagcctccacgagaaaaccggtaagccatctgcccagccccacgaaccaacaggctcggaaaatagctctactgtcaagagaacagcgtctacgtcgtcacactacaacaacatcaatgcggatcttcatgcccgtgtgaaggctttccaagagcaacgtgcgcttaaaaggtcagccagtgtgggaagcaacaagagcgaccaggacaagggcaattcgcaatcacccaaacatatccaacagatcgtcaacaaaccattaccgcctctccctgtagttggtagttcgaaggtttcacaaagaatgactggtcaagttgttcagacttcctccaagaacactctcaagaacgatcggagtgaccaaggtactcaggacaagataatcatggaggaagctacgagtgccagtattagcgttgatacgactaaaatcatcactacagcggttggtgtggccactgatctatctgcaaacggcgttacgccggcagcttctaataccgcatctgcagcacaaaaggctcaattgctgaatcccagcagaagagcgccaaggcgaccattatcccttcagcacccaacgaggcccagcgtcgctccacataaagcccctgccattataaacacgccaaagcaaagtttgagtgcccgtcgagggttgaaattacctcccggtgggatgtccttaaaaatgcctagcaaaagtcctcaacagccgcaacaatttgcaccaagcccttcaaacaagatgcacatagaaactgtatctagcaaagctgtggaggggaaaaagtcgaaccctggttctttggtaaacggtgtgcaaagcacttccacttcatctagcaccgaaggccaacacgatactttaggaactacaccccgaactgcaaacagtatcaattcttcaaattcaggtagtagtggtggcggtggactctttgcaaatttttcgaagtatgtcgatatcaaatctggctcgttaaattttgcaggtaaactatcgctatcttctaaaggtattgatttcagcaatggttccagttcaaggattacattggatgaactagagttcttggacgaactgggccatggtaactacggtaatgtctccaaagtattgcataaacccacaaatgtcattatggccacaaaggaagtccgtttggaactggatgaagccaaattcaggcaaattcttatggaattagaagtcttacataaatgtaattctccatacattgtggacttttatggtgccttctttattgagggggcagtatatatgtgtatggaatacatggatggtggctcgctggataagatatacgatgaatcatctgaaattggcggcatcgatgaaccacaactagcatttattgccaacgctgtcatccatggattaagagaactgaaagaccagcataacatcatacacagagatgtcaaaccaacaaacatattgtgctctgccaaccaaggtacagtgaaattgtgtgatttcggtgtttcaggtaatttggtggcatctttagccaagacgaatattggttgtcagtcgtacatggcacctgagcgtatcaagtccttgaatccagatagagctacttatacagtacagtcagatatttggtctctgggtttgagtatcctggaaatggcattgggtaaatatccatatccaccagaaactttcgacaacatcttttctcaattgagcgccattgttgacggaccaccacccaggttgccatcagaaagattcagtcccgacgcacaagattttgtttccttatgtctacaaaaaatcccggaaagaagacccacttacacagccttaacggaacatccctggctggtaaaatacagaaatcaagatgtccaaatgagcaaatatatcacagaccgattagaaagacgcaccaaaatcctacgggaacgtggtgaaaacggtctatctaaaaatgtacctgcattgcatatgggtggtctataa

SEQ ID NO: 1349 - DNA, 159 bp, Saccharomyces pastorianus
atgatatttttcttcaaccaggtccgctcgatctttacagctttgcacacacccactcaacaaatcaagttgtcaagaagggcctttttccaattcttgggctacttgggcagttgcgttgtgatttcattagcagctcaatcgaagtacgttgagtga

SEQ ID NO: 1350 - DNA, 924 bp, Saccharomyces pastorianus
atgagccacaaattcagaagggttgctgttgcccaactatgttcatctgctgacttagccaataatttaaaagtaataaaaaaactaatatctagagctattcaagatgaggcagatgttgtgttttttccagaggcgagcgactatctttctcaaaaccctcttcactccagatatttggcgcaaaagagtccgcaattcatccagcaattacaatcgggaatcactgacctcgttaagcaaaattcaagaaatattgatgtttctattggagtccacttgccgccaacacagcaggatctgttgaatggtaatgatcgggtcaagaatgttctcctctatatcaattacgaagggaaaatacttcaaaagtatcaaaaattacatttatttgacgcagacataccaaatggtccaatcctgaaggaatcaaaatcggtccaaccgggggaagctattcccgacataatagagacaccattgggtaaattgggtagcgcaatatgctacgatattcgcttcccggagttccctttaaaactccggtctatgggagctgaaatcttatgtttccccagtgcatttactaccaaaacaggggaggctcactgggagctactgggtagagcaagagcggttgatacccaatgctatgtggtcatgccaggacaagaaggtgtccacgacctttgcgatccagcatgggagaaacagcagcatataattgcttcggcgaagagccctaagagagaatcttggggccattcaatagtggttgatccttggggaaaagtaatagctcgtgcagacccaaattgtgtcggtccgcagctttttgttacagatttggactttgagttgttgcaagacataagaaacagaatgcctttgtggaaccaaagaagagacgatttgttttattga

SEQ ID NO: 1351 - DNA, 519 bp, Saccharomyces pastorianus
atgccagcaaataacagggagagaacccaatccggtcaagacaataaacgacaacagcaacacttctccaagaagatttcggaaggtgaagcagatttatatctcgatcagtacaattttactaccactgccgctattgtaagttcagtggaccgcaagatctttgtccttttacgtgatgggagaatgctgttcggagtattgagaacatttgaccagtacgcaaacttgatactgcaagattgtgtggaaagaatatacttcagtgaagaaaacaaatacgccgaagaaaaccgcggtatattcatgattcgtggtgaaaatgtcgtcatgctgggcgaagtagatatcgataaagaagatcaaccccttgacgccatggagcgcataccattcaaggaagcctggcagattaaacagcaaaatgacgaaaaaagattcaaagaagaaactcatagaggtaaagaaatggcccgtcatggtatcgtttacgatttccataagtcagatatgtactag

SEQ ID NO: 1352 - DNA, 531 bp, Saccharomyces pastorianus
atgccttccaagaactcaatcaatagacctaagctaacttcaaacctgaaccacagggtgcactctttgggtaagaagagagctcaaagagaaaaagcaggtctgttgcagccagccagatccagcgcaaactctagatccggggaaatcaaatctgtagcactggacctatatttccaaaataagaaggatgcaggcgaaacttccaccgctgtgaccttaccaacaccaccaactcacccagcttccatcactacaaggaccctttccaagaagagggctaagaaaatcgaaagaaacttgaaatacgctgcgcaaagaaaactgttagtcgatgcaagtgctaaagtagaagacgatatggacatcgacttggacagcaccaagaaggtgaaagaaaatgaaaagaagaaaagctctttgactttggttaaggaagctttgtggaatgtgattgacgacacctcgtctcacggcttactcatcgagaacggacaaggtactactttgggtggcccattcttcccatga

SEQ ID NO: 1353 - DNA, 936 bp, Saccharomyces pastorianus
atgtcggcacaacaaagaaataagaattccggcagaaagtccgataaaaacgccccatcggtcccacaagtggatgtgtcactacataaaccactagatatcgatgctccccccactatctacagcgtcaatctgaagccagcgtacggcactgctgcattgaatttgtctgccgatttcatcaagcaagaacaagcattagccaacaagtacttgttttctcaccctctcgttatcttcattctaaccgttggccttgcagtttatctggctccaaaaatcgtcttccctatcagaaacactgaatccatttccggatggttctaccaactggcccgcatcaatgggaaagatgtccttactggtatagtgttcaccgcaatcggtgcatctttcttgttcactcttctctcccgtgtgtctgatgcgtattttaaatccaagatcagccaactggtcgcttccaaaggtgggaaagtcttcggtatcaacctgaacgatttggtgtcaaagaacgaaaccgaagacccagtggtaaacaacacacacattatcgtttacagagaaacgcccattgcattgatctcgttggcccctaacgtggctttgactaccaaggaaaatttagtcatgagcgtcaccactgtaggttgtcgtcgtgtgtacgtcaagagtggtattattgaagacttgattgactgggctttgttgcattctaaaatcgttagaaagaacggtgaatacggggagaccatgaaactactaatcgacgtctactcattcgataacacactaagggaaattttgaagaagaaagggttcacttatattcaaagcatcagagtttctgaaaatagactactaggcggattgtttggtgtcaagaaggagttatggggtttgcaattccattttgaaagtgaagacaaggactaa

SEQ ID NO: 1354 - DNA, 996 bp, Saccharomyces pastorianus
atgaagttttccacagctgcgttattatcttccgtcgcttccgtcgctcttgctgctcccgctcctgctgacggccatcatggagaccaccacaaggacggaaagcctgccgtcgtcaccgtcacccagtatatagagtccaatgccgatgctacggccgctgcgccttctgccgccactaccaccactttgacctcttcggaacacaagcgtggtaacgggttccaggacggtaccgtcaaatgttccgactttccctccgccaacggtgtagtttccttggattggctaggatatggtggatgggcctcagtgatggacatggacgccaattactcgtcggaatgtcaagacgggtactactgttcctacgcttgcgaacccggtatgtcgaagactcaatggccttctaaccagccaagcgacggcaaatccatcggtggtctgttgtgtaaaaacggttatctgtaccgtaccaacacggacaccagcgacttgtgttcgactgaccagacatctgccaaggctgtcaacaagaaatccgactccattgctctttgtagaactgattacccaggctctgaaaacatggtcattcccactctagtggatgggggtgattcccaacccatctccgttatcaatgaggacacttatttccaatggcagggtaaaaagacatccgctcaatactacgttaacaatgcaggtgtttccgtagaggatggttgtatctggggcacttctggttcagacgtcggcaattgggctccaatagtcttgggcgctggttacaccaatggcgaagcgtatctgtcgttgattccaaaccctaacagtaacgaagctgctaacttcaacgtcaaaattgttgcatccaacggtggtgacgttcaaggtaactgtgcttatgaagacggttccttcaccggcgatggttctgatggctgtacagtctccgttctatctggttctgctgaatttgtcttctattaa

SEQ ID NO: 1355 - DNA, 852 bp, Saccharomyces pastorianus
atgtcaattgtatcactattaggtatcaaagttttaaacaatcctgctaaattcacagacccttatgaattcgaaatcacgtttgagtgtttagagtctttaaagaatgatttggaatggaaactgacctacgtcggttcgtcccgttctctggaccatgatcaggaactcgactccatcttggttggcccggtcccgattggtgttaacaaattcatattctctgccgatcctccctccgccgaactgattcctgccagtgagttggttagtgtaaccgttatcctactaagttgttcctatgacgggagggagttcgttagagtgggctactacgtaaataacgagtacgatgaggaagagttaagagagaacccgccagcaaaggttcaggtcgaccatattgtaagaaatatactagctgaaaagccaagagtcacaaggtttaacatcgtttgggataatgaaaatgaaggagacctgtatccgcctgatcaaccgggcgtagatgaggaggacgatgacgacgaggacgatgacgacgatgaggaagaagatgatgacgttgacgaagaagaagagaacgaagacgaagagaacggagacgaagaggctgaggaggaagccgaagaagacggcgacgaagaggaaaagaccgaagataatgaaacgaatcttgaagaggaggaggaagatatagaaaacagcgatggcgacgaagacgaggctgaagaagaagtaggcccctcaaacgggcatgaagacggcagtgacaagaagaggaggaaaacaggggagcagcccacagatatcgagtccacgccaaaggacacagcacccccaaccaattag

SEQ ID NO: 1356 - DNA, 2136 bp, Saccharomyces pastorianus
atgtcagtgaacgaccagataactcatataggaaaaacattgtccacaacggcgtccgcctttctgagctaccaaaaatcaaacagcagcactcaggatgtactaaccaatagtaaaccttaccaaaatttgttatctaacactgttaataatgtcaactcaagcccatacctaaaaaaaagaaatgaacaattgccccttatgagaaatggatctaatactcttgaagatatttattcgaaaacgagaaggggcgatgtatttaagaacaaatttacagacaacaagacatgctttagaatgcacacatacataagcgatgacttgttgaatgaaattccaactagagagggtccaagaggtaattacacgaatagcaacggtaagcttttgaaagaaggagaagagggcgaccattctaggaagaacacatccaagaaggaaccatctttatttcaaggctttaagagctacctaccaatagctgaactagccattgagaacaccgaaaagttgaaagatgatacggatgatgcaggaaacgttttgtctaaaacaacagaactagaacgcatagtcccagacctacctaatttccaagattcgttcctcataccgccgggggtggaaactaaaaaaataagttcttcctattctcctactgcattgaaaagtttttctcaaactctcgtaaatagtctagagtttttaaatattcaaaaaaattctacaatatcagaggtaaaagatatagatgttgaaatcgaggacctaaagcaaagaaaagagaaactactgagtaagattgcaaacatagaacaaaatcaacttctcttggaagacaatctcaaacaaattgacgatagaatggatttcttggaagagtacggattagagatcattgaagctagtagtgatgaaaataacaatatagaggatgagaatacgagtgatgacgcagcagcttccacaaatggcaaatggaatggtactgcaaagagtattacatcagaaactgcctctttacctacgagaagaaggcaacaacaccgagatgataactcatcaaataagctaggcgcattttatagtaagtccaaaaaaagacgtagaagaagctttccaacattccaacaactttatgaaccaggaacaaaaatcggttccatagaatccacacatgatgattttattacttgtttagattttgatgcgccctttggcactttgtgtacagcaggctatctcgatcacacggtcaagatatgggatttatccaagcaaaagaaacttggggaattagctgggcaccttgccacaattaattgcatgcaaattgatcgtgataacggaacacttgtcacaggtggtagagatgcagcattgaaattatggaacttaaatttagctcaacagctttaccaagaaaaccaaaacatcacttctcccacaagccatattgattcaccatgcgtttatactttcgaatctcatattgatgagattactgcattatcattggattccgattttttggtcagtggttcgcaagatagaaccgtcagacagtgggatttacgctccgggaaatgtatgcaaactatcgacttgagttttgctaatgtcttatcaacctccaccaatgtagatttatcaaagagcacgcttcttacccaaagaagcgaacggcccagtataggcgcccttcaaagttttgatgcggccttggccacaggtacaaaggatggtgttgtaagattatgggatttgagatccggtaaagtaatccgtactttggaaggccacacagatgccataacatcattgaaattcgattctgcatgtttggtcacaggctcatacgacagaaccgtcagagtctgggatttaagaacgggatttctaaataagttccatgcatacagtgcacccgtgctatcattagatttctcacaggataacgccgccgttgtagtcgctgatgaaacgtctgtccaggtgtacgatagtatcaaggatgaaagctggccctgcgttgaacccgacaacgaaataaacgttactgccgttaaatacaaagaaaattacatggtcgagggccgtggcaatggaagcgtgcatatttgggcagtctag

SEQ ID NO: 1357 - DNA, 1944 bp, Saccharomyces pastorianus
atggttgaaaaacgttgtaggcaaagttccagcagtggttcagagttcagcatcccgccggatgtcgacaacccacccctatctattcctttgaagactctatctgatagataccaactcatcgaaaaactgggagcagggtcgttcggttgtgtgaccttggcaaaggcacaattctccttgtcaaacatattaggtagacaacaacaggatttaaggggtactttgatggaccagcccaaaaatggacatcataactatataacaaagactcaaggtgttgtggccataaagacaatgatgacaaaattgcacaccttgcaggattacacaagggtccgagaaattaagttcatactagcaatccccgcaaatgatcatttgatacaaatttttgaagtattcattgattctgaaaactatcaactacatatcgtgatggaatgtatggaacaaaacttataccaaatgatgaagcatagaagacgccgagtcttttccattccttctttgaaatctattctctctcaaatattggctgggctgaaacatatccatcaagaaaatttcttccacagagatttgaagcctgaaaatattctgattactccaagcacccaatatttcgataaggaatatatgaaccggattggttatcaagataactacgttatcaagctagcagattttggtttagcacgtcatgtagagaataagaacccatatactgcctatgtttccacaagatggtacaggtcacctgaaatactattgagaagtggatattattctaaacctttggatatctgggcttttgggtgcgttgcagtggaagttactgtttttagagcacttttccccggtgctaacgaaatagatcaaatttggaagattttagaagtccttggtacacctatcaaaagtccagattttgctaatacaaaccatattattactcctccacctggtgggttttgggatgatgccagtaaattagttcataaattgaacttgaaattaccagatgtggagggttcttcattggaccatttgctttccagttcccagttatctgacttgtctgatgttgtcaaaaaatgtttaaggtgggatcccaatgaaagagccacagctcaagagctatgcgaaatgccattttttgaaaataccgtggcatctcaagtggagacgagaacagacacaactaacacagaacaagcgttgattttcgcaggcataaacccactggcagcaaaaaatacaaagccattatactttaattcctcaaccaaagtgccggttgaaaccgagtctcacgattttgacatcaaccacaacgacaataactctcaaacagtgtgtacaccaaatttgaatcaagaaaaactaaccttggtagaatttttaaacgagttcgttgaagaagataacgatgaccattcaatacctgacgtggatacggattccaccatttcggactctattgatgaaacggacttatcaaaagagatccgtaataacttggcactgtgtcaactgcctgatgaagaagtcttggaaaattcgctatccaatattagacagttgacaaatgatattgagatcataaataaagatgaagcagataatatggaacaactattttttgatttagagattcctgaacaagacgaattccacaaaaagcaaccgtttaatgagcatacagattttgatgaagatattgtcttaccatttgtaaacgattcgaattatacacatactgaaaagccatatcaaaagggtagtaatttcctgggtaatgcatctttaggcgattcatttaattcaatgccagactttactccaagaaatttcttgatacctacattagacaaatcacaggaaaagtttgagtctcatttatctaatcaaaaccaacattttgggaatataaccttttag

SEQ ID NO: 1358 - DNA, 450 bp, Saccharomyces pastorianus
atggctcatagggctttcatacaagtcataatcacaggaactcaagtttttggaaaagcattcgctgaggcttacagacaagcggcttcacaatcagtaaagcaaggtgctactaatgcttcaagaagaggaacaggcaaaggtgaatatggtggcattacattagatgaaagttgtaaaatccttaatatcgaagaagcgaaaggcggcttgaacatggacaaaatcaacgacagattcaactatttatttgaagttaatgataaagaaaaaggtggaagcttttatttacagagtaaagtttatcgagcagcagaaagattaaaatgggagctggctcaaagggaaaagcaagctggggcgaaggcaggggacgcctcaacgtcgagacctcctccaaattcaacaagtccacctggtgcagataaaaatgcaagccccaatcaatag

SEQ ID NO: 1359 - DNA, 1863 bp, Saccharomyces pastorianus
atgaccaaaaagctaccctcagagttgaagcaaacgagaaggtctatccagactgcctgtgagttctgccatactaagcacatacaatgcgatgtgggtagaccatgtcaaaattgtctaaagagaaatgttggaaatgtttgcagagacaagaggagaaaatcaaggaagcgggtggaaaaacataggatacatggtgaaccgtctttggcaaagaggcagacgatacatgatgtaccatcaaagacggtttcgccttccagcgtacaattggagttcaaggcgcgaccccttttggaacagcgggattttttatcttcagatctgaataaggctactcgtcctactactattcaatatacgtacaatatcaatgataatattcaaaacgcaggctctataccccgcataacaaacttcaatacaaacaacggtcgtgccgccttggaaaatgcatccaatgatataccggccccacaaccattgcatttagtcaatgaccccatcgtccccaccttacgaaagagcactctaaacctgaaatcacatttcttagaacaaggtaaagccatgcatcaaccagtggttgccaattcgttggttactaccacttctaatattccggtgcatcccggattaaatggcgctaatgaaaatgacgatgccgatgatgaaagtaatattcattttgatagtatgtggtgcaatgacgagtacatgaaactgaaggatatagtagatttttcaacgccgtatataccgaacaactcccagattttttcacaccaagagacgacgttccctaacggcaatacgcctatgaaaggagactctcctcttcatttagcgaatcttttaaacatgacgaaaaccactaataataataaacaatcttccattggtggatccgcctctactttcaacgcgtatgatgaaatcgtgtccaggccctatatttcattagatatgttgcattccaactccaatcccaacgtaaagccgaattcttcgattactgagaaagcagaagagaaaggtgatatctcagattcgggccaagaaaagcgtgatagcgattttatatcaccttcaaagtttcgtgagttagtgaagactcctcaggacttatatgacaacaaatttataataaaacctcatgactataaactcgcgtacaccaaattgttagcctgtctaagaaaaaaattcatcgaagaaaccaaagatgaacaatctggttctgcagagtttggaaagcataaccgaggaaaggacttaactcatgacctgcaggttataatacgatccatattggaacggtatgctccaattttcatttcattgacttctaatatgatcgaagaagatttgttattacaggaagtcactttgcagagagctttattagacttggaaaacatggcaaaattagtaagctgcacgccaatatgtatttggagaagatctggggaaatttgcttcgttagcaatgagttttattctttgacggggtttaataaaaatgtaatattagaccggaattcattcatattcgagtttctagatcataaaagtgtttcaaattattttcaaatttttaacgaattgttggcctttggttacaatgatattaacaaaaaaaaaaaactattgatgttaaattcatcgtcttcaacctcgtctaagattacagacggattttcttttactactgacgggaaagccatcttcactaaatgcaacttattattgagtaacggcctgtatttgaagtgtgcttgttgctggacagtaaaaagagattttttcaatattcccatcctggtgatgggtcaattcttaccgatttttgatatggattag

SEQ ID NO: 1360 - DNA, 1824 bp, Saccharomyces pastorianus
atgagcaccgaaataccacaacatgaccacaccacaaaccctcaccaaacggtgacagtaaacagctacgattggttacaataccgtgatcagcaagaacaccataaggatagaaacacaatagtgtacgcgtccccaggaggcagcctgagtacgaacacttcagacacgccgctgggtccgcagccctttagcccttcccgcgaacagctggccaacgtgttattcgagagcccgcgacttgatcaaggttcagggtctaactctgctattgaggtgctttccgacacagggaataaagcattaaggcaagaggataatgaataccgttacgaaattcagtattcggtgtttcgtcccttacaagcgtatccaacaaggaacttcatgtatgaacaactccgaagaaaagaagaagaagaacagagaagaaacttcgaccatttggttactgactgtatagaggcctcggagaagtttggacgcgagttagaaaggattaaagcaggctcaagtggttcatattttgtgtatggaacatcagccagcgaaagcaaacctgtgggcgtattcaaacccaaggatgaggaaccatacggcccgttgtctccgaaatggaccaaatgggctcatcgcacgttttttccatgcctgtttgggagaagttgtctaatacccaatctcgggtatatctgtgaaagcgcggctagcttgctggatagacggcttgaaacgcatctggtgcccttcacagataccgcatctataaagtctttgaatttctatgataacaggaaaaaatggttacttggatacagtttccaaaagaagaaacaaaaaaaactgggctcattccaactttttttgaaagactatgtcaacgccgatgagttctttgataggtatccattgccgggaatgtatcttgatgttaaacattcatttcaccacaaatcaggcgaagacgacagcaatataccagagggaagcacgaacataataaaagatacaaaatcgcccaagcaaataaactcttcaccgacatcggtcgattctgaagaaagtgcagaatttgagtggacagaacagagtttaagccaatttagattagaactagaaaaattgatcatcctagactacataatgagaaacacagatagaggccttgacaattggatgttgaaattgatcaaactgcccaataataagtggaagattaaattagcggccattgacaacggtttggccttcccatggaaacatccagacgagtggcgtttgtacccatacggctggttgtatttacctttgcacatactggccaaaccgttttccgaacaaataagatcacatttcataccaatcttgacaagcaccaaatggtgggaagaatcataccaagagtttttgactctcttcagcagagacgaagatttcagcgtccgaatgtggaaaaagcaatgggcagtactaaagggccaagcattcaacgtcgtggaaactctgaaagacccacgacaaggcccattggaactggttagaagaactagatgtcaggtagtagacgaaaagatgcaagttccctgctgcccacctcccctttctatctttaaaaacgctatagatgaacctatcggatcaaactcctcttcaccaatggtgcttcctagcacgccaaacacgattccatctcatgtacacaggcaagatgacagccaccctgtatattatgattccagcctccatccttttgcgaacaaaaaaactgtgatggtagaacgattacaaatagttaattccacccctgtattcacctggtgctga

SEQ ID NO: 1361 - DNA, 3186 bp, Saccharomyces pastorianus
atgtcaggatccttttggaagtttggacaagacttcagcacacagtctaccctatccaagctactgaatagagcttttataaagatcgatggcgacattactactgtggaagaagaagggaagactaatgttagtatagttgatgagaactcggaaaggagttcttttaggtcggaggatgaaggggacgaagaatgtgagttgcctaacacggaagaagaatacaaagcttataaaccaaatctgtacttattggacgatctcttagatgatgaagagctatacacggaactaatgtgctcgaacttcaaattgctaatatttttgaaataccctgaagtcctatccaaattgattgattatgttagaaataataccatactggatcccagcatcgatagagttatttctgaagacaccaagttggtatatgaaaaagacgtggacactatggatagtcctgacgatgaaacagaagattcagaaggcggacgaggcatctccaaaaaggaacagcgaggtgacgacgacagagaagaggaaaaagagattgaagatgacgacaatgcgtctgaagacacgagagtaacactacctcctgaaacagaagaacacgatgacatccgaagggccaggatagcagctgaaatattatctgctgacgtatggcctatatcgtctgctttgatcgaaaatgaagaactcctgaccaaactctggtcgattcttacccactctactccattatcgatagaggcatcaacacacttcatgaaaataaatgagcgtcttttggatatggatatggacggagtcatcgaattcattttaagaaaagaacacattgttgacgatttcttgaaacatattgataatccgcctttaatggactttttattgaaagtgatatcaaccgataaaccggaaatatcaaatggagttattcagttattcagaaaacaaaatttagtctctaaattggtccatttgctcgatcctgtgtttgattcttccactcaatccgcagcaggcgacttcttgaaggcactagtcaccattagtggtaactgccctaatgaaattgcgtcgagtattgggcccaatgagttaacgagacaattggtttcccctactatgatgaaacaacttatggacataatgcttaagggaggcacttcactaaacaatggtgttgggattattatcgaactaataagaaaaaacaactccgattatgatgttattcaggcgaattataccactatcaaatctcatcctccaacagatagagacccgatttacctagggtatttagtcaaattattttcagaacgcatgcccgatttcaacaagatactaactgaaaagaaaatcacccccttacagacctcctatggaacaattgaacccttggggttcgaaagattcaaaatatgcgaactcatcgctgaactattgcactgctcaaacatgactttattgaatgaaccgaatggttacagtattgttaaagaacgcgatattgagagagataggattttcattttagaaaatcagcttcactttaatgattgcgatgaatcaaaagaagatgaggttgagaacgaaggtgacgctaatgaagaggatgacgatatgaaccaaatcgaatctgctggcacatcaatagatggggaagaagttattgataaattgaattctttacaaatagagaccaataaagtaaacctcacaataagtaatgaagagaaggatgatgtggcgccagactttaacagtggaagtctacaagatgaagaaaatgaaaatccatttgaaccacagtactcggatgtcattctagattcctctgatatggaaaaggaattccgcatttctccaaacattggtgatcaaatgaagattgccctacaggatacgagagtaatagatactatgcttgagatgtttttccatttccggtggaacaactttctccataacgtagtctatgatgtcattcaacaaattttcaatggcccgctgaagataggttataatagattccttttaagcgatctcctgaccaacattcgcttaactgatatgattatcaacggaaacaacgagtgtgtgaaatatgaggaagcgcataattcaagactcggatatatgggccaccttaccttaattgcagaagaggttactaaattctctgcatacattgaagaaatgaatattagctttgacaacaaagaagtaatgggctctttattcgaagaacaatggatcaaatacaccgagaatgtgttagaagacttgaaggaaaaatacaatgccatattaggtgatgttgctgaagaaggagacatattggatgatgaagaggaagaggttgtttacaataaggggatgcatcctggcagcactgtagatgattatattaatgatatgatgcaaatggataatgaacataaccaagaagaagggaatgatgacggagaagagtatgatagctatgatgaagatgaacctcgggaataccatgacgataaacctagtaagagaaaagcgtccgatccatcaaatgatgagcgtgaccaaacggaactattttacgaatacgtcaacgaagatggtacaaaaacaaggctgaaattcaacccacgtcctgattctaccgaacacaatttagaggagctggataataacagcgaaataccgttaaaactcaaacgaagtttcacagatgcatacaaagctgaaatagtggcacaggacatcggtggtcacactgaagaggaggacggatttcaactggatgcggatttgaacgacgactgggagtcatcatcttcgaattcgttgcccaagagagcttctccttccaaaatcgatataagctcgcccgtttatcaacatcagttcgaacttcatagccccaccgataacagtggtgattacaagggtgtaatttcaagcgcgaatggccataacttcgacatagatgaagaatatgacgaattaagcgatgatagcgatgaagaatatgataattgtgaagatgaagaagatttagatgatgcgacttccggcgcatatgcattatgtagatccaaaagtaaagacaagatatcatgggatgaagaggagcaggcgcgactaatgggcgttgtaaaatttaattcagagcattacagggactag

SEQ ID NO: 1362 - DNA, 3522 bp, Saccharomyces pastorianus
atgtcgtcaaataatgatcttttgttgcatataatatctcaattaaatgcgcagcagcaagcggcggctctttatgaccatactaaagggctgcaggtcatagccggccccggtacggggaagactaaagttctgacttcgagggtggcctacttgattctgcaccaccatatgcatccgcgcgatatcatagtgactacctttactaacaaagctgctaacgagatgaaagaacgtcttcaggaaatgctacgcggtacagatgtcaatgtctcagaactcctcattggtactttccacagtatttgtctaaagatactctataggtttgggcacttggtagacctacagaaggactggaggatcattgatgaaaaggaaatagatgttattttggatgacatggttgaaaaagttcccgaccaaataagggattacgcctcctcaatttcaaggaaagtcaacttgtgtatgcccaagaagaatggtgatgaatggtgcatccatccaaagcaaatcaagaaacagatatcaaggctcaaatcaaacgcaattctgcctgaagaatacgttctagactcgaaccatgacactgcgttggctcatttttatcaaatctatcaatcagagctaagcaaaaagaacactttagactttgatgacttgttgatgtacactttccgcctgttaactagagagcgtgttttatcgaacgtcaagcatgttttagttgatgaatttcaagatactaatgggattcaattagacttgatgtttctctttgccaagggtaatcatcatctctcgagaggaatgaccattgtgggagatcccgaccaaagcatatacgcctttaggaatgccttggcccacaatttcttggagatgggtaggaaatgccccatcgaatactcgactattgtactagtggaaaattatcgttcatcacagaagattctaaacacaagtgaaattttgataacacagcagaacaaaggacgtcagaatagagctccacttcgtgcccaatttgatttggatttcccccctgtttatatgaattttcctgcttattttctggaggcgccttccttagtacgagaattattatacttgaaggctttaccaaatttgttcacatttaacgactttgccattctagtaagacaacgaaggcaaatcaaacgaatagaaaacgttctggtagaacatcggataccatacaagatcataaggggccataccttctgggattcaaaagaaacaagagcgatgttaaacttattgaaattgatattttctccaaatgataaacatgcaattctggcttcacttttatacccggcaagaggtcttggtcctgctactagtgagaaaatcaagaacgcgctagatacacttgccacagatgtatcatgtttccaaattttaaaagacataagtaataaaaaaattgctttggatataccgacgaagggtcgttctgttatagcagattttatctcaatgatagaaaattgtcaattgttgctagacagtactctactcggaagtcttactgatctatttgataaactttatgaactgtctgggctgaagtacgaatacttatataaggatggcaagaagaaaaccgaacaactggaaaaatctgaacctaatttattaaacgtaaggcataaaaatattgaacttctgaagaactatttcttagctctcgttaataagtcggaagcttcagataaagaaaaaagcgagagtccgaatgcgaaaagtgacagcgaagaccctgttgaagacaaagataccactccaaaggaatatctccgcaattttttcaactcattgtcgctccattcggacgcagctgaagaagaagaatcagaatccaacacaagtgcaagagtgaatcgagaaaaaaacgggttcgttacaatctctacaattcatggtgccaagggtctcgaatggccagtagtgttcattcctggctgcgaagaggggattattccttgcgtattcaacgatgataaaaaggacgaatcagaagaggacgacgaggatgaatcagataatggtaaaaaggatacgagccctaaaaagagtaaaatatgttctgtggaagattctatagatgaagagagaagaatgttttttgttgcacaaacccgtgctaaatatcttctttatttatcgaataccacaacagcagaagacggtgatagaccacgcattgcgagtcgattcttaaccacagacttagtaaaagccatgtccgatagtcaaaaattatttgagagcacgagtaatattaagaaattgtatcgtattttgaacaaaaaaccgcctgctcagactgataaactcttctccttggaccaattgcaaaaagactataaccggttcattgagaacagaagagaaagaatgatttggcagggaatacaaatgaatgacatctacggaatacaattatctaaaaacaaactctcaggtactgttaatgattttacatcagctgcagaccaattacgacttgaaacgaatcgttctatatccccgcaaaggaaacatgctccgagaatattcccacctaaagtcaatggaagttacgctcctaaaaatatggttagaagtccggaaaaaagatacgctccagaaactacatcttacggttctttagcaaagaaaaaggtgtatgcgcctcagtacggttcaacgaacagtgtaccaaatcgtcaagtatttcactccgcaactgggaataatgttccttttttaagaagggaagataggtcaatcactgatttatctccaagatcatcaacaaggtcgttaagaggcgcgtcaccaggtagaacgagtaatatatcagacaatgtagtcgcgctatcaccaacgaggcctttgaaaaaaaaatctgttaataatattcatgttccaactgcaggcacgtttagaattgaagcccaatcgaactgcgatgtacaagaacgctcaaaatactttagtaattcattaacgtctagtgagtgctctaatctttctagcacaagcgctaactctggccagtccaataacttgatacaaaatatcaaagacgagttagatttatccgacgacgaattactaaatgatatatcaatagaaaggagaagagatcttttaaccccagggattacaaagaaagcaaaatcaagatctcgaaataggcggtccaaagtagaggagggaggtgggagtgaagaagtcatagatttaaagagcgaatttgaagaagacgatagtagaaatacaactgcggctgagttattacataacccagatgacaccaaagttgacaaccgtccgattatctcgaacgcgaagtttttggctgatgcagcaatgaagaagatccaaaaagcatcaagcaaggtcaagaatgagtctgcgtcaagtcaaatggatatattctcccaactgacgcgagcgaaaaagaaatcaaaattaaacaatggcgagattatagttatcgattag

SEQ ID NO: 1363 - DNA, 2280 bp, Saccharomyces pastorianus
atgaaacccttccaaggaataacattttgtccgactgcaataaataatgaaatcttatcaaagaagatatccaagaagatcatcaagttgggtggcatattttctaaagatctgaccagacaggtcaatgttcttatcgtcggatctactactaatacgaacaagttcaaatttgctgtgaagcacagatttgacatcatattcattgacatccacgcaatcaacgacatctaccagctttggttatctggagaaaacgtattgccgcaatccggcatcgctgcgacaacgaatatcactcatgaaatgttaaaaacgctgtatcagcgattttcgttcaaatttttgcagaacttcaatatcttcattggcagaataaacgatgcgaaaaccacgtccattgattcattgattcagtccattaagaaattaggctgttcaagttacaattaccaaaattttgtgattagagatacggcctcccatgatgatgataaccaagacccggacgcgcagatatcgatctttgttacggattcgttgtctggcgcaagagttagtgccgccatcgcccaaaacttgcccatcatacatttcaaatggattctggattgccaaaggagaaatgcgctactaccttacgatccttattatcttttgccgaaactgaaagatttggcctatgattctatcggtttaaattcttgtgattgttgggataagataaattccacttttccaacaaatacaaatgatcgctccttcctacaaccacaatcgtcttccgctactccagcactcccgaaaacgtcttttctgttaaataagttcaagccgaagggtgacaagatttgggacaaggcaatgtctctacagcaggataataagacgaatttttctgtacttgcacacacttcgccatcgatggataacgaccatcaaaacactatatcgacgttgatatttagtgactgttcatttgtcatccaccaaaagttccctgccaatcatcgatcaatactaactaaaattatcgttcaaaatgggggtagggttgaaaattctcgcatggacagcgtatatgaacattcatatttcgtcattccaagtgactgcccccttgattcattcgatgatttacctggcattgctgatgacgatgacggcatagttacagaatttttcgttgagcgctgcttgtattatcagaaactactagacccaatagactcgtggtcgagaccttttctcaatacactggacttccaggtgttattttcaccaaaattattgcatcacgacgtttcatcttcgtcttttttaaatgttaccattactggattctcgggtgtggaactattacatctgactaaaattctaaacttcttaaaaccaatgggtatccattatgcagaatacctgaacatgtctactgatattctgttgatcaacttggcggcattgcctagtataccaaagactcacccgctatggtcgaatgagttcagtgacctctttactcaatttagcagtaacaacactgatgatgacagtgataacaacaaaaaaaaggattttcaaagtaatccaatcttgagaaactccatgaaaaggaaaattgagtacatcaaaaaatttcattctataccagtagttacaccagcatttatctttaaattattatccattgcgtctgaagatagcgacgaaatcttcttgaataatatcaaatggtgcattatttgcccaagaggacaaaaggacgatttcaaatgtaaaataaaaaaacaaaaccacacaaatactagttctgaaataaaatatcaaaacaatgacccgaaaattgataaaactattcttttaaaaagaagaaactcctcattatcagagcattccataaaggatactaaaaacgagttattacaaaaaattagagaaacagatagcgagaggaaaagaagtagcttaccatcgactgtcaaggagaaatccccagagagacagatgccaaatacaaaaagaattaagatagagtcaccgccaaagaatttcgttcctaaaccaattaaaagaaccactagttggggtacgatgatgtcggaaaatatatccacgaatctaccgaacgcagttctcaatgtagaacagacgacaactgctgaagagatatctcatactcaagttacatatggttcaattcaagataaaaaaaatgccttttcttcggaaaagcccataagacgacatacaagaactcagacgaaagaattgggttcttaa

SEQ ID NO: 1364 - DNA, 2559 bp, Saccharomyces pastorianus
atgcccaagaggaaatatggcaggtcttattcgctcgataatgcggataccgacagcaacaaagtgttgatagtgccgactggcccaagcgccgccaacgcagtcccggatttctccgttcggaaggctcatgcttgtgatagatgccgactgaagaagatcaagtgcgacggtttgaagccgaactgttcaaattgtggcaagatcgacttcccttgcaaaacctcggacaagctgtccagaagaggcctcccaaagggctatacggaattgctagaaaaggaaattgtgcgattgacgaatttgaatgcgaacgcgactgcgactgcaaacacgggtgcaaacacgaatgcgaatactactgccaacgcgaatactaatcttccattcatcaacgatacgttttactgttttaacaactacaatactcagtctagcaaccaaaggtttttgggtcatttgacttggaacatcctcactgagacgtttccaaactcgaaatcaatgacgttcacaaatgatcgcgaccaaagcggcttacagttacaattcttgacggatcttttgaatttgaatgcggattttaatcatttgccaaatttccttctactcaagtataattataatctgcaatttctgaaaaatttactatccgtaatcattaaagacttcttcaaaagacaaaactctctgttgccactattgtgcccttcaaacttatggaagaactcacttttggacaaaattaattcggcagcaacagacgatccaataactttactgactttggtttatatcattcagtttacctggtcttgttttgatgatttcaaactcttcaaaagcaccaaactaatcttatctttaacaaccaacagcacatcagatttgaaagttttgcaattggtgaacttgtccgttttttattttatgggcggctctattgacattggtaaaaacaaaggcttggcaacatcaaactcaaatttggacgccataatatgggccagtgatttactgaatttaaatttcaccaatattttaaatatgggactgtatataaatccaaaaaaactgatttccattccaaacaacaccaacgataataaatcaaacgaagaagaagataaaatagtagcattttggtgcttccaatttttgaactcttggtggtctttgattcaaggtttgccgaagtcaaattttttaattgaagaattccaaccaaaatcagtttcagtactaaaaattcccaaattgaaaccatttgaaattttattaaactttattgtaaattctttggatggatgtaatttattaaaaatctcttcgttgggcgtttcagatcttagtttccaatttttccaaaatgaattagacaatttcaaaaaggatttgttattttggaatctttatcataatttaagcgatcatgaaaactttaattttttaactgcaaagtcgaacgccaagccaacaatgaattcgttattcaagaatttatcaaacttgaatcacaagcttaatcaacctgatttcgtggaaattcaactaactttgttctacctgagtctcaagctaataacgtcaaaaaaaaacgatcaagacttgaataaagaggatgtttcactagaaattttgaccctgtattttttaattttgacggataactctaataacgatgacgaccaacaactacaaccacagcaattaaatctttaccatttcacgccctttaatagtattgatatcattaacttgtgtttaaataatctaaacagctggtcaatatcttataaatacaaacaaggccaaaatcatctagagtcaaataaatcgaagtttgagagcttccaaacttttctgaaccattggtgtttagtatggtattatgatgaactttctactaactcttttctacaagtccttaaaataaattttggtttattaaatttcgaaataatcaactccccacaagaaacagaacaacaacaacaacagttacacataagtctaaacaagttgagatatttgaattcagtaatgaactttaacttaaatacagcaaagtcaaacggtacatcaaaggtcaacactcaacttaatcttttacaaaattcaaacacaaactctagttctaactttcttaaagcatctccatacgactttaataagatttttatgagtaattttgaaaactatgattacgaaacagatgaaggttatgctgaagacgatgatgaggaggacagcgatagcgataacagtttacccttggagatccctttcaataagaataaaaccaagtacagtaaaaaaaacaaagaaataccgcaaagattgtctttatttcaaaacaaaaacaacaattctgtaaacttcaatccaagcccgatttcagatccaaatctaaatctaaattctcattcgccatcgactccgacgacaaggaaaaaacttctagaccatattatattagaaaacagagaaattctcaacagtgatggctccagcaaacaaaaattcaaaatccagaatatcctaaactcatccttctag

SEQ ID NO: 1365 - DNA, 1014 bp, Saccharomyces pastorianus
atgtcaaccacaacatcatcatcatccttacgccattttgtgtctatcaaagacctttctgatgaagaattcaaaattttagttcaaagagctcagcatttcaaaaatattttcaaagcaaataagacaaatgactttcaatccaaccatttaaaactattgggcaaaaccgtcgccctaatctttactaaaagatcaacaagaacaagaatttcgactgaaggtgccgctgccttctttggtgctcaaccaatgtttttaggaaaagaggatatccaattgggtgtcaacgaatcattttatgacaccaccaaggttgtatcttccatggtttcatgcattttcgcccgtgtaaatagacatgaagatatccaagcactttgtaaagactcttcagttccaattatcaactccctatgtgataaatttcatcctctacaagccgtttgcgacttattaacgataatcgaaaactttgacatttctctagattcattaaataagggaggtaactccaaactgaaagtagcatggattggtgacgctaataacgttattaatgatatgtctattgcatgtttaaaattgggtttgagcgttagtattgcaactcctcccggtattgaaatggactctgaaatagtcaatgaagccaatgtaattgctgagagaaacggtgcgacattcgaactaacgcatgactctttgaaggcatctactggagctagtatactggtaactgacacttttgtctccatgggtgaagaatttgcaaagcaggccaaactgaaacaattcgaaggatttcaaatcaataaagaattaaccgcagtagctgatccaaacttcaaatttatgcactgtttgccaagacataatgaagaagtcagcgatgacgtcttctacggtgagcattccatagttttcgaagaagctgaaaatagactatatgcagctatgtctgctattgacgtctttgtcaccaacaagggtgatttcatgcacctaaaataa

SEQ ID NO: 1366 - DNA, 2481 bp, Saccharomyces pastorianus
atgcccagtccatacggcaataaaagaacagtggctaagcttgtcagcgagctagaagatgcagagaaacttaattctagaggtagagcttacagaagagtttgtaatctatcacatagcgataagaaggtagtctcttggaaatttaatgagtgggactacggcaaaaacaatataacgttgccctgtaaagcgagaggtttatttattagcgatgatgtagaaagtccagttattgttgctagagggtatgataaattttttaacatgggcgaagtaagtttcaccaaatgggaatggatagaagagaattgtagaggaccttatgatgtaacaataaaggccaatggttgtattattttcatttctggcttggaggatggcacaatggtagtttgttcaaaacactctactggaccgagagaggatgtagatagaaaccatgcagaggcaggcgagaaacaccttttaaagcaattggcggaaatgaatgtcgatccaaaagattttgcgagaatgctatacacatacaacattaccgcagtggcagaatattgcgatgactcgtttgaagagcacatcttggagtatccccttgagaaggctggtttatacttgcatggtgtcaatgttaatgaagcggaatttgaaacctgggatatgaaagatgtttctgaattggctttgaaatacggattcaagcgcatacagtcctttgacatgaacaccatagaagatttgaagaaactctttgacgattgcactgcaagcggatcttttaaaggtcaagaaattgaagggtttgttatcagatgtcatttaaaaagtaatggaaaaccattcttcttcaaatataagtttgaagagccatatttgatgtatcgtcaatggagagaggttactaaagactacatttccaataattcaagagtattcaaattcaaaaaacataaattcataaccaacaagtatcttgatttcgtgattccaatattggattcatcccccaagattcgtgaagattacatgaaaggatttaggatcattgaattaagaacaatgtttttggagtcgtatggtatgagtgggttagaaattttaaatcatgaaaaagtggccgaattggaattaagaaatgccatagattatgataaagtggacgagcatacaaaatttttaattttccccatttcagtcattggatgtggtaaaacaacgacctcacagacattaacgaatctgttccctgaaacttggggccacattcaaaatgatgatatcactggtaaagataaatcacaactaataaaaaaatcattagaactactagccaaacaagaaatgaaatgtgtcatagttgatagaaataaccatcaattccgagaaagaaagcaattatttgaatggttagatgaactaaaggaagattatttggcatatgatacgaacatcaaggtgattggtatatcattcgcaccatatgacaagttatcgaaaattagagacatcacgatgcaaagagtaatcaaaagaggtaacaatcaccaaagtatcaaactggatgaactgggagagaaaaaagtcattggtatcatgagtgggtttttgaaaagatatcagccgttaaatatagataaatcacccgataacatgtttgatttgatgattgaattggacttcaatgagatagattcctctttaacgaatgtgaaacaaattctgaatgaaatccatagggcgtaccctatcttgatgcctgagatcccaactgatgataaaattgatgaagcatttaggaagagcttagaatacaaaccgacagtgagaaagatagtaggtaaaggcaacggaaatcaacagaaaacacctaaattgatcagacctgtttacatttcagttaatgcaagggaacatgatgaaattattaatttggtgagacagggtgttgctaataataaagatttgtcacaaaaattcgaaggattactcgcaaacgacagacttcaaaaagacttccatattacattgggccacgtgatgtcgtctcgtgagaaggaggggaagaagttgtggaaactgtatttgacgagataccatgatcaaataacagaatacaacaacaatcataaagaaaacaactctggtaataaccaaaatacatcggtgaacaccactgacaaactgaaattcaagttaagcaaattatgttgggatgacaaaataattgcaattgtagtagagctttccggaaatgaaaccgggtgcctaattgacgtgaacggcgatattgtcaatggattaaagtgtctgaataaagttcctcatattacggtatgtaaaatcgatagtaatgtcaaggcggtttattcgaacgttttatgcgagaaagtccaatccggtgaagctcaagatgaaaatgtaaaagttttgaaattgagcgatgcaaaggaattcgttggcgatgtatgtttgaacttttaa

SEQ ID NO: 1367 - DNA, 1872 bp, Saccharomyces pastorianus
atgccggcagaaattgatatcgatgaagctgacgtattagttttatctcaaggattgcagaaaacaagtaagcttaccttccagattaataaatcattgcagaaaattgcggctacgtcgagtcaatccagtcaactctttactccaattttagctagaaacaatgttttaactacattgcaaagaaatatagagagtactttgaattccgttgcctccgtaaaggatctagccaatgaagcctctaaatatgaaattatcttacagaagggtattaatcaggttggattgaagcaatacacacaagtgatacacaaattggatgatatgttggaagatatccagtctggccaagcaaatcgggaagagaactcggaattccatgggattttaacacatttagaagaactgatcaagagtagcgaagctcaactgagaatatacttcatttcaatcttaaacagtattaaaccatttgatcctcagatcaacatcaacaaaaagatgccgtttccttactatgaagaccaacagttgggtgctctttcttggatcctagattatttccacggaaattcagaaagttctactatacaagacatgcttgtcggtgagagaagtaaactgatcctcaaatgtatggcattccttgagccgtttgctaaggaagtcaccaccactaaaaatgctccatacgaaaagggcagcagtggaatgaatagttatacagaggcattattgggtttcatcgctagtgagaagtcactggtggacgatttgtactcacaatacatagatatcaaacctcaggtgctatcgcagattttgtcgccattaataagtgcctatgccaaactttttaatacaaatttgaagattgtacgaagaaatcttgaaaatgtggggttttttagttttgaattagtcgaaagcataaatagtgtgaaaaaaacacttcgaggcaaagaattacaaaactataatctattacaagaatgtactcaagaagtacgtcaagttacccaatctctatttagggatgctatagataggattttaaaaaaggcaaactccatttcaactattccttctaataacggtgttactgaagcaaccgtggataccatgtcaagattgagaaagtttagtgagtacaaaaacggttgtttaggggccatggataatattacacgtgaaaattggttacctgccaactacaaagaaaaggaatacactttacaaaatgagcaattgaactgggaggatcacaatgtatcattatcgtgttttgtgagtgactgtatagacacattggcggttaatcttgagagaaaagcacaaataacgttgatgcccaatcaggagccagatgtggctaatccgaatagcacacggaataagcacaagcaacgtattggtttctttattttaatgaacttgacgcttgtcgaacagattgtggaaaaatctgaactaaactcaatgttggctgcagaaggtcacgcaaggttagaaaggttgaaaaaacgctacgttagttatatggtatctgactggagagatttgactgcaaatttaatggacgcagttttcatcgatagtagtggtaagaaatcaaaggataaagaacaaattaaggaaaagttcagaaaattcaacgaaggttttgaggatttagtatcggggacaaagcagtacaaactatccgatccgtcgatgaaggtaattctaaaatcagaaatcatctcattggttatgcccatgtatgaaagattctatagcagatataaagactctttcaaaaatcctagaaagcacatcaaatatactcccgatgaattgacaactgttctgaatcaattagtcaggtag

SEQ ID NO: 1368 - DNA, 1470 bp, Saccharomyces pastorianus
atgtctaatgctgctttgcaagtttatggtggtgatgaaatatccgcagtagtcatagatcctggctcttacacaacgaacattggctattcaggctcagacttcccccagtctattctaccctccgtttacggtaaatccgcctcagataaagatagtaagactattttctccgagcaatctattgggattccaagaaaagactacgagctaaaacctattattgagaacggtcttgtcattgattgggacactgcacaagaacaatggcagtgggccctgaaaaatgaactttatttagattctaactctggaataccggctttgctaactgaacctgtttggaatagtacagaaaataggaaaaaatctttggaagtccttctagaagggatgcaatttgaagcctgttatttggctcctacgtcaacatgtgtttcatttgcagcaggcagacctaattgtttggtggttgatatcggtcatgacacatgtagtgttagtccgatagtagacggtatgacgttgtcaaagagtacaagaagaaacttcattgctgggaaatttatcaatcatttgattgaaaaagccatagagccgaaagaaatcatacctctctttgcaatcaaacaaagaaaaccagaattgataaagaagaaatttgactacgaagtcgaccagtcgctatttgagtacgcaaataatagagggtttttccatgagtgtaaagagaccctttgtcacatctgcccaactaaaactttggaagaggcaaaagcggaattgaatacaacaactaagaggtctatcgaaacaccttggaatgaagagattatctttgataacgaaactcgttatggctttgctgaagagcttttccttccaaaaaaagacgatattccggaagattggccacactccaactctggtgtagtagagacttggcgtaatgactatgtgccattaaaaagaaccaagccaagtggaactaataagactgacaagaaacctgtgcctacagaagaaaaggaacaagatcttgtaagtaaatctatttctccacctgccgacagtatagatactccaaatgacagtggtaaaagaccattggaagaagagacttcttctaatgatatcaaagaaataacaggcctagctgatctcgtatattcatctataatgagcagtgatgtggatttgagagccacattagctcataatgtcgtacttacgggtggtacatcctcaattcccggcttaagtgacaggttgatgaccgaactgaataaaatacttccatctttaaagttcagaatactaacaacggggcataccagagaaaggcaataccaatcatggctaggtggtagtatactcacaagcctaggaacattccatcagctatgggttggaaaacaagaatatgaagaggtgggtgtcgacagattactcaacgacaggtttagatag

SEQ ID NO: 1369 - DNA, 3663 bp, Saccharomyces pastorianus
atgtctgaagaacaaagtgttattgatacacctcctaccactgtcgacggttctgttgaaactgttaccaccatcgattcaccaagtactactgcctctaccattgctgctaccgaagaacaacctcgtttggaaaagaagccaaccccattgccatcgctgaagaatttgccctctttgggttcaaatgctgccctagctagcgttaaggtcaactggggtccaaacatgaaacctgctgtctctaactccccatcaccttccccttctggccctgcattgaatacaggtctcggcgcgaagagaatgcgttcaaagaacatccaagaagcctttacgttagatttgcaatctcaattgtcaatcactaaaccagaattatctcgtattgttcaatcagtcaagaaaaaccacgaagtctctgtcgaatctactctttccaagaacgctcgtacctttttgatttctggtgtggctgctaatgttcacgatgcaaagagagaattagcgaaaaaattgacaaaaccaatcaacgccgtcatcgaagtcccatccaaatgtaaagcaagtatcattggttctggtggtagaaccatccgtgaaatcagtgtcacttacgaagttaagatcaatgttgccaaggaagtcaatgaagactcttacgacgaagacatggatgacactatgagtaatgtttcactatttggtgattttgaatcggttgatatggctaaggctaggatcttggccattgttaaagatgaaactaagaacgccactataaaattggttgtcgaagatgaaaaatacttaccatacgttgatgtttccgcctttgcttccaatgatgatgacgacgaagtcaaagttcaattttatcaaaaatcaggcgatattgtcatttctggtcctcgtgaaaatgctaaagccaccaaagcagccattcaagattacttgaaaaagttagcctccgatttagcccaagagaaggttaagattccaactaagttccaatttttgattgatgctaaggaattgaaagaaaagtacaatgtcattgttaccttcccatctactcctgaagatgaattagtgtcatttgttggtctacgtgacaaagtgaccgaagccattacttacgctaggtcttcttccaagagctacgtggttgagtctttagatatttccaaggcccatagtaaaaacgttgctcacgcaaagaatctgataatgtactttaccaaatactctgtattaaagagtcttgaagattcccaccccaatgttaagatatctttgccatccgtccaatcgctacctgccgccgaaactgttaccgtccacattagtgcaaagtctgacgaagcaaatgacatcaaggcagctcgtaaggagttgatttcctttgtcaacaatatcccaccttctgaaaccttgaccgttacagacttagattacgagttatttggtgggtcaatcaaacactccttgttggcttctgagagtgatgttgcctttgtccaatttggtgactattatccaaatgataacaccattttgcttgttgccttaaccggtagtgaagatttcaaaccatccatcgaagagattcaggcatccttgaagaaggttaatgagtcactagaccaactacgtactaagcaaaatagcatggaaagtaacacttatgaattttctccagaagttcaggattccctctttagtccatcttctgctacattgaaattgatcttggaagatatttctgaagaagaaggtcacattcaaattaaactacatacacctgaagaaggccaattgactgttagaggtgatgaaaaggctgtcaaggtggccaataaaatttttgaatctattgtgaactccccatcaaacaagagcaaaatgactgttgatattccagccaactctgttgccagattaattggtaataaaggttctaacctgcaacaaattcgtgagaaattcgcatgtcaaattgatattccaaatgaggaaaacaacagcgccactaaagataaaaccgtcgaggttactttagttggtttagaatacaatttgactcatgctaaaaaacacatggccgccgaagctaagaaatgggctgatattattacaaaggaactaattgtcccaactaagtttcacggtaacatgattggtcaacacggtacctaccgtaaccgtttgcaggaaaaatacaatgttttcatcaacttcccaagaaacagtgaaatcgtcaccattagaggtccttctcgtggtgtcaataaggcacatgaagaattgaaggcattgttagattttgaaatggaaaacggttacaaaatggttattaatgttccagccgaacacgtcccaagagttattggtaaaaacggtgacaatatcaatgatattagagctgaattcggtgtcgaaatggatttcttacaaaagagcaccgatccaaaagttcaagaaaccggtgaagttgaattagaaattaccggttctagacaaagtatcaaggatgctgccaagcgtgtggaatctattgttgctgaagcttccgactttgtcactgaagttttgaaaattgaccacaaacaccataaatctattgtcggtagtggtggccacacattgagagaaatcatctctaaggctggtggtgaagaaatcagaaacaaatctgttgacattccaaacgcagattcagaaagccaagacatcactgttcaaggtccagaaaaatttgtcaaaaaggttgttgaggaaattaacaagattgtcaaggaagctgacaacagcgttaccaaggctctcgatattccagcagaaagaaagggtgctttgattggacctggtgggatgattcgccgtcaactggaatccgaatttagcatcaatcttttcgttcctcataaggatgacgctagtggcaaaatcactatcactgggttaccagaaaacgttgaaaaggcagaaaagaagatcttaaatgaaataattagagaaaattttgaccgagaaattaacgttccagcttctatttacgaatatgtttcagaacgtggtgctttcattcaaaaactgagaatggatttgttcgttaatgttagatttggtaacactgccaggaaagctaataaactagcccgtgctccaattcaaattccattagaaaatgttcgtggctctacagaaggtgaaaatgcagaaaagactaaatttaccgttgaggaagttggtgcaccaacatcttctgaagaaggagatatcaccatgagattgacctacgaacctgttgatttaagcagtatttttggcgaaaaagaaaaggaagtcaagaaggacgcttcaaacgactctgctaagaaggaagaagccctcgacactgccgttaaattgattgaggaaagaattgcgaaggcaccatctgccacatatgctggttatgtttggggtgccgacaccaaaagattcaatatgattgtcggcccaggtggttccaacatcaagaaaatcagagaagcagctgacgttgttatcaatgtcccaagaaagtctgacaatgtaaacgatgttgtgtacattagaggtaccaaagctggtgtcgaaaaggccggtgagatggtattgaaatctttaagaagataa

SEQ ID NO: 1370 - DNA, 858 bp, Saccharomyces pastorianus
atgaaactttcaaaaatatcgctcttaacatctgctttggcctcgaccgctttcgctgctcccgccgttgtcactgtcactgaacacgcccatgctgctgctgtggtgactgtgcaaggcgtggtctacgttaaaaacggccagactctcaccacttacgagacgttgggcgctgcttctgctactgccaacccaacctccaccgccacagctttagttgctcctcctatcgcttctgcttccagcgatgctaaagcagcttcgtctgttttgcagaactttgcccgggttaaaagcaagtctacaagctcaaccacctcgttggcatcaccttcatcgcaagcaaaagccaccagcacttctacaccagctacaaccatgtccacttcccaaaccgctgccaccacctctgcctctacttcaaatgacaacttatcagattttgcctcatccgtcttggctgaacacaacaagaagagagctttgcaaaaggacactccagccttaacatggtctgatacattggctacttacgctcaagattatgccgacaactacgactgttcaggtactttaactcattccggtggctcatatggcgaaaacttggccctgggttacgatggtccaggcgccgttgatgcttggtataacgagatctccgactatgatttctcgaacccaggtttctcgggcaacactggtcatttcacccaagtcgtctggaagtctaccacacaagtcggttgtgggatcaagacctgtggtggtgcatggggtgactacgtcatctgtagttacaaccctgcaggcaactacgaaggcgaatacgctgaaaatgtcgaacccttggcttag

SEQ ID NO: 1371 - DNA, 3687 bp, Saccharomyces pastorianus
atgtacatcaagagagtggttatcaaggggtttaaaacctataggaatgagacaattattgataatttctcgccgcatcaaaacgttatcatagggtctaatggatcaggaaaatcgaacttctttgctgctattaggtttgttttgagtgatgattactcaaatctgaagagggaagagagactgattcaccaaggttcgggtggttcggtgatgagtgcctcggtggagattgtgtttcacgatccagaccgctcaatgatattgccctctggtgtgctctcaagaggggatgacgaagtgacaattagaagaacggtgggtttgaagaaagatgactaccaattgaatgacagaaacgtcactaagggagacattgtcaggatgttggaaaccgcaggattctcgatgaataatccttataacatagtgccacagggcaaaatcgttgctttaacgaacgctaaggacaaagaaagattgcaattattggaagacgttgtaggggccaaatcctttgaagtcaaactaaaggcttcattgaaaaaaatggaggaaacagagcagaaaaagacacagattaataaagaaatggatgagttgaactcaaaactgagtgaaatggaacaggagcgtgaagaactggaaaagtacaatgaattggaacgtaatagaaaggtctaccaatttactctatacgatcgagaaatgaatgacgttatcaaccaaatggaaaaattagatggcgactacaacaatactgtatattcttctgaacaatatattcaagagctagataaaagggaagatatgatcgagcaagtctccaaaaatctatcaaatattgaagcgtctttgaagattaaaaatactacggatctacaacaggcaaaactaagggagtctgagatttctcaagaattaacaaatgttagcgtaaagataaaagatgtccaattgcaaattgagtcgaatagcgaacagagaaatttggacggttcaacactaaaagaggttgaatccaagatcaaactgaaacaacaaaagctgtccaaaatattacctagatttcaagaacttacgaaggaagaagcaatgtataaacttcaattagcgtcgttacaacaaaagcaaagagatttggttttcaaaaaaggtgaatatgctcgtttcaagtccaaagaggagcgcgactcatggatttattcagaaattgaggaattaaaatcatcgatgcaaaaccttaatgacttaggaagtaaactacaggtggaccgtacttctttgaaggagagcttattcaagattgacgaagaaattgaagagctgaccgattctattaacggaccggatatcaaaggtcaactagaagattttgattctgaattaatcaagctcaagcagaaactgaacgaaagtttggacactcgtaaagagttatggagaaaggaacagaaattacaaacagttatggaaactatattgagtgatgtcaaccaaaaccaaagaaatgtcaatgaaactatgagcagatcattagcaaatggtataattaatgttaaagaaatcacagaaaaattaaagatatcgccggaatccgtgtttggaacattaggagaactaataaaagttaacgataaatataaagcatgcgctgaagtaatcggaggtaactctctttttcacatcgtagtggacacagaggaaacagccaccttgatcatgaatgagttgtatcgaatgaagggtggaagagtaacatttatcccactgaacaaattatctttggacgctgacgttaaattcccctcaaattctacaactcaaatacaattcacccccctaataaaaaagataaagtatcaacctagatttgaaaaagctgtcaaacacgtttttggtaaaaccattgtcgtcaaagatttgggccaaggtttaaagctagctaaaaaacacaaactcaatgccattacgttggatggtgatagagcagataaaaggggtgtactaacgggtgggtaccttgaccaacacaaaagaactcgtttggattctttaaagaacttgaatgaatcgagaaaccagcacaaaagtattggtgatgagttacaagttgtcagaaacgaactaaatgatattgatgctcaaattgatcaattaaacgggaacataagaaaagtgtccaacgatagagaatccgtcttgacaaatattgaaattttcagaacatcattaaacactaaaaagaatgaaagattgattctcgaagaatcttcaaacgccattgtgttgaagttagaaaagcagaagacaaacctaaaattcgcccaagaaaagatggatacatatgaaaatgatttgcttcaggactttgatagcgaactttccaaagaagaaaaggaaaagctggaatctttaaccaaagagatcaatgtgttgcataacaaattggatcttacttcagatgcactggaaggtataactacaacaattgattcattgaatgccgaattagagtccaaacttattccacagcaaaacgacctcaagataaaaatggccgaggttggtgatgcattcattttgggtctacaggatgaactaaaagaattagatttagagaaggaaagtgtcgagaaacaatacgaaaacgctacattagaactaggcactatccaaagggaaatcgaaacacttgttgcagaagaaacaaataataagaagctgttagaaaaagcaaacaatcaacagcgtttattattaaagaaacttgacaattttcagaaaagtgtggagaaaacaatgattaagaagacaacgttggttacgagaagagaggaactgcagcaaagaattagagaaattggattacttcctgaagatgctttaatgaatgattttagtgacattacaagtgatcagctattacaaaagttgaatgatatgaatacggagatctcgagcttgaagaatgttaataagagagcttttgaaaatttcaaaaagttcaacgaaaagcgtaaagatctttcgggaagagcttcggagctagaggaatctaaagattcgattcaggacttgattgttaaattaaaacagcaaaaggttagtgcggttgattctacattccaaaaagtctctgaaaacttcgaaactgttttcgagagattagttccaagaggtaccgctaaactagtcattcatcgtcgaaatgaaagctctaatgatcaagcagatgacgttgatattgatatggactccggtaaaaatgaagatacaattaataaagagggtgaaactgtctacaccggtgtttcaatttccgtttccttcaactctaagcaaaacgagcaattgcatgtcgaacaactgtcaggtggtcaaaagacagtgtgtgccattgctttaatcttagcgatacaaatggtagatcctgcctccttttacttgtttgacgaaatcgatgctgcattagacaaacaatatagaactgctgtagccacattaatcaaagagctgtcaaccaatgcccaattcatttgtacgacgtttagaacagatatgttgcaagtagcagacaagtttttccgcgttaagtatgagaataaaatatccacagtcatcgaggtcaatagagaagaagcaatcggttttattaggggcagtaataaattcgctgaggtttga

SEQ ID NO: 1372 - DNA, 648 bp, Saccharomyces pastorianus
atggcattaccagcacacctgcagcagaccttttcgccagaagaaatacagtttattgtggagaatgagcccataaagatttttcccagaataacgacacgccaaaagatttatggaaatgacggaggggtgaaaaaccagatacccagtcgctggcagctcattacgacagatgataaggctttaaataatatggtggcaatgcgttccacagaagtggtcctttgggttgctcttcttttgaagcagcaatccaagtgtagtattgtagcaccacagtggttaacgacaaaagagcttgatagaaagataaagtatgaaaaggcccatccagatagattcagtgagttgccgtggagctggcttattttggcacgtatactcttcagtaaagctaaggacgatttccatgatcctgttcacgaattacgcggtagaattcaagatttaagagagatgaggcaggttaaagtattaaaaggtcttaaatatttgaatgagtcgcatttgcaattagacaatctcagtctgttagaaataaatgagctgaggccgttcatcactgacatcatggataagttaagagagattcattctgcatctcttactgctggtgctgaaaacgaggaagaagatttcaatatttga

SEQ ID NO: 1373 - DNA, 2652 bp, Saccharomyces pastorianus
atgcaagcggtagaaagaagaccttcgctgctctttgacgaatatcagaactccatcactaagcctaatgagacgaagaataaagaggccaagaacaacagtactgcttccccatctaaattaaagcagaaggagatctctgtggatgatatggatatgatttcattgcccacggacttcgataggcaaatggatttaggctcgcccatgtttttcgatcctgaggatgaagagaataaaattgatccgattccttcgatatcgcatcattatggaaacatcgacgatggtagtttcgttccctcatatttaccttcaaattcaaagattgatcaaaatggcaaggacctctttgctaatccatttgagttggtctctcaaatgaggaaaagatatatcactacctctaaacaagatggcgtttccaatatcaagaacgacttacaaaactggttcttatatcctaagcctttacccaagttttggaaatttgaagatgacaaacgtttacaagacccctcagactcggatttgaacgagggtggggacaatactgcggcaggaaccatcacaccgcatcatcatgggtactactacccaagttactttaccgatcactattattatgcaaagtcggatccgaaggagaaaggtaaagtgaaagtgccatatactggtgagtatttcgatttaaaccattataaagaacagtatgtgtcccatttaaacaaacaaaaggataaacaatattcctctttgtgtcctaattctagtgaagaagagccacaggaggaagaatacttgacagatgtgcctacattccaagaatttagggacgattttgcatacgtcatagaattagttcaatcccataagtttaatgacatttcacgaaagaggttatcttatttattagacaaatttgaattgtttcagtacctaaattctaaaagagaaattttagcgaacaaaaatgttccctacagagatttttataattctcgtaaggtagacagagatttatctttaagcggttgcatttctcaacgtcaacttagcgaatatatctgggagaaaataaacttagaacctgacagaatagtatatcaagacgcggaaacatcaaaaaaattcacattgtgtgatatctttcagtttggctgctctgccgatgatctgcctattgcggttgggttgaagttgattgatgacgaattcctggactggtataaaaatgtttatctaatagactatcatttaactcctaacaaatcagcaaatctgaccggtaaagaaatgaggttttttctactggccaaagtctttcttgaatttgataacttcattgaaggtgagtatcttgcagaaatttttataaaatacgttatccacatcctggaaaaatcaaagtatcaattggcccagatatccgttagtttccaattttattctgatggtaaggattggtataaaaaattttcacagtggttgttgcaatggaagctggtatcatataacgttcgctggaacatacaaattcctagaatctttcctaagttattcaaggaaaatgttgtctctaatttccaagaatttttggatctaatattcaattctttatttgatctggaaaaaaatgaaacgatggattcatcagtggatagtgataccattggtgtccagtttttcttatcaaacgtttgttctatggacttagtcattaaggaatccgatgaatattactggaaagaatttactgacgtgaattgtaagccaaagttttggactgcacaaggcgataatcctactgttgcacactacatgtattatatttacaagaatttatcaaagttgaatttcttaaggtcacaaaatcttcaaaatacaatcattttaagaaactattgttcgccgttatctagcagaacttctcaatttggcgtagatttatttttcacagaccaaatagagtcgttggtgtgcaacctactactttctaacggcgggttattacaggtggagccactttgggatacggcatcaatgattcaatatctattttacctttttcaaattcctattctagctgctccattatcgtctgtgtcgctattaaattctgaaaaatcttccaccttaaatcataaaagcattctcctcgaaagcgattatttgaaagatcaagcctccaccaagatcaacccttctagagatattactattgacgagcaaaggtcatacgaaacaaacccttttatgaaaatgtttagaatgggattaaaggtttctttgtcgtcaaagtcgattctttataatagttcctatacgttagaacctctgattgaagaatacagcgttgcagcgagtatttacttacttaatcctacagatttatgtgagttgtccagaacgagtgtgttgtctagtggatatgaaggttggtataaagctcactggattggtgttggagtaaaagaggcctcattttttgaggaaaatgtcggtggaatagatatttggtatgatacagcagaagatacttcaataaaacataatgtcccaatgattagaagaagatacaggaaagagacattggatcaagaatggagcttcattcaagatcactttggtacatttaactccatatggtag

SEQ ID NO: 1374 - DNA, 900 bp, Saccharomyces pastorianus
atgaatgttgtcaaggaactcagtgtttgtggcggccgattggtcaagttgtcgcacaactcgacctccaccaaaacgtgtatgaacgtcaatgtctacctgcccaagcaatactatgcccaggattcttcaaggagcaggcccattcccacagtggtctacctttctggtttgacttgcactccagacaacgcctctgagaaggcgttttggcagttccaagctgacaaatatgggtttgcgatggttttcccagatacctctccccgtggtgaccaagtcgcaaatgatcctgaagattcgtgggactttgggcagggtgcagggttctacctcaacgccacccaggatccgtacgcccaacattaccagatgtacgactatgtccacaaggagctaccacaaacgctggatgcacacttcaacaagaacgccgccgctaagctggacttcctggataacgtggccatcacaggccattcgatgggcgggtacggtgccatctgcgggtacttgaagggctatgctgaaagaagatacaagtcctgttctgcattcgcgcccattgtaaacccttccaacgttccctggggccaaaaggcgtttaagggttacctaggcgatgaaagggcacaatggcaagcttacgatccatgtgcgctaatcaagaatgtcaagcgtgtgggtgacgacaaggttttgatccatgtgggggacgaagatccctttttagaaaaacacttgagaccggaattgctacttgaggctgcaaagtctacttcatgggaaaactatgtccaagtaaaaaaagtgcacgggtttgatcactcttactacttcgttagcacttttgttccagaacacgctgaatttcatgccaaaaatttggggttgatctaa

SEQ ID NO: 1375 - DNA, 495 bp, Saccharomyces pastorianus
atgaatgagaacaatagcagtatagaaacgggggttccaccgccttgttcgctccagctgcctgtggaaaaagtacagaggatagccaagaatgatccggaatacatggacacttcagacgacgcattcgtagccacagcgtttgctaccgaattcttcattcaggttctgacacatgaatcgttgcagcagcagcagcgcagccaagtacctcatccttccgacgagatcacgctgtcgtacgacgacgtctccgccacgatattaaagtcgaccgatggccatctgcagttcttgaacgatgtgataccgatcacgaagaacctgaggctcctagtggaggaaaacagagttaggtacaccacgagcgtcatgccccccaatgaggtgtactcaacctatgtgatgggcgagacggccttgaaacccaacattgtcgagatcgaccttgacaatgacgaagatgacgacgaagacgtaacggaccaagagtaa

SEQ ID NO: 1376 - DNA, 717 bp, Saccharomyces pastorianus
atgacggtgggtattgctagaaagctatccagggacaagccgcatagggacgcgctgctgaagaaccttgcgtgccagctgttccagcacgggtcgatcgtgtcgacacatgccaagtgtaaagaagcctccagggtcgcagaacggatcatcacctggacgaagagagcgctcgcgacgaacaacagtgtgtcgcaagcagagctgagagcgcagatccagagccagctgtttctggcgggggacaatcgcaagctgatggagcggttgttcaacgagattgctccacggtacgtggaaagacccggcgggtacacccgtgtgctgcggttggagcccagggccaacgactcagctccgcaatccgtcctggagctggtcgatttgcctgtggcttctgagtcgcacgcggtgaacaggggcaacttgaagatgtggctgttggtgaagtcggtcattaacgatgacaccaaccacctaccccacagcgagctgacgctgcagaatctgtacaagctggcgaagttcaagccggaagcgcagttgcacagtgagttctcgctgattaaggagatcctgtttaaggaactggccttgccctacgataagacggtggaggaagaaaagacgcaggcgcttttgaaacaagtctactcttccgcgttgcccaagaagcagaggaagccctcgtcttatgtcatggttcccagaccctag

SEQ ID NO: 1377 - DNA, 2487 bp, Saccharomyces pastorianus
atgaacttgaagcagctcatgtgcctatcgtgcgcacagctattcgccatcctcctcttcatctttgcctttttccccaggaaaatcgtgctgccaggcatatcgcatcaggatccagaccaggaccgcgatcttcagcacgagaggccctttcaaaagctggtcttcgtggtcatcgacgccctcagatcggactttcttttcgattccggaatctcccatttcaacaacgtgcaccaatggctcaatacaggcgaggcctggggctacacgtcttttgccaaccctcccaccgtcacgctgccccgactaaagagtatcacaacagggtccacccccagcttcattgacctgctgctgaacgtagctcaggacgtggactccaacgacctgtcggaacacgattcctggctgcaacagttcatccagcacaacaacacgatccgctttatgggcgatgacacgtggctgaaactcttcccacatgagtggttcgacttcaccgaccccacccactccttcttcgtcagcgactttactcaagttgacaacaacgtgacgaggaatctgccggagaagctattccaaaaatgggcccaatgggacgtggctattctccactacttgggtctcgaccacatcggccataaagatggcccgaattcgaagttcatgtccacgaaacaccaagaaatggacagcatcttgaaaacaatctacgatcaagtgctagagcataaaagtgacgacgacacgttgatttgtgttctcggtgaccacggtatgaacgaactgggcaaccatggtggctcttcagccggcgaaacttccgcggggctcttgttcttgtcaccaaagttgtctcagtttgccaagccagcatcgcaagcggagaatgccttgcccatcaatggtaccctgggcggtgattttcaatatttagagactgtgcaacagatcgatatcgtccccaccatagccgctctgtttggtatgcccatcccgatgaacagcgtgggcatcatcataccggatttcctacaactacttcctaacaaactggcaagtatgaaagagaacttcatgcatctgtggaggctgtctgaccatcaagaagaagcggttcttgacgatttagccattagtgatatatattcaaagatgtacgatatccaagaaactctaactaagtccgcaacaaactataactatccgctcttgtcattagcctttgtcagtttcctcatcacaacaatcattgctacttatcaattacaacgccattccggacacactttctgcaaattgcggacatcttccctctctgtattattggtttccataatactaggtgtttccacatttgcaagcagtttcatcgaggaagaacaccaactgtggtggtggatagtaacggcgttctccgcggtccctctcttcgtgtacaaactaaacgcgtccgtaatcacacgttggtttatattgttggcatgcgttcgtttgattaagttttggaataacagtggccagaaatttattcacaccaatgttatgtcaaatatacttagccagaacccctattggaaatggtctttgaatttgttgacgttcttaacactgattatggcgtctgctcgctcccaattgttacattttatcatgtccactattttagtcggattgtgtttcatatacaaaatttcatgggaaattgtaaacggtgatcaggctgagataccactctttatgcaagatttgctgactaaaattgactttgtcccaagtgaaagtaatctgattacattggcgcgtgttttcttccaggcttgggccattgttgtcatttcaagattagtattgactaaattgaaggtcttagaccaaaggtacctaattagagatatgaaactatacgtgacaatcttgttgattttacaaacatcgtctcaaaatattggccaattcctcgttttccaaattttacaatcacaaatttgctactttttcaaaaatttccccatctcatcatcaactaataagatttacctgtcaaatttagtttcgttaattctacaaaatttctcgttcttccaattcgggggtacaaattctatttctaccatagatcttggaaacgcataccatggtgtttcttccgattataacatcgctgtagtgggactactaatgtccattgcaaatttcgcgccagcaatttattggtccatgctaccatggtcaataaattatgggccttccccgtcgcaaaataaattacaaacttttgtcaagagtaaattaccaactttcacctaccactgcatttttggaacttgcttgatgacggcatgtatccttttaagatttcatctttttatttggtccgttttcagtcctaaattgtgttattttctaggttggaatctcgcgatgggattgctaaatgggtggatacctgaattgactgttatattggctctggattag

SEQ ID NO: 1378 - DNA, 2157 bp, Saccharomyces pastorianus
atgccccaatccgatagcttagctgcattgcccatttttcaagcatcgctttcagcgaggcaaaccccacgttatatcttcagttcccacaatggaacaagattggttgtcattcaagataatataataagatggtgcagttcgctcaccgatccatcctaccaaagcttgagctttagccgtcacttggttttggacgacacctttcatgttatatcttgtgcgtctggcgatttgctctgtttctataacggtcaagagatctttgtaatggaaattccctggggctattcaaatgtagaggacgtttccattcaagacgcattccaagtatttcactactctattaatgaatcggaactcggttcaaattctttgatcaagaaagtcctatttcatccgaagagttacaataattcctgtatagtggttctaaaaaaggatgataccattacaatgttcgatattctcaatcaacataagaggccgattgttctgaacaaatgcaatagctcatttggtttagatgcacgcgtaaacgacatcacggatttggcattcagtaaagatgggttgacattgtactgtttaaacactacagaaggtggcgatatctttgcactttacccatttttaccttcagtactatctttgagtgagaaagatttgggttggatcttaaataaatcattagtgatgtacgagtctttgaattccacgacagattataaagtgaaaagaaatatcactaaacaattgcaatttgtttctaaactacacaaaaattgggattccaaacttgctaaagtccaaattgatgatgaatatcgtttgatgaagatgcaagggccctttaccataaacccctttcctaacgagttgtatgattatacagcatcaaagatcacaaccataccgattgacaatgagcagagtgaaattatttgtgtcagttttgatgacgggtctcttattttgttatttcaagatttagagatgtcaatgtcatgggatgtggacaactacgtctataataattcgttgattttgattgaacgaacaaaattacagcaaaaggagatgaagtgtctaacaacattaccagatcaattggggaaattgtacgtgactttcaaaagctctgtacatcaactggactgtacaagctggacttccgtattgagtaaatgtatcgatgaatccgatttaaatgcacttgcagatgtgaagtttgtaagtaattttgaagatatcgcaaccattgaacaactctcaaacttcgcttatatcaactggaataacaagtccagtttggctttgatatcaaaagaaaagttaactattcaaaacatatcaagtcacaaggaagagcaaagtctcaacgactctgccgcacttggtacaaacgagtactcggacaagagtgatacaggaaaacgcggttatgagataagttttacccaacccatcaacgaaattctttcgttaaatgaaagttttcaaaaagtttgtctaagcccatgtgaaagaatcatccctccagcagatcgtcaattacctttgaaaaatgaagctaatgagaaccagctagaaatctttaccgatatttccaagaaatttttacaaaaaattatcaaagcccaatctttgggtgtctctatacacaacagaatacatgagcaacagtttgaactaactcgccagttacaatctacgtccaagataatcgctaaggatgaagttttacggaagaaacttgaagcacaaactaaaaaatgggactctcaaagtagcaggcaagcaaaactaatggttagatttagcaaattaacccaaaacctttccaagattgccgaatccgataaattcaaggaacagaatataagccacggtgaaatggagtggttcaaagaaatacgtaatcaaatactgcagtttaacggttttgttcactctcaaaaatctctacagcaagatctatcatatttgaagagggaactgattcgtatcgagtctgaaaccgccagtgctgataaaaagagccaaaacgaatgggacgaactgcgcaagatgctggaagtagattcaaaaatcatcaaagaatgtaacgaagaactggtgcatgtatcccaacaactcaccactaagacacaatga

SEQ ID NO: 1379 - DNA, 1335 bp, Saccharomyces pastorianus
atgaaacaacgctttatccgtcagctcataagcaaaatgtctaccggaaaaccgaaaattgtcgctaacaagtacttcacttctaacacagctaaggatgtttggtcattgaccaatgaagctgctgcgcaggctgccaataactccaacaaccaaggtcgtgaactgataaacctaggtcaaggctttttttcgtattcccctcctcaattcgccatcaaagaagctcagaaggccttagagattccattggttaaccaatattctccaactagaggtcgcccgtcgttaatcaattcattaattgacatgtatactcccatttataatacagaattgaaagctgagaatgtggtcgttaccacaggcgccaatgaaggtattctttcttgcttaatggggctattgaatgctggtgatgaagttattgtttttgaaccattttttgatcaatatattccaaatatcgaactatgtggaggtaaagtagtgtatgttcctatcaatcctccaaaggagttggatcgaagaaataccagaggtgaagaatggaccattgatttcgaacaatttgaaaaagccatcacctccaagacaaaagccgtcattatcaatactcctcacaaccctatcggtaaagtttttactcacagcgaactaactactttaggtaacatatgtgtcaagcacaatgttgctatcatttctgatgaagtttatgaacacctttatttcacagattcatttacaagagttgccacactttctccggaaatcggacaattgactttgactgttggctctgctggtaaatcatttgctgccactggttggagaatcggttgggtcgtatccttaaatgcagaattattaagctatgcggcaaaggcgcacacaagaatctgctttgcatccccgtcaccattacaggaagcttgtgcaaactctattaacgacgcattgaaaatcggttatttcgaaaacatgagacaagaatacatcactaaattcaagatcttcacatcagtgttcgatgaattgggcttgccatacactgcacctgaaggctcatattttgtcttggttgatttctcgaaggtcaaaattccaaaggactatccatatccagaggaaatcatggataagggtaaagatttccgtatttctcattggttgattaatgagctgggtgtggttgctattcctcccaccgaattttacatcaaagagcacgaaaaggctgctgagaacttgctaagattcgcagtttgcaaagatgatgcttatctgaaaaaggctgtggaaagattgagactactaaaagactacttataa

SEQ ID NO: 1380 - DNA, 1224 bp, Saccharomyces pastorianus
atgagagaggaatcccgccgggtgtattgctacttttggctcttcggtttgatcaataatgtactatatgtggtgatactttcggcagctgtcgatatcgtgggacctactttacctaaatcgttagttctattggcggatatactcccatcgctgacaattaagttatgttccccgttctttattgataggattaagtatagctacaggatatggtccttgattttgctgagttgtttagggatgttcttagtttcttttaaaaacttgttcgtctgtctcttgggaatatcgtttgcttctctatcttccggatttggtgaagtgatattccttcaattaacgcatcattataaacaaatttcgttgaatggttggtcctcgggtactggtggtgctgggattcttggaggggcatcctatatgattttaacctcgatttttaaagtcccggtaaggttggccttgttggtatttagtatcctcccgtttgcatttttgttctacttcaaattagatgccaatggtaccagctcgatatatcaaagtgtccgacaacttgatgaagccgaggacgaacaattggagccctctactgtcacgttgacacacacaaacgcttcccaatccttatataactccaggcagcacatctttcaaacattcaaaaggcttcggagattggtacttccatacgtgcttccattaaccactgtctatttgttcgagtatttaataaatcaggcagtatctcccaccttattatttccaattgattcaaaggagaataagtccatgccctttttttttcataagtacagagatatgtatgttacctacggaacactataccagttaggtgtcttcatatcaagatcatttgggcacttgataagaatgagaaatttatacattctggccttcttacaaggttcgaatttatgcataacaattttacaatcatggttctatgtggttcattcgccctggtcggtgatgatattaatattctatgagggttttcttggtggtgcatcatatgttaatacatttttaaatattttggaacaagagaagcccgaagaaacagaatttgccatgggtgctgtgtctattgcagattcatttggcgttttcttggctgccctgcttggtttgggcctagaacctaagctttgtaagcaccaggtttctgataatagaccttggtgtagaatggaatga

SEQ ID NO: 1381 - DNA, 1629 bp, Saccharomyces pastorianus
atgataggagagggtgtgatctctcgagaaaacacacctaaaatgatgctgcaccctgttcatagcgaacagtaccttagcgtacaaccggcgatgccaactaaagatttccatacatcaagtgaaattatcagtcaaacacttgtagacacaacaagtgatgacatttactctgtcaagaatttgaaaggctcaaggaaccctgtcagccctagtatttcaaatatcggattccaatctatcttccaaacggcagatcatccacgatccaagttcagtgtggcctctaacgattccctaaaaagtaatgacgaagtgtctgcgatatcgggcaggtccaaatcatctcaaatcggagagattaaaactactgatacaaaggaatattcgaacaatttagctaaacaattatcaactgatgcaatgtctgttggtcagaaaagtttacactctacatcttccagcaactatataaaaagaaaagcatctggttttttaagtaggaggggcagggcacatacggccatctcatcagatcctgcgtcgtttctgaccactttaagcactttgcataacaattcccattcattccgcaatgtaatcaagaacttcttccaaaacaaaaaccacaggcacataggtcaagatactatagagccagccattcccaactctttgagtaaatttttgcattcttcttacggaagacacaagtcgccatcgcaatttatccatactaacgcagaacagcttgtaaactcaggaacctccgtttactctttgaatgtgaatccatcctgtgccaattccaactccattattgtagatccgttttctgaaatagatcccacgtcaccaaaccctgtctccatgttgcatgatctcttaagaaacctatcgtctttggaagccaattataaacactttaactctcaagaattgacaacacttaccaataacatttggaatatattttgtagtaatgtagcagagctattcaggacccaaagaatatggaaacttcgggcaaaaatagaagatttcaatgaagttttggaattttattgtattttaaaaaccgatccaagagtttccaatggtggcatgaatagaatcgttagtgatttggaagagtttttagtgagctcactatacaatttggaaaaccaaattgttttcaattattccaatgaagatacaataaataacgcgctgaaaaggctgggtgttatatggcgcatattttatcaagaagtgtattatgatttggcagctgtgttattaccattagatcggaccattagcgacgatggtgactccacgatgttgaaattgacaaatgaaagccgggtacatattggctgtgatttttccattggttttcttttactcaagtgttttagagactctatagttttgccttgttatgaaaacttcgtgactagcaacgatggaataagtagaagttttcaactttacattttcaatcaagaagaagaaaacagcgtcactgaaacggataagttgacattgttacagtgttttggtatattaagcactatccaaagtgcggatagaaatcaatggattattgatgaattgttgacaggcattagaatgagtatataa

SEQ ID NO: 1382 - DNA, 2004 bp, Saccharomyces pastorianus
atgagtttggtaccatatgaagaaggctcattgattttggacgaccctaattctaaatctgtagtggttgtcaatccaacctcaggaacactatcattcttccaacaggacaatggcagtgacggcccagaaagtaacgaggatctgactgcgtcctcatcagcactggacttttcctcaggggttcatcatttcaaaggcccgatagcttcttatatctgtccccaatgtggtacggaaatcaaccctgacataatgaatagaaggcaaatccatcgccgggcttccagtggtatagaacaggaaaatatcaggcttggaagccaagaaaatacaataccacttgggtttgaatttgccaattctagtttttcaaagagatatttccagttattagagagaaatcatcggcattatgtcttacaaaacgatccaaacaataaagagaggcaatatggtaaaagcaaatacttcattccagacgaattgtttattcctgggtacttccgcaaattctttaatatattatctctactgggaaatggcgcaagaggatccgtctacaaagttgtacacaccatcggcaatactgaactaggggtctttgcactaaagaaaatacccatcggaaacgatatggaatggttcaataaatgcatacgagaggtgaaagcattgagttcactcacacacaagagcgctaatctaattacatataatcatgtgtggctcgagatggattcagcagtcgggtttgtaagatctgttgatgggggtcaatctgattcaaaagaagaaattccatgcatatttatcctacagcagtattgtagcggcggtaatctagaagactgtattttaagaaatgtcttcgataaatttccagataccgaatcacctgaagaaagaaagaagaaattcagaacccgtaagaagaaccacggcaaatcagcagacattggtttatctactgagcaacttgtgtcaattataagagacatagcaagaggattacacgaactacacagtattggtctgatacacagagatttaaaaccgtccaattgtttattgctaaattcgttcaagaatgatgatgaagataatgaaacacacgaagagggaagtaactcggaacagtatttcccatctgttgtgatcggtgatttaggggaaagtcagttggaaggagagtctagattaggcactggctgtaccggtacattggagttcacggcgcctgagctaattattcagggaggaaccacatcttcaccagccttgccttcacgattgatccatacctacaatgagtacacatttgcttcagatatgtattctttgggtatgatttgctactttatcgtctttggtgaactaccctttgagcctcaactggatatcattgacctaaaagcacgcatcaaacattttagatttgatactgaaagtatgatcgcaaaacatcaagccatgaaattgaaaccagtagattatagaatctttcaactaatggatgctcttttacaaccaaataacgatgtcagacccactgcaaaagcagtggaagacatgttagatgaaatgctatcaaactctaagccaggaaaaaatttctggaaagataataatgacagcacgttaaatttcaccaccatatctgaactaaatgagaccactaacagctttactgatgattttgttgaggatgacaacatgacattatcattaccagcaccggaaggggatctaagcgccgtatcgtcagcaaaagtaaacacatcctctgttatagagaggtcagtacagttttgctacaaggtgatttctatactttcaaccattattgtttttaagtcaacgaaaacggggtcttggctttcgtacacgtcattggtaatattgggaatggtttttaaatctcccgttgatgaaagaagcagacatgtaagggctctcggtttactggcacttatagccatactcaagaaatacatctattaa

SEQ ID NO: 1383 - DNA, 1146 bp, Saccharomyces pastorianus
atgagcatatttttcaagtcgccaattgatatcgagattttgttcgataatgaggaatctcgcaaacatgtagatatcgcatcaaggtcaagcagttccagttacaaatccatgaaagagagcttgcccgtttatgaagatggcgaatccttgggcgggattgtcaccttgagagttcgggatggcaaaaaggtagatcacttaggtataaaagtgtccgtcattggatctattgacatgataaaatcgcacggtagtggtaattcttcctcgaagaaatctacatcttccacctcatcttccacctccaataatggttcatcagatatacggaagaattccgttgaccagtttttgtgccagagctatgacctttgtcccgctggtgagttacagcattctcaaagctttcccttcttgtttagggatttaagcaaaagatacgaatcttataaaggcaagaatgtggatgtagcatattttgtcaaagttaccgtgatgagaaagtctactgacatttctaaaataaaaaaattgtgggtctacctttataatagtatagccacggcaccaaatgccctctctacaaatgggccacaagcaaacttcaacagcgctagtgccgatggtgaagacggggctagtaataagaacgacgcaacgccgaaaaaggatggcccagttgaagccgcagatgataatcaagtcttgccggcaccacattccaccaatgaacccaaaccagttaaattagacatcggtatagaaaactgccttcatattgaattcgaatatgccaaatcacagtatagcttgaaggaagtcattgtaggacgtatatattttcttttaacgagactaaggataaagcacatggaattgagcttgatcacaagagagtcctctggcttacaaacctctaatgttttgacagattcaacggccatccggtatgaaatcatggatgggtctccggtgaaaggtgagaccattcctatcagattgtttttgagcgggtatgacttaacgcccaatgtgagctgtaattactttaacgtcaagaactatttgagcctggtcatcatcgatgaagacggaagaaggtatttcaagcaatcagaaattacattgtaccgtacccgatga

SEQ ID NO: 1384 - DNA, 999 bp, Saccharomyces pastorianus
atgatcagaattgctattaacggtttcggtagaattggtagattggtcctaagattggctctacaaagaaaggacatcgaagttgttgccattaacgatccatttatcaccaacgattatgctgcttacatggttaagtacgattctactcacggtagatatccaggcgcagtttcccatgatgccaagcatatcatcattgatggtcacaagatcgcaactttccaagaaagagacccagctaacttgccatggggttctttgaagattgatgttgccgtcgactccactggtgtcttcaaggagttggacagtgctcaaaagcacattgacgctggtgccaagaaggttgttatcactgccccatcttccaccgctccaatgtttgttgttggtgttaaccacaccaaatacactccagacttgaagattgtctccaacgcttcttgtaccactaactgtttggctccattggccaaggttatcaacgatgccttcggtattcaagaaggtttgatgaccactgttcattccatgaccgccactcaaaagactgtcgatggtccatcccacaaggactggagaggtggtagaaccgcttccggtaacatcatcccatcctccactggtgccgccaaggctgtcggtaaggtcttgcctgaattgcaaggtaagttgaccggtatggctttcagagtcccaactgtcgatgtctctgttgttgacttgactgttaagttggaaaaggaagccacctacgatcaaatcaagaaggccgtcaaggccgccgctgatggtccaatgaagggtgttttgggttacactgaagacgctgttgtctcctccgacttcttgggtgacactcacgcttccatcttcgatgcttccgctggtatccaattgtctccaaagttcgtcaagttggtctcctggtacgataatgaatacggttactccgccagagttgtcgacttgattgaatatgtcgccaaggcttaa

SEQ ID NO: 1385 - DNA, 3210 bp, Saccharomyces pastorianus
atggattctaccgatcttttcgacgtgttcgaggaagccccggctgaactccctacggataattatgaagaaaaaaatgccaataccaatgtggaagatagcctggatatccttcaggaaaagaaacatgacctcgaagaagaagaagatcttaatggcgataacaagaaaattagagccaataagagtaaaacggaagataagagcaaaaagcctgttgtgccagttttagcggattcgttcgagcaagaagcctccagagaagtggatgcatccaagggactaacgaattctgaaactttacaggctgagcgagatggtaaagtcagattatcgcatcaagttcgtcatcaggtagcattaccaccaaactatgattacacgcctattgctgaacataagagagttaatgaagcacgtacttacccatttacgttggatcctttccaagacaccgcagtctcgtgtatagatagaggtgaatccgttttagtttctgcacacacttcggctggtaagactgttgtcgctgaatatgccattgcacaatctttaaaaaacaaacaaagagtcatatatacttctccaatcaaggctctatcaaatcaaaaatatagagaactattagctgaatttggcgatgtaggtttgatgaccggtgatattacaatcaatccggatgcaggctgtttggtcatgaccactgaaattttaagaagtatgttgtatagaggtagtgaagtcatgagagaagtcgcttgggtcattttcgatgaagtccattacatgagagacaaagaaaggggtgtcgtgtgggaagaaacaatcattttattgccagataaggttcgttacgtgttcttatcggccactatcccaaatgcaatggagtttgctgaatggatctgcaaaattcattctcaaccatgtcatatcgtctataccaacttccgtccaacacctttacaacattatctgttcccagctcatggagatggtatttatttggttgttgatgaaaagagcacttttagagaggaaaatttccaaaaggcaatggcttccattagtaatcaagtaggtgatgatccaaactctacggactcaagaggtaaaaagggacaaacatataaaggtggttctgctaagggtgacgcgaagggtgatatctacaaaattgtcaaaatgatttggaagaaaaaatacaacccagtgattgtattttcattcagtaagcgtgactgtgaagaactggctctgaaaatgtctaaactagactttaattctgatgatgaaaaggatgcgctgactaaaatcttcaataatgccatcgcgttgttaccagaaaccgacagagagttgccccaaattaagcacatcttgccattgttacgaagaggtatcggtatccatcattccggtttactacctatactgaaggaagtcattgaaattctatttcaagaagggtttttaaaggtgctgtttgcaacagaaactttttcaattggactaaatatgcctgctaagacagttgttttcacatctgttagaaaatgggacggtcaacaattccgttgggtttcgggaggtgaatacattcaaatgtccggtcgtgctggtcgtcgtggtttggatgatcgtggtattgtcattatgatgatcgatgaaaagatggagcctcaagtagcaaaaggtatggtcaagggtcaagccgatagattggattcagctttccatttaggatataacatgattctcaatttgatgagagtagaaggtatttctccagaattcatgttggaacactctttcttccaatttcaaaatgttatttcagttccagtcatggaaaagaaactcattgaattgaaaaaggagtccgatgatattgaagtcgaggatgaagaaaatgtgaaagaatattacgagattgagcaagctattaagggttaccgcgaagatgttcgtcaagttattacacatccagcaaacgttttaagtttcctacaaccaggtagattagttaaattatccgtcaatggtaaggacaactatggctggggtactgttgttgattttgccaaaagaattaacaaacgtaatccaactgctgttcatacagaccatgaatcatatattgtcaatgtggttgtgaataccatgtacatagactctccagttaatttgttaaagcctttcaacccaacattcccagaagggattcgtccagctgaagaaggcgaaaagagcatatgtgctatcattcctataacgttggattcaatcaaatctattggtaatttgaggttatatatgcccaaggatatcaaagctagcggccaaaaagaaaccgttggaaagtctttgaaggaagtgagtcgcagattcccagatgggatccctatgcttgatcctatcaaaaacatgaagatcgaagatgttgactttttgaagctgatgaagaagatcgatgttttgaacgcaaagctgtcttctaatcctttgactaactctatgagattagacgagttatatggtaaatacagcagaaagcatgatttgcaaaaagacatgaaacaattaaagcacaaaatatcagaatcacaagctgtcatccaactagatgaccttcgtcgccgtaagagagtgttacgtcggttgggattctgcactcctaatgacattattgaactaaaaggtagagttgcatgcgaaatttccagtggtgatgagctattattaacagaattgatctttaatggtaacttcaatgaattaaaaccggaacaagcagctgccttgttatcttgttttgcatttcaggaacgttgtaaagaagcacctaggttgaaagcagaattgtctgaacctttgaaggccatgagagaaattgcagccaagattgccaagatcatgaaggattccaagatcgaagttgtggagaaagattacgttgaaagtttcagacatgaattgatggaagttgtttatgaatggtgtaaaggtgctacatttacgcaaatttgtaaaatgactgacgtttacgaagggtcgttgatcagaatgttcaagaggttagaagaactggttaaggaactcgtggacgttgccaacactatcggtaactcctctcttaaggaaaagatggaaactgtcctgaaattaattcatagagatatagtttccgctgggtctttgtatttatag

SEQ ID NO: 1386 - DNA, 1905 bp, Saccharomyces pastorianus
atgttgtctttgaaaaagggaatagcaaaatcacacatactgcaaagagcgttttcctctttttctgtcattcgtcaagttcaggaactcaagagcggaccggatttagatgccaaatatcacataattgaccatgagtacgactgtgtggtcgtgggtgctggtggtgcgggactaagagcggcatttggcctagccgaggcgggatacaagaccgcctgtatatccaagttgtttcccacaagatcgcacactgtggctgcccaaggtggaatcaacgctgctttgggaaatatgcatccagatgactggaaatcgcacatgtatgacactgtcaagggctccgactggctaggagaccaagatgccatccattatatgacacgcgaggcacccaaatcagtaattgaactggaacactacggtatgccattttcgagaactgaagatggaaaaatttatcaaagagcgtttggtgggcaatcaaaagattttggtaaaggcggacaggcctatagaacatgtgctgtggcagataggacaggccatgcaatgcttcacacactgtatggtcaggcgttaaaaaataatacgcatttcttcattgagtacttcgctatggatttgttgactcacaacggcgaagttgtaggcaccatcgcctacaacgaagaagacggtaccatccacagatttaaggcgcacaaaaccatcattgccactggtggatatggaaggtcttacttctcttgtacctctgcccacacttgcacgggtgatggtaatgccatggtgtctcgtgctgggttcccgttagaagatttagaatttgttcagttccatccttcaggggtttatgggtctggctgtttgatcactgaaggtgcccgtggtgaaggtggctttttactaaattccgaaggtgaaagattcatggagcggtatgcccccaccgccaaggacttagcaagcagagacgttgtgtccagagccatcaccatggaaataagggctggtagaggtgttggaaaacacaaagatcacattcttttgcagttgagtcatttgccaccaaaggtgcttaaagaaaggttgccaggcatttctgagacagcttcggtatttgcaggcgtggatgttacacaggagccaattcccgtcttgccaacagttcattataatatgggcggtattcctactaaatggaccggtgaggcattgacaattgacgaggacactggcgaggacaaggttatcccaggcttaatggcttgcggagaagctgcttgcgtatccgttcatggggccaacagattgggcgctaactcgttgcttgatttggttgtttttggccgcgccgttgcaaacactattgctgacacattacaacctggcttgccccacaaaccattaccttcaaacattgggcacgagtcaatcgctaatttaaacaaagtgagaaatgccaatggttcaaaaaatacctcgcaaatcagattgaatatgcaaaagacaatgcaaaaggatgtttctgttttcaggacgcaagaaacattggatgaaggtgtcagaaacatcaccgaagttgataagacgtttgaagatgtacacgtttccgacaaatcaatgatctggaactcagatctcgtggaaactttggaattgcaaaatttgctaacttgtgccacacaaactgccgtctctgctgcagcgcgcaaggaatctcggggcgctcatgcaagagaagactaccccaacagagatgatgaaaactggagaaagcacacactatcttggcaggaaggaacaacagcacctgtcaaaatcaaatatagagatgtgattgcgcatacattagatgaagatgaatgtgcctcggtcccaccagcggttaggtcctattga

SEQ ID NO: 1387 - DNA, 666 bp, Saccharomyces pastorianus
atgagattccagtttttcatacacttttactacatcatcatcgtatttgcaagtagtaatacagcgcaacattttaaagacacaggggtcaggttgattacatcgatgaaagatttggacaataatacgacacatgcagaactggtagcagaaaaaatcccaattattgaggagcagttacacaatgtcagcacaaagtatgagcatcatgtttttattctgaaggggctagaagcagtcttaaaccgcaaagtagaaagtttgaccattaatgggactgaatcgctcgatacagaatttgaaaaagtggaaaagtcacttgatatggccttgaatatctcgccgttcgaatatattagaaaattcaaggagctgtccaaggaaaaggtggtcgaagccctagaggacctcaacagagaacagaatcgggtgattataagcggtaatagagaagaagaagaagaagaagaaaaggcggcaaaagaaaaacgcaagcgtttagataaaataaaaagaattttgacggtaagtctattagaactaggtctagctcaaggcgttgctgatttatgcgcattggcgcccttcgcatgtcttcttggggtaacagttggaagtgttggatttatattttggttggcattgatatataaagctattcagtag

SEQ ID NO: 1388 - DNA, 1272 bp, Saccharomyces pastorianus
atgacagacaaaagcagggaggactcaacaactaaggctaaggacaaagtcagagggaatccagagaagccaccatattggtttgagatcattgtttctgatccgcagaaaagaacaggagacccgggctcttcatctggttatgtgagttatcaaatatcaacaaagaccaacaacacgtcattttatgacaatcgtggcaactcagaatctatcattgtcgttcatagaagatacagtgacttgctgctacttcatgatattttactgaatgaatttcccacctgcatcatcccaccgttacctgataagaaggtttttcaatacatagcaggcgatagatttagtcaaagatttacacaaaaaagatgccatagcttacagaatttcctaagaagggtatctttacatacggatctttctcaatcaatggcttttaaaacctttttggtgagtaaagactgggaatctcatcgcaaagtgcttcaggatagtttacaagttaacaaagatgaagtcactgatgccttcatgaatgccttcaaaacagttcacaagcaaaatgacgagttcacagagataagagaaaaaagcgataaactagatcgaactgtaacgaaaatcgataaactatttcataaagttgtaaagaaaaatgattcgatgtctgaagattatactaagctgggcaccaacttgcaggaactacaagaactagtcacaggtgaaaatgaggaacttgctgagaaattgaagattttcaacgaaggggtaacacaattgtcctacggtttacaagaccttacgaaatatctagattacgagtacattgttgatttgaaagacctcgaacactacatcgatagtatgcgacaactgatcaaactgaaggaccaaaaacaaatagactacgaagagctgagtgattatctaacaaggtcaataaaggaaaaaaataatttaatctctggttacggtggaagtaatttttttgctaataaattagaggaattagcaggcataaatcaggaagcttcacgcagagaaaaaatcaataaattagaaagcaagataacatccttaacgggcgaattagagaatgccaaaaaggtagcagacggatttgaacaagaatgtttgaaggaaatagaccattttgaaaacgtgaaaaccaaagaaatcaaggaatctcttggatcactagcagaccatcatatcgaattttacgaaagaattctagaagcatgggaaaaagttgatgacagtttatga

SEQ ID NO: 1389 - DNA, 753 bp, Saccharomyces pastorianus
atgcagcatgtcgagcatatgaatactgcggtccgtttggccaggtacgcactcgatcacgacgaaacgccggtagcttgcatcttcgtacatacaccaactggacaactaatggcctacggcatgaacgatacgaacaggtccttgactggggtggcccacgctgaattcatgggaatcgaccaaattaaggggatgctggggtcccgcggagtcgttgacgtgttcaaagacattactctgtacgtgactgtagaaccatgtataatgtgtgcgtctgcccttaagcaattgggaattgggaaagtggtgtttggttgtggtaacgagaggttcggcggtaatggtactgtcttgccggtaaatcatgatacgtgtactcttgcgcctcgggggaatgctgcaacaggctacgagagtgtacccgggatcttgcgaagagaagccataatgctgctgaggtatttttatgtaagacaaaatcaaagagctcccaagccacgatcgaagagtgatagagtactggataagaacacgtttccaccgatggaatggtcgaagtatattgacaaagagtcattcatagcaaattttggcgaagactacaaggcgtattacgaaaatggggctgatttgcttggtgataatgtagattgggacttgattgaatctcatcatgataatattattgagaaactggatagccagtgcgaatccttcaaattaaatgtgcacaagaaatctagagtttaa

SEQ ID NO: 1390 - DNA, 2052 bp, Saccharomyces pastorianus
atgtttttcaacagattaaacgccggcaagttgctggtaccactaaccgtggtcctgtatgcacttttcgtggtgatattacctttacagaattctgttcattcctcgaatgtcttggttaaaggtgctgatgatgtcgaaaactatggaaccgttattggtatcgatttgggtaccacttattcctgtgttgctgttatgaagaacggtaagactgaaattcttgccaatgaacaaggtaatagaataactccatcttacgtggcttttaccgacgacgaaaggttgattggtgatgctgcaaagaaccaagtcgccgctaacccacaaaacaccattttcgacattaagagattgattggtttgaaatacaatgacagatctgttcaaaaagatattaagcatttgccattcaatgtggttaacaaagatggcaaaccagccgttgaagtcgctgttaaaggtgaaaagaaagtcttcactccagaggaaatttctggtatgatcttgggtaagatgaaacaaattgctgaggattacttgggcactaaggttacacacgcagttgttactgttccagcttacttcaatgacgctcaaagacaggctaccaaggatgctggtatcattgctggtttgaatgttttgagaattgttaatgaaccaactgcagccgccattgcctacggtttagataaatctgacaaagaacatcaaatcatcgtctatgacttaggtggtggtactttcgatgtctccttattgtctattgaaaatggtgttttcgaagttcaagccacttccggtgatacccatttgggtggtgaagatttcgattacaagatcgttcgtcaattgttgaaagctttcaagaagaagcatggtattgatgtttccgataacaagaaggctttagcaaaattgaagagagaagctgaaaaggctaaacgtgctttatccagtcaaatgtccactcgtatcgaaatcgattctttcgttgatggtattgatttgagtgaaactttaactagagctaaatttgaagaattaaacttggatcttttcagaaagactttgaaacctgttgaaaaagttttggaagattccggtttggaaaagaaggatgtcgatgatattgtcttggttggtggttctactagaattccaaaggtccaacaattattagaatctttctttgatggtaagaaggcctctaagggtattaacccagatgaagccgttgcattcggtgccgctgttcaagcaggtgtcttgtctggtgaagaaggtgtcgaagatattgttttgttggatgttaacgctttgactcttggtatcgaaaccactggtggtgtcatgactccattgatcaagagaaacactgctattccaaccaagaaatctcaaattttctctactgccgttgacaaccaaccaactgttatgatcaaggtttacgaaggtgaaagagccatgtctaaggacaacaatctattaggtaagtttgaattgactggtatcccaccagcaccaagaggtgtcccacaaattgaagtcacatttgccctagacgctaatggtatcttaaaggtttctgccactgataagggtaccggtaaatctgaatccatcacaatcactaacgataaaggcagattaactcaagacgaaatagacagaatggtagaagaagctgaaaaatttgcctccgaagatgcttctatcaaggccaaggtcgaagccagaaacaagttggaaaactacgcccactctttgaagaaccaagtcaacggtgatttgggtgaaaaactagaagaagaagacaaggaaacattattagatgcttctaacgacgttttggaatggttagatgacaacttcgaaaccgccatggccgaagacttcgatgaaaagtttgactccctatcaaaggttgcttatccaattacctctaagttgtacggtaacgctgatggctctgctgctggtgattatgacgacgatgaagatgaagatgacgatggtgattatttcgaacatgatgaattgtag

SEQ ID NO: 1391 - DNA, 591 bp, Saccharomyces pastorianus
atgtcacagtcaatatcgctgaagggttcaacaaggacagttacggaatttttcgaatatagtatcaattccattttgtatcaaagaggcgtatatccagcagaggattttgtaacggtaaagaagtacgatttaacactactaaagacacacgatgatgagctgaaggattacattcggaaaattctcttgcaagtccacaggtggcttctgggtggcaaatgcaatcagttggtattgtgcgttgtggacaaggatgaaggtgaagtagtggaaaggtggtcctttgacgtgcaacatttcccaagcaatgaccaagttcaagaggataacgtggatctgagtacaacgcagacacaaatcagagctttgatcaggcaaatcacctcgagcgttacctttctaccggagctgacaaaagagggtgggtacacttttacagtactagcgtacacagatgcggatgctaaagttccgttagaatgggcagactccgacagtaaagaaatacctgatggtgaaatagtccagttcaaaaccttttccacaaacgatcataaagttggcgcacaggtaagctataagtactag

SEQ ID NO: 1392 - DNA, 3486 bp, Saccharomyces pastorianus
atgagcgaacccgaggtgcctttcaaagcggtggctcagttcccttacaagtcagattacgaagacgatttgaattttgaaaaagatcaagaaattactgtgacctctgtcgaagacgcagaatggtattttggcgagtaccgagactccaatggcaacaccgttgaaggtatctttcccaaaagttttgttactgtgacccaagcgcctgagaccgcaaaggaagctgaatcgcctgcgattgcagctcccacacagtcacacaccaccgagcttcatgtagaatcggaggcttctactgagcccggtgaacctgaaacaaaaacagaagctttgccatctgtacctgtgccagcggcagtttgccatgatctgcccacaaataacgaaagaagtgttcctatggactctccgaaattgaaggcgcgcttatccatgtttaatcaagacatatctgagcaagctcctctaccaggagcgagtcactttgatttggagaacatacctgtgaagaagacagttgtggctgatgcccctaaattctacgtcccccctggaatcccagccagtgataagtccgatttagaaaggaaaaagtttttaaaggaaaatgaaggaaagaatgttcctgagccaattaatcgagctcaagtggaaagtggggaacttgagactgaaaatgatcaattgaagaaagatcaacctaaaatgagtctgaaagaaagaattgcgctattggaagaacagcagaaattacaagccgcaagagagaaagaactgttgaaaaaaaaagctaaacaagaacaagatcaggaaagagtaccaggtaacggaagtgaacccaatatagaaactgaaggaaatgaagaaccaaatgaaaaaaccggacctaaatctgaacccgaacttgaaaccgaacatgttcatgaatcttatgtggaaccgctagcacacaaagaaagcgtacagacctctattagtgtgggtgcagacatgagtgatacagagagtgagcaagttatagatcaatacaaggaggaatacgagaaggatgaagcccagtacccgcaacgggatgaaccaaacagggagagaattgctgaagagaaagagatagaacatgctagcgaagaagaagaggaggaaaacgaggaagatgaagaggatagtgaagaaaatcgcagagcggcattgagagaaagaatggctaaactttcaggggctggtagatttggtgcacctgttggcttcaatccatttggtatgagctctggagttggcagtaatgcatcagaagaacccaaaaaagccaaaaagaaagaagtcaagcatcaagaagcccaacaaatagaagagctgcccaccgctatacctgttatgccttttgctgatccaaactctaatccattctttaaaagatcaggaccaacagaggaacgcgaatctccagaagaaaaaacgttggacccacacgtcgtagagaacgaaccgaagcgggagcatggcacgcacgtctataaggatctagccgtgggtgaccatgcacattctaataactttgacagtgactctgaagaagacactgataacgatcatgactttgaagatgcgatcgacggcctgaaaagaaattcacttgtggggcaaggttccctaggaagcaatgttgagccaaccagctcaacctccggacaagaaatttatcctcaaataccccctacgccccaccatgctacagggattgtaccaaattccgtgagcctggagaaacaaaaaacgatcgatgaattaccagtctctcccccaagaccaggagtcgcccgcaacgagtcgataaaaactttcactaattcccttccagggcaacatagaaaggcatctgaaaatgaacataatgacccactttcaaccgaaccacctccattaccaacagctgctccaaatatcccgttctccatgccaccagctccaattataagccaagattcagctgcagagaatgtgctaccatctccttcagcatctccttctcctccttctcctccagcacctccagcacctccagcacctccagcaccatcagcaccatcagcaccatcagcaccatcagcaccatcagcaccatcagcaccatcagcaccatcagcaccatcagcaccatcagcaccatcagcaccatcagcaccatcagcaccatcagcaccatcagcaccatcagcacctccagcaccatcagcacctccagcacctccagcacctccagcacctccagcacctccaacaccatcagcattttctaaacataacaaaatagaagagcaagtacatgttcctagaccatcgggtcctcctccacctcccgtacctgcggaatatcagacgatgcccaacaaagcggctccgccacttccaaatgctccgccagtcccacatagtgtctctggatatacagtcaacccaccgaatgcacatgaggtcacaacacgtactgcccctcctccccctcctccacatgttgcaacttctccacctctggcaccaggtgcaaaatcacccccctccactcaactcccacctcatacagagagggagccaccagcattacctcctatcgtacctttagcgaaaaacagcacaatagaatccttccatcagtccacttctcctaacatgagctctgtgagaaggtcaacgacacatgacctgggcgatatgtccactaatacaaaaatagattttaatccgcaggaaaggtggtggattaacaaaactgtgccttccgctataagcaatttgaagttgaagtttttaatggaaatcgatgatcatgtaatttctaaaaggttacaccaaaaatgggttataagagatttttatttcttgtttgaaaactattcacaattgagattctccttgactttcgacaatgcaaaccccgagaaaacagtaacaactttccaagaacatttgccaccaccggctgaagcacaatcagcacagctactggatgaatacgctcaaaagttcaatgtaagaattctagaaaaatcacattcgttaataaactcacacattggggccaaaaactttgtgccacaaattctatccgagttcaaagacgaaattatactccccataggactaagaacattcggtgcgactatattaagttttaaacctgaagatggaactgaaaatataacgaaaagcttacgaaagattaggcctggtgacataattgtaattagaaaggctaagtttgaagcacataagaagatcggtaaaaaagaaattgtcaacatcgggatagacgcttccatcccatactcaagtgttgtgaccgattacgattttaccaaaaataaatttagagtcatcgaaaatcaagagggaaagatcgttcaaaatagctacaagctaagtcatatgaaaagcggaaaattaaaggtttttagagttgttggtaggggatatgtagggtggtga

SEQ ID NO: 1393 - DNA, 2055 bp, Saccharomyces pastorianus
atgaatcacacgaatgagtataggcgggaagaggcaggagcggctaatgaacaatttctttataacaagactgttaaatctgcgtatgcagacgtgctgaaggacaagatgaatagagagcggacgattgatcttcatatcgggaaaagatccctcgctgacggtggcgagacagataactacctggataaggaggatgattccacgtatgagatgttcaagaaaaatcttgatgttcccataaactgccgtggaaacgaagatgataatgacgacgacgatgattatgacgatgatgaactgtactttgaggacgatgaagaggaaaccgatggttttagcgatgaggattatactgacgaggcagacaagagctttattgaggatagtgaatcagatgactacgaattggaaggcgattcggagtttgaaggaaacagagagggcccggatgcaaccaacaggttgtcatgggggaagtgtattgtatacggtggtgttctcttcatgatctatctttttggcttttttttgatgacattcgtgaaaaataatactgacagcatcttatctggtgctacatcaacaccaggtaaatcattcgccaatctacaaaaacagataaatcatttatatagcgaattgagtaaccgcgacgagaaacaaaattctgaactggacaaaacaataaaagttatcatttcccaattcgagaagaacatcaagaaactgctaccttcgaatttagttagttttgaaaatgacattaattccctaacagaacaggtgcagacaatctccacctccatgagtgagtggcagaggcaaagtcaaaggtttaccgttgataacgttactcaatggcaagatcaactgattaaacaactagacacacacctccctcaagaaataccagtggttattaacaattcttcctcggttttgataatccccgaattgcacaattacttgactacattgctttctgatgtcattgagtcgccagggattgccaccacaggcgattctgataaaccttgggagtatgatttaaatcattacgtaaaggagattctatcaaacgagttgcagtacatcgataaggattatttcattcaggagatgaacaggagactgcaatcgaacaaacaggaaatttggcaagaaatcatccataaattagaatctcagcaacagcaagttcaacataggtccgattcaccgcagcagtattcgagtatattgatgaaacgattaatacaccaaatttacaattctaaccaacatcaatgggaggacgatttagattttgccacttacgtccagggaacaaaactattgaaccatttaacttcgccgacatggaaacaaggcaacggagtgcaaccagtagaattattgtctgattctaaacaaagctcctcgacctactggcaatgcgaaagtgaacctggatgttcgtgggctgtaagattcaaaactcctctgtatttgaccaaaatgtcatatttgcacggccgtttcactaacaacttgcatataatgaactcggcaccaaagataatatcgttgtacgtcaaattatcccagactaatgagatcaaggcattgcggtcattggccagccaatatagtttcggacaaccacacaagagagatcaaaactacatcaagattgcccaatttgaatacaggttgacggattccagaatacgccagcaaatacctctaccaccgtggttcattcaattgaagcctctcgtgcgctcagtagtctttcaagtagacgaaaactatgggaacaagaggtttacgtctctgagaaaatttatcattaatggtgtgacaccacaagatttgcaaattattgagaacaatgagttccctgttttattaggggacgtcccggagtacggtgttgctcaaaacatcaacgaaggcaaacggaatgctttactatcaacgccctcatacgtgtcaccacctagcaccagcgccaagttccatcccgcttccaatgtcccatcctttgggcaggatgagctagatcgataa

SEQ ID NO: 1394 - DNA, 486 bp, Saccharomyces pastorianus
atgaaagttctcgaagaaagaaacgtatttctaagtgactatgaagttttgaaatttttaacagatttagagaagaagcatctttgggatcagaacagccaggttgcccttaagaaaaaccgctcaaggggtaaagaaaagaggccgtacaatcaccctgaattgcaaggtattacacgtggtgtagtcaattttctgaacataaacaaaaattacatcaaccaagaagacgagaatgaagatcatgaaaacaatggagcaaaagacgctgagaaatcacccataagcaaaatgagcgatgaaagttttggagaattaatgggcagattaaattccttcaaattgtttaaagcagagaaattacaaattgtcaatcaacttcccgcgaatatggtccatttttactccatagttgaagagtgtgattcaagatttgatgaaaagacaattgaggaaatgctagagataatttctggctactcataa

SEQ ID NO: 1395 - DNA, 2001 bp, Saccharomyces pastorianus
atgggaaatacaaagacaagaggtagaagacatcaagagaaacaaaagaaggacgaatttgagcctagttcaactgctgtaaagaatcatattctggatgaagaacaggcttacactgacgattcagggaacaaagaagatcagccacaaatgtttttcggggtattagatagagaagagctggaatatttcaagcaagcagaatcaaccttacaattagatgctttcgaaacacctgaggaaaagtttcaatttgttacaagcattatcgaagaagcaaaaggtaaggaattaaaattggttacatctcaaattacttcgaagctaatggaacgtatcatcttggaatgtgatgaatctcaattaaagagtatttttcagtctttcaatggtgctttctttggctcgtcatgtcataaatatgcttcccatgtcttagaaactctgtttgttaggagcgccgctttgctagaaagagaacttttaacaccaagcttcgataccgatgaaaaagatggacctcacgtgaccatggagaatatgttcctcttcatgttgaacgagttgaaacctcatttgaaaatgatggttaaccatcaatatggatcgcatgtgttaagactgctaatattaatcttgtcttccaaaactttacctaactcgactaaaactaactcctcactgcgttctaaaaaatcaaaaattgcaagaaaaatgattgacattaaagataacgacgacttcaataaagtctaccaaacaccggaatctttcaaatctgagcttcgtgacatcataacaactttatataaaagctttaccaatggtgctgaagcacgctcagatgtttcccaatcaatagtaaccaaattcagagaatattgtgtagataaaatcgcttctcctgtgatccaattaattattcaggtcgaaggtatttttgacagagaccgttccttttggagactggttttcaatacagcagacgaaaaagaccctaaggaggagtctttcgttgaatacttactgtctgatcccgttggatctcatttcctggaaaatgtgatcgcttctgctagattaaaatacgttgaaagactttaccgtttatatatgaaagatcgtattgtaaagctagccaaaagagatacaacgggtgcctttgtggttcgggccctattagaacagttgaaggataaggacgtgaaacagatattggatgcggtggttcctgatttgagtatgcttttaaactcaaatatggattttggtactgctatcatcaacgcaagtaataaacaaggcaattatttaagagatgacgtaattgctcaattggtgcaaaaatattatccagaaaagtcagaaacgaagaacatcttagagagctgtttatcattgagttcgtccactttggggaataccagggatgactggccgacggctgatgaaagaaggcgatcgatttttttggaacaattaattgactatgacgacaagttcctgaatatcacaattgatagtatgctagccttgcctgaagaacgcctcatgcaaatgtgttaccacggggtgttttcacatgtcgttgagcatgttctacaaactaccagggtggaaacaatcaaaagaaagttactgttgaatatactgtgtaaacagtctgtaaatttatcatgcaatgcgtatggctctcatataatggacaaattatgggaatttaccacgaagttgacactatataaggagcgcattgctagcgcattagttagagaaacggaaaaagttaaaaatagtacttatggaagacaagtctggaaaaattggaaattggaactttatgtcagaaaaatgtgggattggaaaagattaatcaaagagcaagaattcgaaattttcccagattctaaaccattacaaccaaaagcagaaaaacattcaagagagagggataattcaaaagaaagaagtactttcaaaaagcaaaagcaacatagataa

SEQ ID NO: 1396 - DNA, 1707 bp, Saccharomyces pastorianus
atgtcactgagattgccacaaaaccctaacgcgggattgtttaagcaaggttataacagttattccaacgccgatggacaaattaacaagtcaattgcggccatccgtgaattgcatcaaatgtgtttgacttcaatgggtccctgtggtagaaacaaggtcattgtcaaccatctgggtaaaattattattaccaacgatgcagcaactatgctaagggaactagacattgtccatcctgcggtgaaagtccttgtaatggccactgaacaacagaagatcgatatgggtgatggtaccaatttagttatgatcttggcaggtgagttattaaatgtctctgagaaactgatttcaatgggtttatccgctgtagagattattcaaggttacaacatggccaagaaatttattttgaaagaattggatgaattggttgttggtgaaattactgacaaaaacgataaaaatgaacttttgaaaataataaaaccagttatttcctctaaaaaatacggttctgaagatatactaagtgaactcgtttctgaagctgtatctcatgttttaccagtttctcaacaggctggggaaacgccttactttaatgttgactccatcagagtagtaaagatcatgggtgggtctctttccaattccaccgttattaaaggtatggttttcaatcgtgaacccgaaggtcatgtgaaatcattatccgatgataaaaaacataaagttgccgttttcacatgtccacttgacatagccaatactgaaaccaagggtactgtcctgttacataatgcgcaagaaatgttggacttttctaagggtgaagaaaagcaaattgacgccatgatgaaagaaattgccgatatgggcgtagaatgtattattgcaggtgcgggcgttggcgaattggcgttgcattatttgaataggtatggtattttagtcttaaaagtgccaagtaaattcgaattaagaagattatgtcgtgtttgtggcgctactccattacctagattgggtgctccaactccagaagaattaggtttagtggaaaccgttaaaactatggaaataggtggcgatagagtaactgtttttaaacaagaacaaggcgaaatctcaagaacttctacgattattctaagaggtgccacccagaacaatctagacgatattgaaagggccattgacgatggtgtagcagctatcaagggtctaatgaaaccatctggtggtaaattgttgcctggagctggtgccactgaaattgaattgatttctaggataaccaaatatggtgagcgaacacctggtttactacagttagccataaaacaattcgccgttgcttttgaagtggttcctcgtactctagcagagactgctggtcttgatgtaaatgaagtactaccaaacttgtacgcagcacacaacgttagtgagccttgctcggctaatgaggaccatttatataaaggtgtggatatcgatggtgaaactggtgaaggtgtaaaggatattagagaagatggtatttacgacatgcttgccaccaagaaatttgctatcaacgtcgccacagaggctgcaactactgtgctttctattgatcaaattattatggccaagaaagctggtggtccaagagcgcctcaaggtccaaaaccaggaaactgggatcaagatgattaa

SEQ ID NO: 1397 - DNA, 315 bp, Saccharomyces pastorianus
atgtgctccaggggaggttcgaactctcgaccttcagattatgagactgacgctcttcctactgagctactgaagcatacaaaggatgttggggaagaaaaacaaactttacatcaaatatttgcggattccatggttattaaaggatatagcaccgggtatacaggacatactagaagttctccaggggatcttgtaatccacaaaagagaattgatattttcacataatattgtcattattgtttccccaatttatatgatatcattcattattctgttacactatcagtcctggcatttcagcatctattaa

SEQ ID NO: 1398 - DNA, 972 bp, Saccharomyces pastorianus
atgcctagcacgtttgaatcccagctttttttttcgagaccgtttctgtctaaaaggcaaattcaaagagcccaaaagaatacaatatcggactatcgaaattacaaccagaaaaaacttgccgtgttcaaatttctaagtgacttgtgtgttcagctgaaatttccacggaagactttagaaacagcagtatacttttaccaaagataccacctctttaatcgcttcgagaccgaggtttgctacactgtagcgacaagctgcctgactttgggctgtaaagaagttgagacaattaaaaaaacaaatgatatatgtactttgtcgttacgattgaggaatgtggttaaaatcaatacggacattttggaaaattttaaaaaaagggtatttcaaatagaacttcggatattagagtcatgctcattcgattatagagtcaacaattacgttcatattgatgaatatgttataaaaattggtagggagctatcctttgattataagttgtgcaatctggcttggataattgcttatgatgctttgaagctagaaactattttagtcataccccaacattccattgcattggccattttgaaaatagcatatgaattactagataacaagaattggtcaagtaaaaggtattctttatttgaaacagacgagaaatccgtaaatgaagcttattttgatatagtcaatttttacatcaattcattcgatatgtgcgatctacaacgtcatttaccggctgatttgctgccgattggcgttgaaaggtttatggaactgaaaaaaaacgcaggaccagaatctggattgccgcaaataccagatcacctgttgaatgccgatccttatatcactattactagagataataatgtccaagaaagaagatatgtactttcactggagctaattaatggcgagtccagcataaatagttctacaagacatgcatag

SEQ ID NO: 1399 - DNA, 6105 bp, Saccharomyces pastorianus
atgtcatcaaaacctgatactggttcggaaatttctggccctcagcgacaggaagaacaagaacaacagatagagcagagctcacctacggaagcaaacgatagaagcattcatgatgaggtaccaaaagtcaagaagcgtcacgaacaaaatagtggtcacaaatcaagaaggaatagcgcatatagttattacagcccacggtcgctttctatgaccaaaagcagggagagtatcactccaaatggtatggatgatgtaagtatttcgaacgtggaacatccaaggccgacagaaccgaaaatcaaaaggggtccatatttactgaagaaaacattgagcagtctttcaatgacgagcgcgaatagtactcatgatgataataaagaccacggttacgctttgaattcatccaagacgcacaactacacatctactcataaccatcatgacggtcatcatgatcatcatcatgttcagttttttcccaataggaagccatcattagcggaaaccctattcaaaaggttttcagggtcaaacagtcacgatggcaataagtcaggaaaggaaagtaaagttgctaacctttccctttcaacggtaaatcctgcacctgctaataggaaaccttctaaagactccactttatctaatcacttggctgataacgtgccaagcactttacgaaggaaagtgtcctcattggtacgtggttcttccgtccatgatataaataatggtattgcagataaacagattagaccaaaggctgttgcgcaatcagaaaatacattacattcatccgatgttcccaatagcaaacgctcgcacagaaaaagctttctgctaggctccacatcttcttcaagcagtagaagaggttcaaatgtcagttcaatgactaacagtgacagtgcaagtatggcgacgtcgggtagtcatgttctccaacataacgtatctaatgtttctccaactactaaaagtaaggacagcgttaacagcgaatccgccgatcacactaataataaatccgagaaagtgactccagaatataatgagaacattccggaaaattctaactctgacaacaaacgcgaagcgacaacgcctactatagaaacacccatttcatgtaaaccatcccttttcaggctagatacaaaccttgaggatgttactgatattacaaagacggtgccacccaccgctgtcaattctacactaaattctacacacgggactgagactgcctcacccaaaacggtgatcatgcctgaaggtcctaggaagtcggtgtcaatggctgatctctccgtcgctgccgcagcacctaatggtgaattcacatcaacttccaatgatagatcacaatgggtagcacctcaaagctgggatgtggaaaccaaaaggaaaaaaacaaaacctaaagggagatcgaaatcaagaaggtcaagtatagatgctgatgaacttgatcccatgtcaccggggccaccttcaaaaaaagactctcgtcatcgtaagaaccgacactctcgtcatcatcacgatcgaaaggataacgaatcaatggtcactgcgggtgacagtaactcaagttttgttgatatatgtaaagaaaacgttccgaatgatagcaagaccgcactcgatactaaatctgtgaaccgcttaaaaagtaatttggctatgagtcccccaagtatacgatatgctccatcaaatttagatggggactacgacacgtcttccacttcctcatctttaccgtcctcatctattagttcagaagatacatcttcctgcagcgattcctcttcgtacactaacgcgtatatggaggccaaccgagagcaggataataaaacaccgatcctgaataaaacgaaatcgtataccaagaaatttacatcctcttcggtaaatatgaattcaccagatggtgcccagagttctggattattactacaagatgagaaggacgatgaggtcgagtgccaactggaacattactataaagatttcagtgatttagatccaaagaggcactatgctattcgtatattcaatactgatgacacttttacgactctctcatgtactccagcgactaccgtcgaagagataatacctgcacttaaaagaaaatttaacattacagcgcaagggaattttcaaatttccctgaaggtgggaaagttgtcaaaaattttgagaccaacttcgaaacctattttaattgaaagaaaacttttacttttgaatggttatcgaaagtcagacccacttcatattatgggtatagaggatttaagttttgtttttaagtttcttttccatcctgtcacaccttctcactttactcctgaacaagaacaaagaataatgagaagcgaatttgttcacgtagatttaaggaatatggatctgactacacctcccatcattttttaccagcatacgtcagaaatagaaagtttagacgtttctaataacgcaaatatattcctacctctggagttcattgaaagctcgattaaattattaagtttgagaatggttaatattagagcatctaaatttccttccaatatcactaaggcgtataaactagtatctttggaattacagagaaacttcataagaaaagtaccgaactcaatcatgaaactgagtaatttaacgatattaaaccttcaatgtaatgagcttgaaagcctaccggctggatttgttgaactgaaaaatctgcaattgctagacttgtcttcaaacaagttcatgcactacccagaagttattaactactgcaccaatcttttacaaatagacctatcatataataaaatccaaagcttaccacagtccactaagtacctagtaaagcttgcgaagatgaacctttctcataacaaactaaattttataggcgacttatcggaaatgacaaatttgaggacgctgaacctaagatataacagaatatcatcaattaagacaaatgcgtctaacttgcagaacctttttttaacagataatagaatttcgaactttgaagacactttgccgaaactaagagcccttgaaattcaagagaatccaatcacttctatatccttcaaagatttttatccaaaaaacatgacaagtttgacgttgaacaaggcacagttatcgagtattcctggagaattactcaccaaactatctttcctcgagaaacttgaacttaatcagaataatttgactagactgccacaggagatatccaagttgactaaattagttttcctttcagtggcgagaaacaaactagagtatattccacccgagctatctcaactgaaaagtttgaggacattagatctacattctaacaacataagggactttgttgacggtatggaaaaccttgaactaacatcgctaaatatttcatcgaatgcattcggtaactctagcttagaaaattctttttaccataacatgtcatatgggtcaaagttatctaaaagcctgatgttttttattgctgcagacaatcaatttgatgatgctatgtggcctcttttcaattgctttgtcaatctgaaagtgctaaatctttcttacaacaatttttcagatgtatcgcacatgaaacttgagagcattaccgaattgtacctctccggtaataagctcacgacattgtcgggtgatacagttttgaaatggagctctttaaagactttaatgttgaatagtaaccaaatgttatctctgcctgcagaattatcaaatctctcacagctaagtgtatttgatgttggagcaaatcaattaaagtataatatatcaaactatcattacgattggaactggaggaataataaagaactaaaatatttgaatttttcaggaaatcgaaggtttgaaataaagtcatttataagtcacgatattgatgctgatttgtcagatctgacagtattacctcagttaaaggtactaggtttaatggacgtaactttaaatactaccaaagtaccggatgaaaatgtcaatttccgtttaaggacaactgcatcaataataaatgggatgcgctacggtgttgctgatacattaggtcaaagagactatgtgtcatctcgtgatgttacctttgaaagattccgcggaaatgacgacgaatgcttactatgtcttcatgatagtaaaaaccaaaatgcagattatggccacaatatatcaagaattgttagagatatttacgataaaatactgatcagacaactggaaaggtatggagacgaaacagatgataatataaaaactgcacttcgtttcagttttttgcaactgaataaggagattaacggaatgctaaattctgttgataatggtgccgatgttgccaatctttcatatgcagacttgctaagtggcgcttgctctactgtgatatatatcagagggaagaaactcttcgctgcaaatttaggtgactgtatggctattttatccaaaaacaatggtgactaccaaacgctaaccaaacaacatctcccaacaaagcgggaagaatacgagaggatcagaatatctggcgggtatgtcaacaatggaaaattagatggtgttgtagatgtgtctagagcagtgggtttttttgatttgcttccccacattcatgcttctcccgacatatctgtcgtgacattaacaaaagcagacgagatgcttattgtagcaacgcataagttatgggaatacatggacgtggatacagtttgtgatatcgcgcgtgagaatagtactgatccactccgtgccgcagctgagttgaaggatcatgccatggcttacggctgtacagagaatattacaattttgtgccttgctctttacgagaacattcagcaacaaaatcggttcactttaaataaaaactctttaatgactagaagaagtactttcgaggatactacattaagaagacttcaacctgagatttctccgccaacaggtaacctagcaatggtcttcactgatatcaaaagctcaaccttcttatgggagctattccctaacgcaatgaggaccgcaataaaaactcacaatgacattatgcgtcgtcaactacgaatttacggtggttacgaagtaaagacagaaggagacgcctttatggtggcatttcctacgccaactagtggtctgacatggtgcttaagtgttcaattaaaactcttggatgcacaatggccggaggaaattacctcagttcaagacggctgccaagttacggatagaaatggtaacattatctatcaaggcctatcagttagaatgggtattcattggggctgcccagttccagagcttgatttagtgactcaaagaatggactatttggggccgatggtcaataaggcagcaagggtccagggcgtcgctgacggtggtcagattgcaatgagtagtgatttttactctgaattcaacaagataatgaagtatcatgagcgagtagtgaagggcaaggaatctctcaaggaagtttatggtgaagaaattatcggagaggttcttgaaagagaaattgccatgctggaaagtattggttgggcattttttgactttggcgagcataagctaaagggactcgaaaccaaagaactcgttactattgcgtatcctaagattcttgcttccagacacgaatttgcatctgaagatgagcagtcaaaattaatcaatgaaacgatgttgtttcgtttaagagtcatttcaaacagactggaatctataatgtcagctttaagcggcggatttattgaactagactctcggacggagggaagttatattaaatttaaccctaaagttgaaaatggtattatgcaatcgatttctgagaaggatgcgttgttattttttgatcatgtaattactagaatcgaatccagtgtggcattattacatttacgacaacagaggtgttcaggactggaaatttgcagaaacgataaaacatctgctcgaagcaatattttcaatgttgttgacgaacttttacaaatggttaagaacgcaaaggatttatcaacttga

SEQ ID NO: 1400 - DNA, 612 bp, Saccharomyces pastorianus
atggtttcgataagaaggtatttgcgagtgccgaatgagttgaaaccttcccagatcttcaaacaagattctctctctccaagtaagattggacttcaaattgttcttttacagattttttattacaccacagcgatcgttcttttttattgttgggcgaagctagcgggatatgatctcaatatcaaggaatggctgttttcttgggagaatatcgactttacgaacgcatacggtttatcaatctcactgttatggcttctggattcattaatatgtgtttttttcttaactgttatcgttggacggagtaaactcgcatgggattttgctatcactatacatgccatcaattttattgtggtgttcctctatactcggaaatttccttctttttcttggttttttcttcaaattttatcatctttaatactaatatttttggggacatggacaacaagatggagagagcttagagacaccttttttgagggcttggttgatcctaatgaaggagaagttggattggttacgcctagtcagcagcatagtaatcattcagaattggagcaatcaccaatacaactaaaagacttagaaagccaaatatga

SEQ ID NO: 1401 - DNA, 612 bp, Saccharomyces pastorianus
atggtttcgataagaagatacttgcgcataccgaatgaattaaaaccgtctcagatctttaaacaagattctctttctcctagtaagattggtcttcaaatagtccttttacaaattttctattatactactgctaccattcttttctattgctgggggaaactagcaggttacgatctagaaatcaagaattggcttttctcttgggagaacattgagtttacgaacgcttatggtctttcactatcgctgctgtggcttttggactcattagtatgtgtcttctttttgacagttattgttggtagaagcaaactggcatgggactttgccattaccatacacgccattaattttatagtggtatctttctacacgtgggaattaccttccttttcgtggtttttccttcaagttttgtcatcattaatactgatatttttgggaacatggacgacgaggtggaaagagcttagagacacttttttcgagggtttagttgactctaacgagggacaaagccaaccgaccgcatcaagtcaagagcatagtgatcacacactactaggccaatcacaaatacaactcaaagatttagagagtcaaatataa

SEQ ID NO: 1402 - DNA, 357 bp, Saccharomyces pastorianus
atgtcgttcagcggaaaaaaatttaggtctagaagacagcagctagtatatgaagcatctttagcggggcgatacaaaaaagcattgagtaagcacccctttcttttttttggtttaccattttgtgcaacaatagtattgggttcgttttggttgtcaagctttacagcgatcaagtacgagcaaggcgatcgtaaagttcaggaaattaatgaagaggatatcttgaaaataaggaagaatcaaagggaatttgatattaaagaagaatattatcgtttacaaggtctttctgaagaggattgggagcctgtgcgcgtcgctaggttaaaggatgaatctgagaatgtctggtaa

SEQ ID NO: 1403 - DNA, 357 bp, Saccharomyces pastorianus
atgtcatttggagggaaaaaattcagatcgagaaaacagcagttagcgtatgaagcatcgttagcaggacgatataaaagatccctgagcaagcaccccttcttatactttggtttaccattttgcgcaacaatagcactaggctctatttggttatcaagctttacagcaatcaaatatgagcgaagtgatcgtaaagtccaggaacttaatgaagaagatatattaaaaatgaagaatagtcaaagagaattcgacataaaagaagaatactaccgtctacaaggtctttcagaagaggattgggaacctgtgcgtgtgactagattaaaggacgaatcagaaaatgtttggtaa

SEQ ID NO: 1404 - DNA, 1431 bp, Saccharomyces pastorianus
atgaggcaggtttggttctcttggattgtgggattgttcctatgttttttcaacgtgtcttctgctgcccaatacgagccacctgcgacttgggagaatgttgattataagaggacaatagacgtgtcaaacgcttatatttcagaaacaatcgaaataactatcaaaaacatagcaagcgaacctgcgactgaatacttcacagcctttgagagtggcatcttcagtaaagtttcctttttttcagcctattttaccaacgaggcaacttttttaaatagccaattacttgccaattcgactacagcacctggtgacgatggtgaaagtgaaattagatacgggatcattcaatttccaaatgcaatttcccctcaggaagaagtttctttagtgattaagagcttctataataccgtaggtattccttatcctgagcacgttggaatgtcagaagaacaacacctattgtgggaaacgaacagattgccgctttctgcttacgataccaagaaggcctcttttacgctgattggtagctcatcatttgaggagtaccaccccccaaatgacgagagtttactgggaaaagctaatggaaactcttttgagtttgggccttgggaagatattccgagattttcttcaaacgaaaccttagcaattgtttattcccacaatgccccattgaatcaggtagtgaatttgagaagagatatttggctttctcattgggcttccacaatacaatttgaggaatattatgaattaacaaacaaagccgcaaaactgtctaaaggattttcaagattagaattaatgaaacagattcaaactcagaatatgagacaaactcactttgttactgtcttagacatgctcctgcctgagggagctactgatcattatttcactgatttggttggccttgtttccacgtcgcatgcagaacgtgaccatttctttataagaccaagattcccaatctttggaggttggaactacaattttactgtcggttggactaataaattgtccgatttcttgcatgtatcctctggctcagacgagaaattcgttgcttctatcccaattctaaacggcccaccggacactgtatatgataatgttgaattatcggtatttcttccggaaggggccgaaatattcgatattgattctccagtcccttttacaaatgtttctatagaaacccagaaatcatactttgacctaaataaaggtcacgttaaattaactttcagttacagaaatttgattagtcaagttgccaatggccaagtcttgataaagtacgactacccgaaaagctcttttttcaagaagcctctgtctattgcttgctatattttcaccgcactaatgggagtttttgtcttaaaaactttgaacatgaacgtaactaactga

SEQ ID NO: 1405 - DNA, 1428 bp, Saccharomyces pastorianus
atgaaaggtgcttggttttcctggatagcaggattattcctattttacaacgtgtctttggctgcacaatatgtaccacctgcaacttgggaaaacgttgattacaagagaacggtagatgtatcaaatgcttacatttctgagacaattgaaataaccgtcaaaaatataggtaatgaaccggcaactgagtactttgctgtttttgaaagtgatattttcaataagatttcctttttctctgcttatttgagcgacaaggcctttttcttgaatagtcagctgtttgtcaattctactacggaaaacagcgatgaagagagtaatgatactagatacgggattattgaatttccaaacgcgattcctcctcaggaggaaatttcctttgtgatcaagaatttttacaataccgttggtgttccttatcccgagcatattggaatgtcggaagaacaacatttactatgggaaacaaacagattgccactttctgcgtataataccaagaagggttctttaaaaattatcggtagttcttcgttcgaagaattccatcctccaaatgacgagagtttaatagggaaaactaccggcaaggttttcgagtttggaccttgggaaaatattcccaaactctctaacaaagaaaggttggcggtcgtttattctcataacgcaccattaaatgaagtcactaatttgaaaagagatgtttggctttcccactgggcttctaccacccaattcgaagaatactacgaattaactaacaaagctgcaaagttaactaaaggattttcaagattggaattgatgaagcaaatccaaaatcaaaacatcagagaaactcactttattaccgtcttagacatgttactacccaatgatgctactgatcattattttactgatttggttgggcttgtttccacctcacatgcagaacgtgaccatttttttataagaccaagattccccttgtttggaggctggaactataatttcacagttggctggactaacccattgtccgatttcttacatgtatcttctgactcaagtgagaaatatgttgcttctatcccattgctcaatggcccattggacactgtatatgacaatgttgaattatcaatatttcttccagaaggtgcaaaaattgtcgatatcgattctcctgtcccctttacaaaggtttctgtagaaacgcaaaaatcatattttgacctaaataagggccatgttaagctgactttccaatacaggaatttgattacgcaagttgccaacggtcaagttttgattaaatatgattactcaaagaattcgtttttcaaaaagcctctatccattgcttgctacatttttgcggcattgatggggttcttctttttaaaaacgttgaatctaagtttaacaaactaa

SEQ ID NO: 1406 - DNA, 1809 bp, Saccharomyces pastorianus
atgcctgagcaagaaccattgagtcccaatggccgtaagcgctctgaggttcactatatctcaatcccattgaacagaggttccgcattctcaccagatgattctgtatcacagtttcagtctgacgggttcatgacacgtaggcaatccatattggaccatcctgtgggctcatttaagggagttaattctttaagtcgatttgcgacttcgttgaggagagccaattcgtttcgtaatatcgagctaaatgcggataatgaaagatcctttttcaaagagagtaacgatgaaacctacgatccggatactttagcaccagctttggacggtagaagattatcagtaactttaaataatgctggtcgcctgcgcattactaatttggctaacaacgatagagttagtacagccagcatggctattcacgatgatgattatgggtccatccaaaattcaacaattggggattctgggtcaatattacgccctactgcctccttaacagaaatgatgagtggtggagcggggagaaggtttacaaataatgacatggattcaattgtagtgaagagagtggagggtgtagatggtaaggtagtaactcttcttgctggtcagtcgaccgctccacagaccatattcaactcaatcaatgtactgattggtattgggctcctggcgttacctcttggtttgaaatacgccggctgggttataggacttactatgcttgcaatcttcgccttagcgacattttgtactgctgaacttttgtctaggtgcctagatacagatccaactttgatatcttacgcggacttgggatatgcagcatttggtacaaaagggcgcgcactaatttctgctcttttcacacttgacctactgggtagtggggtgtccttggtgattctcttcggagattctttaaatgctctatttcctcaatactcgaccacttttttcaaaatagtttcattttttatcgttacacccccggtttttataccattgagtgttctatctaatatctcgcttctgggaatcctttcaacaaccggaactgtgctagtcatttgctgctgcggactatacaagtcgtcttctccaggttcattagttaatccgatggaaacgagcatgtggccgatagatctaaagcatctctgtttatctataggtttattgagtgcctgctggggaggacatgcggtttttcccaacttaaagacagatatgaggcatccagataaatttaaagactgtttgaaaactacctataagataacatcggttacggacataggtactgcagttattggctttttgatgtttggaaatcttgttaaagatgaaattactaagaacgttttgctgacggagggatatccaaaattcgtttatggtctgatttcagcgcttatgactatcattcctatcgcaaagaccccattgaacgcaagacctatcgtttctgtattggacgttctgatgaatgtgcaacacatagatgaagcggccagcgccataaaaagaagagctgcgaaaggccttcaagtattcaataggatctttattaatgttgtcttcgttttgatagctattaatttccctgaatttgataagattatcgcatttctgggggccggtttgtgttttacaatttgcctaattttgccgtgttggttctatttaagattatgcaagacaacaatcaaaccatgggagagagtggcttgtcacgtaaccatatgtattagtgtcgtgttgtccacattaggtgttggtgctgcaattatttcataa

SEQ ID NO: 1407 - DNA, 1812 bp, Saccharomyces pastorianus
atgcctgagcaagaaccgtcaaatcccaatggtcgcaaacgctctgaggtacactatatttcgattcctttgaatagaggttcagaattttcaccagacgatgctacatcgcagtttcaatctgatgggttcacgactcggaggcagtctatcctagaccaaccagttggctctttcaagggtgttaattctataagtcgattcgcaacttcattgagaagagctaattcgtttcgtaacatcgaattaaacgcagataatgaaagatcgttcttcaaagatactaacgatgaaacgtacgacccagatactttggcaccggctatggacggcaggagattatcggtcaccttaaatagttctggtcgtccacgcatcagcaacgcggcaaataattttgacagaattagtacagctagtatggcaatccacgatgatgactacggatccatccaaaattctatgattggcgattctgggtcaatactacgccctactgcttctttaactgaaatgataagcggaggtgcagggaggaattatgcgaataatgatatggaatcaatagtggtaaaaagagtggaaggcgtagatggtaaggtcgtgactttacttgctggtcaatcaaccggcccacaaaccatcttcaactcaattaatgtgttaattggcattggacttttagcattaccactcggattgagatatgccggctgggttttgggatttaccttactttctattttcgctttaggaactttctgtacagctgaacttttgtccaggtgtttagacacagatccgactttgatatcatatgcagatttgggctatgcagcatttggttctaaaggccgtgcgttgatttcagctctctttacgcttgatctacttggtagcggagtgacccttgtgatcttgtttggagattctttaaacgctttatttcctcaatactctaccacttttttcaagattgtttcattcttttttattacacccccagttttcataccattgagcgttctctctaatgtttcacttctgggtatcctttcaacaacaggaactgtattggtcatctgttgttgcggactatacaaggcatcttcaccaggctcattgctcaatccgatggaaacaaacatgtggccattggacttcaagcatctttgcttatctataggattgcttagcgcatgctggggaggacatgcagttttcccaaatttgaagacggatatgagacatccaggtaaatttaaggactgtttaaaaacaacttataagataacatcggtcactgacataggtactgccgttataggttttttaatgtttggtaatttggttaaggatgaaattaccaagaatgttttgctaacggagggatatccgaagttcgtatatgctctaatttcagcacttatgacaattattcctattgccaaaactcctttgagtgcaaggccgattgtttccgtgttagacgtttttatgaacgtgcaacagatcgatgaagcggacagccctatgaaaagaagaatttcgaaaggtcttcagctattcaatagaattttcattaatgttgttttcgttttaatagctataagcctccctgaatttgacaagatcattgcgtttttgggtgcaggcttgtgtttcgcaatttgtctaattttgccatgttggttttatttaaggatatgcaagactaccatcaaaccttgggaaagaatggcctgttacataacaatatgtgccagtgtcgtgttgtctacattgggagttggtgctgcaatcatttcttag

SEQ ID NO: 1408 - DNA, 1620 bp, Saccharomyces pastorianus
atgaaagagttcgatgagagctactttttcaaatgcttaacagctaaccgccattcaataatgttacgttctcttcattctgcggctacgttatctaacaagaggttttactctctcatatctcattcaaatagaaagaacataatcaaaaagcttctacgtcacccttctttcgatccaattcgtcatcatttgcctgaagatataaccaccattgacccatactctctatcgcagaatgttatcgaaagtttaaacaaattagaggttcctaaaaaggatgcggccatggtacacaatatgatgatagaaaacttaagtgatcttgactacggcgttgcaacaattcactcaaataatttgcgtgatcttgatttaaaaccttcacttcccgccatcaaacaaattattaggaataatccaggaagagtacaaagctcttgggaactttttacacaatacaaggcctcaatggaaaatgttcctgatgaactgatggaagtggtcttagaaaaaattatcaagtttgacaaggcagaaaaggttgatggaaaaaagagtctgacttatcaagacctcgttagatgtctttatttaatcaaccatttttcttcaaattataatttgccttcagagctcgtggaacctatccttatttacatagtggacaacggaattcccaatgttttaggttctgtactcaaatataaaataccgctgagcttttttgataagtatgtcagtgaaatgacacaataccaaatttgtgaactttatgatttttattcgcttgataatatagtagctgatccattagtactacacaagtgtctaactgttctgggcgaaaacgagaaaattcagcaaactgaagaagaaaaagaaattattagcaagttggaggaagaaatagaaattgttaaatcacaatgtcatgataattggagcctcgaatttccgaattggagtgtacgcaaaactgcaacttcattcgaaaaattatttttagagatccaaaaaagaaacatagacaagaaggatttcgaattagctcacaagctgttaagattaattggcgctttcaaaggtaaagtttctctattttttaaattatacgacgaatatctcttaaaattcaaaaataatgaggacgacttaatgtttgaagcgtttttaacgctctgctgccagggttataaaagcagtaatgaaaaaatgctacaatacgctgaagcttttattaaagaagactttgattccaaactagagagtaaaattcaaagtgtgttaattgttgctaacgcgaaagcaaatattgatctatctctcaaaatttacaattctaatatatctactgctaaacgagagaaagataagtacacagatcttgctgaaagtgacgtattaactgaatcgctcattttagcattcttatccagagatgatgctgattttgccagggtcatctttgatggcgcactaggagaaaagctgatatcagggccgactgctgcaaaaaaaataaaaaatctcttagcccagtatggagaagcgttagaaacaaaaacaagcaaacaagttatgcagactaagatagaacattatatggaaagcatataa

SEQ ID NO: 1409 - DNA, 1953 bp, Saccharomyces pastorianus
atgttcacttttctcaaaattattctgtggcttttttccttggcattggcctctgctataaatatcaacgatatcacattttccaatttagaaattactccactgactgcaaataaacaacctgatcaaggttggactgccacttttgattttagtattgcagatgcgtcttccattagggagggcgatgaattcacattatcaatgccacatgtttataggattaagctattaaactcatcgcaaacagctactatttccttagcggatggtactgaggctttcaaatgctatgtttcgcaacaggctgcatacttgtatgaaaatactactttcacatgtactgctcaaaatgacctgtcctcctataatacgattgatggatccataacattttcgctgaattttagtgatggtggttccagctatgaatatgagttagaaaacgctaagtttttcaaatctgggccaatgcttgttaaacttggtaatcaaatgtcagatgtggtgaatttcgatcctgctgcttttacagagaatgtttttcactctgggcgttcaactggttacgattcttttgaaagttaccatttgggtatgtattgtccaaacggatattttctgggtggtactgagaagattgattacgacagttccaataacaatgtcgatttggattgttcttcagttcaggtttattcatccaatgattttaatgattggtggttcccgcaaagttacaatgataccaatgctgacgtcacttgttttggtagtaatctgtggattacacttgacgaaaaactatatgatggggaaatgttatgggttaatgcattacaatctctacccgctaatgtaaacacaatagatcatgcgttagaatttcaatacacatgccttgataccatagcaaatactacgtacgctacgcaattctcgactactagggaatttattgtttatcagggtcggaacctcggtacagctagcgccaaaagctcttttatctcaaccactactactgatttaacaagtataaacactagtgcgtattccactggatccatttccacagtagaaacaggcaatcgaactacatcagaagtgatcagtcatgtggggactaccagcacaaaactgtctccaactgctactaccagcctgacaattgcacaaaccagtatctattctactgactcaaatatcacagtaggaacagatattcacaccacatcagaagtgattagtgatgtggaaaccattagcagagaaacagcttcgaccgttgtagccgctccaacctcaacaactggatggacaggcgctatgaatacttacatcccgcaatttacatcctcttctttcgcaacaatcaacagcacaccaatcatctcttcatcagcagtatttgaaacctcagatgcttcaattgtcaatgtgcacactgaaaatatcacgaatactgctgctgttccatctgaagagcccacttttgtaaatgccacgagaaactccttaaattccttctgcagcagcaaacagccatccagtccctcatcttatacgtcttccccactcgtatcgtccctctccgtaagcaaaacattactaagcaccagttttacgccttctgtgccaacatctaatacatatatcaaaacggaaaatacgggttactttgagcacacggctttgacaacatcttcagttggccttaattcttttagtgaaacagcactctcatctcagggaacgaaaattgacacctttttagtgtcatccttgatcgcatatccttcttctgcatcaggaagccaattgtccggtatccaacagaatttcacatcaacttctctcatgatttcaacctatgaaggtaaagcgtctatatttttctcagctgagctcggttcgatcatttttctgcttttgtcgtacctgctattctaa

SEQ ID NO: 1410 - DNA, 2103 bp, Saccharomyces pastorianus
atgtccgatcaaaaagtttttgccagatataaagcaaatgaaatcgtcacagatctgcaacattttggagtaaaaaagtttaaatcgaatataacaagaaggaaaaatgctctgagaaaaattatcgccaatttggttctaggaaactatggcgaaatgtcccttctgttttctgagctcttgaaattttggcaaattgaagatgatctagaagtgaaaagaatttgccatgagtatattagggtgatcggcgcattaaaacctcagcaggccagagaggctttgccatttataatggacgatttcaaaagcagagatgaaaagttacaaataatggcactaagaactctggtattagtcccggtgaaagagctatctgatcaggccttcgactgtatcatttcattggtaaatcacaagtctccacctgaacaagtgacgaggacagcaatttacgcactgttggatttagatgaaattgatcatgaaagggtattggggttatcaagcattctacatgacattgtaaaagcacagtcgagctctccagaagtcattgtagctgcattacatactttatattccattcacgaaaaaaacgctaacatggaacccttcaggattcccttggaactcgcttttgacatgctagaacttttacccgaattaaatgagtggaataaggctactgttttggaagttttgacgacttcggttgtgccgcagcattatttggatacccatgaaatgatcgaactagctttaccgtacctgcaacaagtaaacacatacgtagtgttgaactctttaaaattcatcatgtacttgttgaattatgttgacgtcatcaaagaaactctagccgaaaagctatctaactctgtaatagctttgttagataagccgcctgaattacaatttttagtattaagaaacgttattcttcttttattgagtagggagtcatctctactcaggctagacatttcgtattttttcatcgagtacaatgaccccatatacatcaaagacacgaaattagagtgtttatatcttttagctaacaaggaaacattaccaagaattctagaagagttggaacaatatgctacagatattgatattcaaatgtcaaggaaatcagtcagagccattggtaatctcgctgttaagctagatgaagactctgtacacgattgtgtcgctgttctactagatttgttagaattcggtgttgattatgtcgtccaggagattatttcggttttcagaaatattttgaggaaatatcccaataattttaaagcaaacgtaacagaactagtcaaacacactgaagttgtacaggaacctgaatcaaaaaacgctatgatctggataataacgcaatattcggatgtaattccaaactacctggagttatttagagttttttcctcaaacatgtttaatgagacgctagaagtgcaattttccattctgaactcagcaataaaattcttcatcagaaatcctacaaaggaaactgaagaactttgtatggatttattaaaaggatgcaccgatcacgaaaataatcctgacttaagagataaaacactgatgtattggagattgctgtcattaacgagaacgtctcgtatatcaaacgcgataacttttgaatctttaaaatcagtactggacggagagttgccactaatagaaatgaacacgaaattagatcccaccgttttggaggaattggagctaaacattggtacaatagtatcgatttacttaaaacctgtttctcatatctttagattgaataaaaccaaactgctaccacaaagtcctattttgaatccaaacaaagacctcttgccagttgtaggtaactcatttcctccaactggagctaatagggaccgtcaaaattcagaaagccagtcctcgacgaagtccagaaagactgccatgatggatgattatgataagcccgctgaaaaaattaatcagttgaaaggtaagcgtaaatctagttcaaacaacccctcaaaactatcacggaaaccctcaactttattaagaaaactctctatgaaacggcccttttcgtga

SEQ ID NO: 1411 - DNA, 2103 bp, Saccharomyces pastorianus
atgtccgaccaaagggtttttgctagatataaagcaaatgaaattgtcactgacctacagaattttggagtgaaaaagttcaaatccaatacaacaagaaggaaaaatgctctgagaaaaattatcgcaaatttgacgctagggaactatggcgaaatgtctcttctattttctgagcttttaaaattttggcagattgaagatgatttagaagtgaaaagaatttgtcatgaatatataagagtgatgggcgtaataaaaccccaacaggctaaagaggcattgcctttcataatggacgatttcaaaagtagagacgaaaaattgcagatgatggcattgaggactttggtattagttcccttaagggagttctccgaccaagctttcgactgcataatatcgttggtaaatcacaaagctccacctgaaaatgtcacaaggatggcaatctacgcattactagatttggatgaaattgatcatgaaagggtcttaggtttatcaagcattcttcatgacattgtaagattgcaatcaagccctccggaagttgttgtagctgcattacacagtttgtattctgttcatgagaagaacgctaatatggaagcatttggaatttctttagacctagcattcaatatgctagaacttttacccgaattaaatgaatggaacaaagcaactgtattggaaattctaacaacttctgttgtaccgcagcattatttggacgctaacgaaatgatcgagttggccttaccataccttcagcaagtcaacacctatgtagtgttgaacactttgaaattcatcatgtacttattgaactatgttgatgtcatcgaagaaagtctagccgaaaaattgtctaattcggtgatagctttattagacaaacctccggagctacaatttttagtattgagaaatgtcatccttcttcttttgagtcgggaatcatctttgctaaggctagacatttcatacttttttatcgaatacaatgatcctatatatatcaaggacacaaaattggaatgtctatatcttttagctgacaaggaaacattgccaagaattttagaagaactagaacaatacgctacagacatagatatccaaatgtcaagaaagtcagtcagagccatcggtaacctggctgttaaattagatgaagattcagtccatgattgtgtcgctgtcctgctggatttgctagagttcggcgttgattacgtcgttcaggaaattatgtctgtttttagaaacattttaagaaaatatcctaataattttaaaaaaaatgtgaaagaattagtcaaacatacagaagtggtacaagaacctgaatctaaaaatgcaatgatttggataatcacacaatactcggatatcatccctaattacctggacttattcaaagttttttcttccaatatgtttaatgagacgttagaggtgcagttttcaatcctgaattcagcaacgaaatttttcatcagacgccctacaaaggaaacagaagaactttgcatggatttgttgaaaggttgcaccgatcaggaaaacaatcctgatttaagagataaagcatttatgtattggaggttgttgtcgttgacaaaaatggctgatacttcgaacacgctaacttttgaagctctaaagtcagtgatagatggagaattgccactaatagaaatgaacacaaaattagatcctactgttttggaagaactagaactaaatattggtacaatagtatcaatttatctaaaacctgtttcccatattttcaggttgaataaaacaaaattattgccaccaagccctgttctaaatccaaataaagacctcttaccagtagtcaacaattcattctcgccgaccggagccaatagaaaccgccaaaattcagaaagtcagtcttcaacgaagtctagaaggactgcgatgatggatgattatgataaacccgctgaaaaaatcaatcagttgaaggggaaacgaaaatctagttctaacaacccctcaaaactctcacgaaaaccctcaactctgctaagaaagctttctatgaagaggccgttttcatga

SEQ ID NO: 1412 - DNA, 282 bp, Saccharomyces pastorianus
atgcataatactggcaagagatactcagaaactgccaaaaaagtggcagcaggaagagcaagaaaacgtaggcaagcttacgaaaaggaccaactagagaaacaacaactagaagctcaagaagctcagaggtgggaagaaggtgcgagaacccctaaccagaagaagctgattatggaacaaaaaaagacagagaagctaagagccaaaaaggaaagagaccaattactagccgccgaagaggaagctttaggtaagggaggcaggggaaaaagatactga

SEQ ID NO: 1413 - DNA, 282 bp, Saccharomyces pastorianus
atgcatagcacgggaaaaagatattcagaaacagctaaaaaagttgctgcaggaagggccagaaagcgcagacaagcttacgagaaagaccagttggagaaacaacaattggcggctcaagaggctcagaaatgggaacaaggtgcaagaactcctaatgagaaaaagctggcattggagcaaaaaaaggcagagaagttgagagccaagaaggaaagggaacttttattagccgccgaagaagaagtgttgggtagaggcggcaagggaaagagatactga

SEQ ID NO: 1414 - DNA, 1464 bp, Saccharomyces pastorianus
atggacgcattgttaacaaagttcaacgaggatagaaatctccaagatgaaaacctgtcccaaccacgaacgagagtaagaattgttgacgacaatctttacaacaaatcgaatcctttccaactatgctataaaaaacgtgactacggttctcagtactaccacatttatcaataccgtctaaagactttcagagaacgcgtcttaaaagaatgtgacaagagatgggatgcgggctttaccttgaatggccaattagttctaaaaaaggacaaagtgttagatattcagggaaaccaaccatgttggtgcgtaggatccatatattgcgagatgaaatataaaccaaacgtactggacgaagtgatcaatgatacatatggtgcaccagatttaactaaaagttatactgataaagagggtggttctgatgaaattatgctcgaagatgaaagtgggagagtgcttctagtgggagattttattcggtctacacccttcatcacgggtgttgttgtaggtatactgggtgtggaagctgaagccgggacatttcaagttttagacatatgctaccccactcctttaccacaaaatcctttccctgcaccaattgctacctgccccaccaggggaaaaattgctcttgtttctgggttaaacctcaataatacatcacctgataggctattgagattggagattttgagagaatttttgatggggagaatcaataacaaaattgacgacatttctctaattggtagattactgatatgcggcaactctgttgacttcgacattaaaagcgtgaacaaagacgaattgatgatttctctaactgagttcagtaaatttctacacaacattttgccatctatatctgttgatattatgcccggaaccaatgatccaagtgacaaatctctaccgcaacagcctttccacaaatcattgtttgataagtccctagaatcatacttcaacggttctaacaaagaaattttgaatttagtgaccaacccatatgagtttagctataatggcgtagacgttctagccgtttcaggcaaaaatatcaatgatatttgtaaatacgtaataccatcaaatgataacggagaaagtgaaaacaaggtcgaggagggcgagagtaatgatttcaaagacgatatagagcatcgactggaccttatggaatgtacaatgaaatggcaaaacatcgcgcccaccgcacctgataccttatggtgttatccgtacactgataaggatccatttgtattggataagtggccccacgtttacattgtggcaaaccagccatattttggaacaagagtagtggaaataggtggtaagaacataaagataatatctgtccctgaattcagttctactgggatgataatattactggatttggagacgttagaagcagagacggtcaagattgacatttaa

SEQ ID NO: 1415 - DNA, 1470 bp, Saccharomyces pastorianus
atggatgccttattaacaaagttcaacgaggccagaactgtccaagacgaaggtccgtcccaaccattgaagagggtaaggattggagacgatggtcttcgtaacgaatcgaacccatttcaattgtgttataaagaacgcgactacgggtctcagtactatcacatgtaccagtaccgtttgaagactttcagagaacgtgttttgaaagaatgtgataaaagatgggatgctggttttaccttaaatgggaagttggtccaaaagaaagataaagtactggatattcaaggaaaacaaccatgttggtgcgtgggatccatatactgtgagatgaagtataaaccgaacgtgctggacgaggtaatcaatgacacctatggcgcgccggacttaacgaaaagctatactgataaagaagagggctccgatgagatcatgttggaagatgaaagtgggagagtgcttctggtcggcgatttcattcggtctacgcccttcatcacgggtgttgttgtggggatactgggtatggaggctgatgcagggactttccaggttctggatatatgctatcccgctcccttattgcagaatcctttacccccgcaaaacgctacttcccagactaagcgcaaaatcgctcttgtttctggattgaatctgaataacgactcacctgataggctacttaggttagaaattttgagagagtttttgatgggaaggattaatagcaaaatcgacagcgtttcccaaattggtagattattgatatgtggaaactttgttgatttcgacgtggaagttgtgaccagagatgaattaacaacttctcttactgaattcagcaaatttctacacaatattttaccttccatctccgttgacataatgcctggtactaacgatcccagtggcaaatcgttacctcaacagcctttccataaatcattatttgacaattcactggactcttacttcgatgactctaataaagaaattttaaatctggtgacaaacccctataaattcagttataacggtgtagacgttctcactatttcaggtaaaaacatcaacgatatctgtaaatacataataccatcaaatgagaatatcaaagacggtcaagacaaggaagcaaaagacgaagataacgaagatttcaaggacgatatagaacatcgactggatctaatggaatgtaccatgaaatggcaaaacatcgcacctactgcacctgatacgttatggtgttatccatataaggatgaggatccattcgtactaaacgaatggccacacgtttacgttgtgggtaaccaaccgagcttcggaacaaggctaatggaaataggtggtaagaacataagaatagtatctgtgcctgaattcagttccactggggtggtagtgctactgaatttggacactttagaaatagagacagtcaagatagacatctaa

SEQ ID NO: 1416 - DNA, 915 bp, Saccharomyces pastorianus
atgtccacttctcattgcagattttatgaaaacaaatacccagaaattgacgatatcgtcatggttaacgtccagcagattgctgaaatgggtgcttatgttaaattgttagaatatgacaacattgaaggtatgattctactaagtgaattgtcccgtagacgtattaggtcaatccaaaaattaattcgtgttggtaaaaatgatgtcgccgttgttcttcgtgtcgacaaagaaaaaggttatattgatttgtccaaacgtcgtgtttcttccgaagatatcattaaatgtgaagaaaaataccaaaaatctaagactgttcattccattttaagatactgtgccgaaaaattccaaattcctttggaagaactatataagaccattgcttggccattaagtcgaaaatttggccacgcttacgaagctttcaaactatccatcattgacgaaactgtttgggaaggtattgaaccgccatcaaaagatgttttagatgaattaaagaactatatctccaagagattaacaccacaagctgtaaagattagagccgatgttgaagtgtcttgttttagttacgaaggtatcgatgccattaaagacgcattaaaatcagctgaagacatgtccacagaacaaatgcaagttaaagttaaattagtcgccgccccattatatgttttgaccacccaagccttggataagcaaaaaggtattgaacaactggaaagcgccattgaaaaaattacagaggttattacaaaatacggcggtgtttgcaacattaccatgccaccaaaggctgtcactgctactgaagacgctgagttacaagctctattagaaagcaaagaattagataatagatctgactctgaagacgatgaggatgagtcagacgacgagtaa

SEQ ID NO: 1417 - DNA, 915 bp, Saccharomyces pastorianus
atgtctacttctcattgcagattttatgaaaacaaatatccagaaattgacgacatcgtcatggtcaacgtccaacagattgctgaaatgggtgcttacgttaaattattggaatatgacaacattgaaggtatgattctactgagtgaattatctcgtagacgtattagatccattcagaaattgattcgtgttggtaaaaatgatgtcgctgttgttcttcgtgttgacaaagaaaagggttacatcgatttatctaaacgtcgtgtttcttccgaggacatcattaaatgtgaagaaaaatatcaaaaatccaagactgttcattccatcctaagatattgtgctgaaaaattccaaatctctttggaagaactatacaagaccattgcttggccattaagtcgaaaattcggtcatgcttacgaagctttcaaactttccatcattgatgagactgtttggacaggtatcgaaccgccatcaaaagatgttttagatgaattaaagaactatatttctaagagattaacaccacaagccgttaaaatcagagcagacgctgaagtgtcttgtttcagttacgaaggtatcgatgccatcaaagaggctttgaagtctgctgaagatatgtccacagaacaaatgcaaattaaagttaagttggttgccgccccattgtacgtcttaaccactcaagccttagataaacaaaagggtattgaacaattggaaagcgctattgaaaaaatcaccgaagtcattaccaagtatggcggtgtttgtaacattacaatgtcaccaaaggctgtcactgctactgaagatgctgaattacaggctttattggaaagtaaagaattagaaaacaaatctgactctgaagatgacgaggatgaatcggatgacgaataa

SEQ ID NO: 1418 - DNA, 1017 bp, Saccharomyces pastorianus
atgtcaatacgtccagcaacacatgcaggctcatggtattccaatagagcccaagaattatctcaacaactgcatacatacttgatcaaaagtacccttaaaggcccaattcacaacgccagaattatcatatgtcctcatgccggttataggtattgtggatccactatggcctactcgtacgcatcgttggatttgaaccgtaatgttaagagaatatttatcttggggccgtcgcatcacatctatttcaaaaaccaaatattagttagtgcattcagtgagctagagacgcccttgggtaatctgaaagtggatacagacttgtgtaaaacattaatacagaaggagtatcctgagaacggaaagaagctgtttaagccaatggatcatgacactgatatggctgaacattccttagagatgcagctccccatgttggtggaaactttgaaatggagagaaatttctttagatacggtgaaggtaattcctatgatggtttctcataacagcgttgatgttgatcgttgcattggtaatatcttgtcggagtacattaaggatccgaacaacttattcattgtaagcagtgatttctgtcattggggccgcagattccaatatactgggtacgtcggaagcaaggaagagttgaatgatgccattcaagaggaaacagaagtggaaatgttaactgctaggagtaaactttcacatcatcaagttcccatttggcaatccattgaaataatggacagatatgcgatgaaaacgctaagtgatactccaaatggtgaaaggtacgatgcttggaaacaatacttggaaatcaccggaaacaccatatgcggcgaaaagccaattagtgtgatactaagtgctttatcgaagatccgtgatgccggtccttcaggcatcaaatttcagtggcctaattattcacagagttctcatgtgacaagtattgatgatagtagtgtcagttatacttcaggttatgttactataggataa

SEQ ID NO: 1419 - DNA, 285 bp, Saccharomyces pastorianus
atgtctgcgcttttacaagatatacagagaaaactgatcttccccatagattttcccagccaacagaaaacggagaactttcaacagttatcactcacaatcggagctgttatagcatgcatattgggattcgctcaacaatcgttgtatgttctattggttacgtatggcataagttgtgtgattactctactatgtgttttaccagcttacccatggtataataaacagaaattaaggtgggcacaaccaaaaattgaaattaatatcgaccagtatgattaa

SEQ ID NO: 1420 - DNA, 783 bp, Saccharomyces pastorianus
atgagtagaacagaacctagtgaagagacagcatcgtctctgcagtctgaattttcattcaacgagggaatatcagagaacaataagaaaaatgttgtattgttaaaccaaatagtcccattcatcctgaacacgtctcattacatgacagatctaatgtatattttatactacctggcccagaatcaggacaacaaacgtccaaatgcagacggtacatgtgtgtcgcataaggaagaacttttagcattgaagagtgatctttgcgaattaatttacgatttaaggacaggtttccgtttgttattggatagttgtgagttagatcattttgaaacacctgggaagtgtcgacatttgattgagaaggttttagttacatctatttatggagtaaatggactaatatctcaagaattaagcagattaaacgtcgatttcaaagaagagtttgttttacaactgcagaactgcttgctggggttcgtcaatctttataaatttttgaataaaattcccatgaacaaacaacaatctcagatgaacgatttacaaatgaaaatactagttaatgtgctacagaatgaattgttacccatttggaagttccagctggacctgcttaattgcaaactgttcaatgagctttctaaagataaaaacatggtaaaaatgtatagggaagctacgaacgatacggaaattgacgttagcaagggtgaaccatttatcaaatatgttaattggttaaaagaccaaatcattggcgaaatgactgtgtaa

SEQ ID NO: 1421 - DNA, 600 bp, Saccharomyces pastorianus
atgttgaaagaagttgtttactgcggagtttgctcatacccacctgattactgcgaattttcaggtaaattgaaacgttgtaaagtttggttatccgaaaaccatcctgacctttacgcacaactatacgggaccgaagagaatgcacaagaggaagtagaagccgtgaccaccaaactggctgaatccagtatcggtgaagccagagaggaaaagctggaaaaggacttattgagaatccaaaagaagcaggaaaacaaagaacaaagagagctagccaagaaactgtcatccaaagtgatcatcaagagagaggccagaaccaagaagaagttcatcgtcgctatttctgggctggaggtctttgacatcgacatgaagaaactggccaagacatttgcgtccaggttcgccactggctgttccgtgtccaagaacgtggaaaagaaggaagaggttgtcattcaaggtgacgtgatggatgaggtggaaacttatatacactcgctactggcagagaaggggatgaaagacgtcaaagtggagaccatcgacgcgaagaagaagaagaaacccgccgcagaaggcgtcgctaagtaa

SEQ ID NO: 1422 - DNA, 1758 bp, Saccharomyces pastorianus
atgggcttgttaacgaaagtagccacgtcgagacaattctctacaacgagatccgttgccaagaaactaaacaagtattcctacatcatcactgaaccaaagggccaaggtgcctcccaggccatgctttacgctaccgggttcaagaaggatgacttccaaaagcctcaggttggtgtcggttcatgctggtggtctggtaacccatgcaacatgcatctgttggacttgaacaacagatgttcccaatccatcgaaaaggctggcctaaaggccatgcagttcaacaccatcggtgtttctgacggtatctccatgggtaccaagggtatgagatactctttgcaaagtagagagatcattgcggactcgtttgaaaccatcatgatggctcagcattacgatgccaacatcgccatcccatcttgtgacaagaacatgcccggtgtcatgatggccatgggtagacacaatagaccctccatcatggtctacggtggtaccatcttgcccggtcacccaacctgcgggtcctccaagatctccaaaaacatcgacattgtctcagctttccaatcttacggtgagtatatctccaagcagttcactgaagaagagagagaagatgtcgtggaacacgcctgccctggtcctggttcttgtggtggtatgtacaccgccaacacaatggcctctgccgcagaagtcctaggtttaaccattccaaactcctcttccttccccgccgtgtccaagcagaagttggccgagtgtgacaatattggtgaatacatcaagacaacaatggaattgggcattttgccccgtgacatcctcaccaaggaggcctttgaaaatgccattacttacgtcgttgccacaggtgggtccaccaatgctgttttgcatctggttgccgttgctcattccgcgggtgttaagttgtctccagatgatttccaaagaatcagtaacaccacaccattgatcggtgacttcaagccttccggtaaatacgtcatggctgacttgatcaacgtcggtggtacacaatccgtgattaagtacctatacgaaaacaacatgttacatggtaacaccatgactgtcaccggtgacactttggcagaacgtgccaagaaggcaccaagcttgcctgaaggccaagagatcatcaaacctctttcccatccaatcaagaccagcggtcacttacaaatcttatacggttcattggcgccaggtggtgccgtgggtaaaattaccggtaaggaaggtacttacttcaaaggtaaggcccgtgtctacgaagaagaaggtgcctttattgaagctttggaaaagggcgaaatcaagaagggtgaaaaaactgttgttattatcagatacgaaggtccaagaggtgctccaggtatgcctgaaatgctaaagccttcttctgctctaatggggtacggtttaggtaaagatgtcgcattgttgactgatggtagattctccggtggttctcatgggttcttgatcggtcacattgtcccagaagccgctgaaggtggacctattggtcttgtgaaagacggtgacgaaatcattatcgatgctgacaacaacaagattgatttgttgatctccgaacaggaaatgtctcaacgtaagcaaaactgggtcgctcctccacctcgttacacaagaggtactttatccaaatatgctaagttggtttccaacgcttccagcggttgtgtcctagatgcttga

SEQ ID NO: 1423 - DNA, 1050 bp, Saccharomyces pastorianus
atgagcgtttccaagatggccatgtctaacctggagaaaatactagagcttgtcccgctgtcgcctaccagctttgtaacgcggtacctgccggcagcgcctgtagggtccaagggcacgtttggcgggacgctggtgtcgcaatcgctgctagcgtcgttgtacaccgtgccactcaacttcttccccacttcgttgcactcgtacttcatcaagggtggcgatccgcgggccaagatcacgtaccatgtgcagaacctgcgcaacggccggaacttcatccacaagcaggttagtgcgtaccagcacgacaagctgatctttacctcgatgatcctgtttgccgtgcagcggtctaaggagcacgactcgctgcaacactgggagaccattcctgcgttgcaggacaggcagccggactctcacgagtacgaagaggcctcgtcgctctttgaaagagaggtcttgagcccggagaagctcagccgctatgcctcgctgtccgacaggttccaagatgcagctgagatgagcaagtacgtggacgctttccagtacggtgccatggagtaccagttccccaaggatgtgttctactctgcaagacacacggacgagctagactacttcgttagggtgagacagcccatcacgacagcagagcaggcgggcaacgagtcgtccctgcagacccaccacccgcaccggattccgaagagcatctccccagcaaacgacgcccgctacaactacgtggccttcgcgtacctgtcagactcgtatctcctgctcacgatcccctacttccacggcctgccgctgtactgccacagcttcagcgtctcgctggatcacacgatctacttccaccagctgccccacgtgaacgactggatccacctcaaagtagccaacccgcggtcgcactgggacaagcacctcgtgcagggcaggtacttcgactcccgcacgggccggattgcagcaagcgtctcccaggaaggctacgtcgtctacggtgccgaacgtgacatccgggccaagttctga

SEQ ID NO: 1424 - DNA, 534 bp, Saccharomyces pastorianus
atgtttaacactactccaattaacattgacaaatggttgcaggaaaatgcagatcttttgaagccaccggtgaataattattgcttgcacaaagggggttttacagtgatgatcgttggtgggcccaacgaaagaaccgattatcacatcaacccaacccctgaatggttttaccaaaaaaagggatctatgcttctgaaggttgtggacgaaagtgatgtggaaccaaagttcattgatattactatcaatgaaagtgattcttacttattgcctgggaatgttcctcacagtcccgttaggttcgctaatactataggtatcgttgtggagcaagacagacctggcggagaaaatgataaggtaagatggtattgttcgcattgtcgccaagtggttcatgagagtgagctccaaatgctagatttgggcacgcaagtgaagcaagccattttagaatttgaaaatgacgttgaaaagagaacgtgtttccattgtaacactctaaactacgcccgtccccaatccaattga

SEQ ID NO: 1425 - DNA, 1182 bp, Saccharomyces pastorianus
atgagtgatgattcggaggtgtatttggatatatctattgataaaaagccagttggccgtatagtttgcaagatttttcgtgaaaaggctccaaagacaactgagaatttttatagactgtgtgcaggtgatgtcaaaagtcctctaaatgatcagaaatggctgagctacaaaggaaatggctttcatcgagtcgttaagaactttatgattcaagcaggtgacattgttcttgggacacagaaggattcctctccctcttctgttgggaaaggtggctgttcaatttatgccacagaggaggaggtaaaaggcaatagtgagtctttctgttacgggaattttgaagacgaaaacttgggggagtttcttgaacccttttctctagggatggccaacttgggttctccaaacacaaacaattctcaatttttcattactacatatgccgcacctcatttgaatggcaagcattctatttttggacaagttattcatggaaaatctgtggttcgtactgtggaacacttcaaagtagattctgatggagttcctgaatcggacattagaatcgacgactgtggagtgtgggatgaaagcaaaggcataccactatataatgcttctaatgacccaattgggggcgacgtatatgaggaatatcctgatgacgatacacattttaatgaggacgattttggtaacgcttttaaagctgcaaatacaattaaagaatctggcaccctcttgtttaaaaagaaagactatgagaatgcattcttcaaatatagaaaatcattaaattatattaatgaatatatgccagagcctgatttagataaagaaaaaaatgaagagtttactgatttgaaaatgaaggtttatttaaatctatcattggccctctttaacttagaaagatatgatgattcaataacatatgccacttatttattggagatgtacaatgttccgaacaaagatcgagccaaggcatactacagaagaggcaatagttatctaaagaaaacaagattggatgaagctttacaagattatagactttgtaaagaaatgaatcctgatgacaaagttatagagcaaagaatagaatatgtcgaaaatatcatggaagtgaaaaaagagaagacgagaaggaatatttcgaagtttttctcctga

SEQ ID NO: 1426 - DNA, 4071 bp, Saccharomyces pastorianus
atgtcactgaactttctgccagggcgtcctaacgatactccccagacggcgtgccaagcaacatggcaaaagcataccctcttcgcatactgttctgggaataacttaatcatcctctccaataagttcaccaggctgcagaccatatacacacaagcggactgtaccgcagtcgatatcaacagccagaatgggtttattgccctatctttccataatagggtcctcatctacaagcctattcatcaaatcatgcagaaccccaagtggactcagtgttgccagttgtttcatgacgatactccggtgaactgcctaagatggtcttccgataacgaactagccattgggtctgattttctctcattttggaaaattaaggataattttgggatatatcaacctattttacaatggaatcaaaagcaacctaaacccgtttacaatgtaatcatctcacaggactcgcaattaatagttagtgttgggaaatacgattccaacgccaagttatggaagcgtatttccatggttggagagcaagtcattttcaatctaaccatgctggctcacccgaagcccataactgcaatgagatggaggcatgagcctgatctgacaaacagaaagaacacaccttcgcggacactttatacattgtgcgaagataaagtactaaggatatggtcttgttttgaaatggacaagaaccatactgtgcagctatggggcgaagtacctctttcccctacgcagaaattttgcgtagtaatagataattggataataagacacagcctcaacaaggaagctttagaaagttacaatatatccaaatcagatattgttattctaggttcaatggttggggaaatggaaattatagctttacacaatctttcccaagacccgccaaaaccaatgaccaaagaaactatatcacataagataattgataaagcaactatgctgaacgacacaaaatacgtatacttccccgaagtacaaccctacgatgatttgaaagacaaaatatcgtttttggttcatgatttacaaggtatgataagacatttgctaatcgatcttctgcaactcataagcagcagagacgggcatatatccgtcgatttggaacacaaatttacagggcataacaaatctgtccaaaaattggtgaggagtagcgatggagaagcgttattgactacttctagattctcagaaaactgtgtctggtacccacaaaagttgagtcacggggtttctttgcggttacagaatattatacgtaccgagtctccaataaaatttgcagttgtacatgaactgggtaaactggtcatttgtttgcttgaaaatggggtcttgcaagcctgggaatgtccaacaaaccgaaaagaggacagtgaacagaagcaatcgtatttgcgtgcagaaactacattggaagagaataaatcaattcatccaatagtcatgttaaacacacccgagttaaagcatagtcatgagcgtcattttattgcgttgattttctctgatgggtcaattaaggcctttgaagtttctttgacacgcggtatttttgaagtcaaatccgatgctttggacattcacggcgacgacatttataggatctctatcatcgatcctgtccatcaaacgttctttagtaacaggcctcttatttccttagtaactaagaagggtcttactaggacatataaagccattgtcaattacgatgacagacacgttcaatggattaaggcttgtgaaattaatacaggaataataaaccccacatgcattagaggatcttctacaggtaaactgtgtatcgtcaactctacaggtaaagtgatgtcgttgtgggatttgaatagagcagttcttgaatatgaagaaacatttggtgatgctatcgaagatgtagattggactagtaccgaatatggccaaagcatagtttctgttggatttacaggatacgctttgttgtatactcaattgagatatgattacaccaataatacacctagttatttacctatagaaaaaattgatatcacagctcacacggctcataatataggtgactctatatggatgaaaaacgggacatttattgttgcttcgggaaatcaattttacatcaaggataaatctttggatttaaaggatccattcacataccaatctattggttcaagaaaaatactatcgaatgacatacttcatttaagtagcgttttgaatggcccactaccagtgtatcatccccaatttttaattcaagctatttatgccaacaagttacagcttgtcaaagagttgctgttgagattgtttttagcactaagaaagttggatttcgaatcacaggatgtgtctaatttagactctaatttaggtatgaatcccttgaagttctttattgctaaagacagagactatccgacagaaacgttccctgatccataccccaacttcaacaagacagtatctgcagcactttccgagcaattgacgaaaatcactcttccatatttgacacgtcaccaacagattacacttatcacagtcatcgaagccgtggatgaggtaactaaagatgaaaatgtggtggattacaacggcgttagatttttaatgggtgtaaagttatttttatcccacaaaaatgttcaaaagagtattctgatgagagacgtttcttgggctttgcattcagataacaaagaaataatattatcatttattgaccaccacataacttcatggaatcgtgcgtgcgaatacaagatagcttattggatcaaagaacaagatttagtaaagaaatttgaagatattgcaaaatatgaattttccaaagatgacaagagagatccaagtcggtgtgctatattctaccttgcgttgaagaaaaaacagatactattaagcttgtggagaatggctattggtcatcctgagcaacagaagatgattaggtttatcagtaacgattttagtgtacctaggtggagaactgcggcgctcaaaaatgccttcgttctgctgagtaagcataggtatatggatgctgcagtgttttttctcttaacaggctctttgaaggattgtgtcaatgttctttgcaagcaagtcggggacatggatatggctatcggtgtatgtcgtgtttatgaaggtgataatgggcctgtgttgggagagctattaaccacacaaatgttgcctgagacaataagggagaacgatagatggaaagcaagctttatttattggaaattaaggaaacaagaagtagctattaaagctttgatgactgcaccaatcgatttagaaaacaattctgaggttgttagcaaagaaacctgtgttaacagatcatttctcgtcgaagatcccgctctcctttatttgtacaatcacttgagaaatagaaacttaaagtactttattgggtctcttaatgttgaagccaaaattgaatgtactttgattttaagggttactgatattctttgccgtatgggttgcaactacttggccgcttcacttgtgaagaattggaagttcattgaaagaaattccgttcctgtccaaaaattactagagagtcccgccaaagacagaacttattctgttattggtgctatgacagctgaaccaacgtcaacagctaggatgaggcctagtctttttgataaatttggttcctctaacccctcagaggcggagcctttcaaagccagtactacattaccaagtaacttgttagatgacttttcgcaaccaccgccaaatatctcttcaccaacgtccctcgatcaagattcttcttcggcacccagaagtctattggatgattttgcatctcctttctcttcccagcacaaagagaacgtagctccaagcatgttagatggctttacagagaaaacagaaaactctgaaaatgtgaatgggaaaagtttacagagcaacttctcatcagaagagccacagaatccaagaaaatcggctgtgaccaaaaacttactggacgactttatgtga

SEQ ID NO: 1427 - DNA, 327 bp, Saccharomyces pastorianus
atggttgctagctgtaaggatcagaaaagggctgttgccatctgtttgcagaggtcgccctgcgtgatgatagagaggcacaaccctcaagagtgtctagacaatccagacctgaacaaggatctgcctgagctttgtatagcccagatgaaagcatttttggattgcaaacgaggaatagtggacatgaccaagcggtttaccggtaacgcacccctctcaactggcaagtacgatcagcagtacgaaaacctgtgcacggggaaattcaatcccagagaagaaatggagaagttgagaatgctggatagcaagaagaaggactga

SEQ ID NO: 1428 - DNA, 2679 bp, Saccharomyces pastorianus
atggtctcgttttttgggaggcccaatgagaagaaacgtagtgggggagaggttacacccaaggagctggtgtcacattctgtagctcacacaaggagggcggtgtcccaaccaggacggcctgtatcgaaacgttccttagccgctaaggtagaagagaggcagtgttcaagtgccaagaacaagaaagagatctcttccgcgcatgcggcgggaaaggatgatacatcatctccagttcttctcaattgtctttgctgtggagttttgctacggtttcctgcctcgataaggaaatttcagtgcagtgcatgccaggtgactgttgctatagaggaacccggcgttagcagtggattggaacccggtgtgcacgttccgtgcagcttagacagcttgcaaagagtggtaaaaaggtgccacgatgatctacaacggctaaaaaaaagtgagattttggataaagatagaaaactatcaactttccaaccggtaacaacctatttgcaggaccggtttcatgacgttgacattctaaacgagtcgttcttgatacacgacacgaaacgacacgagaagctactaaactatgaagctcttcaaaaattttacagtctattgtcgactctgcccacaaggaaaccatattatagcatgctttgttgttgtaacaaccttttgaaaagagtgacagtttatgaaagtaaagatttgcaaatatccaaatatcagtggctgcttattatattgaacatacccacgatacggagctgcctgattagagataggaagtgcaaaaatgcatttgaaactccgcaaataagagcattgtcttacgaattggttaagcggtgtataggttatttatctaatttatcgacgaaaacttctcaactgttgattcaggcactacggcgactttcgacaaatgattttttatatcaagtggaaattttgaacttatatatcaatttccagttttcccgactcctttccaacgaaatggcaaactgcaacgtgaacaacaataaaaaaccagaggatgagatgcgttcccgtcttcgtcgacatcataccactggacacgagttcctcagtacgaggcccgtaagtgcagtactagatgagaaaagggactctgactttacacatcctaccaatacgaagataaaattcaaagtttatcaatacgaagacaattggcatattacttctgcgacacgactaatgctggtctattacatagctaatactagaaggaacgaccatagagccttgtcaattcaaagcttttacaatataaccttggattttgtcgattataaacaagacttcgatcattggcggggattagctcaaaagaccaaaatgaatcaattgattgaagaatggggaaactccaagacccaaaaaaagttctcattctgcaaatatccatttgtcttgtcactcggcattaaaatttctaccatggaatatgaaattcgtagaatcatggaacatgaagctgagcaagcctttttaacttccctagataaaggaaagtcggtcgatgtttatctcaaaattaagatacggcgtgaagttatttctcatgattctttaagatgcatcaaggcacatcaaggtgatttattaaaatcattaagggtagaatttgttaatgaacctggtatcgatgcgggcggtttgagaaaagaatggtttttcttattaacaaagtcattgtttaatccaatgaatggattattcgtttacattaaagaaagttcgcggtcatggtttgctatcgatcctccaaattttgataaatcaaaaaaaagcaactctcaattagaactatattatctgtttggagtagtcatagcattagctattttcaacagtactatcttagatctacagtttcccaaggcattttataaaaaattatgcttagagcctttaagttttgaagattattctgaattgtttccagaaacaagtaggaacttgataaaaatgttgaactatacagaggatgatttcgaagaagtcttttctttaactttcgaaaccacatataaaaataataactggattattagtgacaataaatcgacaagggaatatgtaacggtagaactatgtgaaaacggtaaaaacattccgataactcaaaaaaataaacatgattttgtaactaaatgggtggagttttatttagaagagtctattaaaccacaattcaacagattcatttccggttttaaaagagtcttcgcagaatgtaattctataaaactattcaattttgaagaattggaaaggttagtatgtggggatgcagaacagactaaatttgatttcaaatcactgagatctgtgacgaagtacgtcggtggattttctgatgactctaaaattgtccgttggttttgggagattatagaagactgggactatccattacaaaaaaaattactacaatttgtaactgcgtctgatcgtatacctgcaacaggtatttccaccatcccatttaaaatcagtcagctaggcacacatgatagtaacgatttgccattggcgcacacatgctttaatgaagtgtgtttgtggggctattcatcgaaaaaaaaaatggaacaaaaattactttgggcggttaatgaatctgaaggttatgggttccggtag

SEQ ID NO: 1429 - DNA, 2331 bp, Saccharomyces pastorianus
atgccaacaacttatgtaccaataaaccagtcaattgaagatgatgaagatggcattgaaaccagtagattcactaatattccagaaacccaaaactttgaccaatttgttacaattgacaagattgcagaggcaaatagaccgttatcaatagactctgatagggactttcttaattcaaaataccagcattatcgagaggtcatatgggaccgtgcgaagacatttatcacattgagtaccacagccattgtcattggctgtatagccggttttttgcaggttttcacggagactttggttaattggaaaacaggtcattgtcgaaggaactggttattgaataaatcattctgttgtagcaatgtagtcaatgaagttagttcggcaagcaatgcgctactgaaaagacaagaatttgaatgcgaagcacaaggagtttggacaaattggagtggtcacatcttccctttcattatcttcatggttttgtcggtcttatttgcccttattagtacattgttggtaaaatatgttgctcctatggccactggttcagggatctctgagattaaggtatgggtatctggctttgagtacaataaagactttctaggtttgttgacattggttgtgaagagtgttgctcttcctttggcgatttcctcggggttgagtgtaggaaaagaaggaccgtcggttcattatgcaacctgttgtggttttttgtttacaaaatggttacttagagataccctaacatattctacacaatacgagtacttaacggcggctagtggagcaggtgttgcagttgcctttggtgctcctatcggtggtgtactttttggtttagaagagattgcctctgctaatagatttaactcctctaccttatggaaatcttattacgttgccttggtagctataactactttgaaatgtattgatccattcagaaacggtagggttattctctttaatgtaacgtacgacagagattggaaagtacaggagattcccattttcatagccttaggagtttttggtggtttgtatggaaaatacattagtaagtggaacatcagctttattcattttcgcaaaatgtacttatcttcatggccagttcaagaagtgctttttttagcgacactcactgctttcatttcttattttaatgaattcttgaaattagacatgacagaaagtatgggcatattatttcatgagtgtgtcaaaaacgacaatacatcgacctttggacacaggttgtgccaattagacgagaatacgcacgcttttgagtttttaaagatttttacctcactgtgttttgccactgttatcagggcattattggtggtggtgtcctatggcgctagggttccagcgggtatttttgttccttctatggccgttggtgccacttttggacgtgcagtcagtttgctggtagaaagatttattagcggtcctgccgttattactcctggtgcttatgcttttttgggggccgctgccacattaagtgggataactaacttgactctaaccgtcgtggtaataatgttcgaactgaccggtgcctttatgtacattatacccgttatgatcgtagttgcaataacaaggataattctaagcacctcaggcatttctgggggtattgccgatcaaatgattatggtcaatggtttcccatatttagaagatgagcaagaggatgaattcttagagaagtacactgcagagcaaattatgtcttcaaaattgattactattaatgaaacaatttacctctctgaattagagtctttgctatacgattcagcgtctgaattttccgtgcatggatttccaataacaagagatgaagacaagtttgaaaaggaaaaaagatgcattggttacgttctgaaaaggcacttggccagtaaaataatgatgcaaagtgcaaacagtagtaaagctcaaacaactttggtatacttcaacaaaaccaacgatgacctaggccatcgtgaaaactgcataggatttaaagacattatgaacacatcccccatcaccgtaaaaccggaggtatcgacgtctttgttatttcgtatgtttaaagaactaggttgtaaaacaattatagttgaggaaagtggaatactaaaaggtttagttactgctaaaggtattttgaggtttgaaagaacgaagtatagagaaattcatggcgcaaaattcacatataacgaagcgctggatagaaggtgctggtctgtcatccattttataaccgaaagattctcttacaaccgaaataataacaatatttaa

SEQ ID NO: 1430 - DNA, 3516 bp, Saccharomyces pastorianus
atgggcgagcttgcggaagaactacccattccagacaatgctcaagacttgtcgaaattgttacgttcaataaacaccaaaccataccaaattgcccagattgtctcaagatttgataaattgaaagtttacttcccaaacaaagaagtctttgtcttagaactgcttatagataggcttaataatggaaatttagatgatttcaagactagtgaacatacttgggttattttcaaaagactgttggaggcaattagtgattcaatatcaataaaaaaactattgaaaaaactgaaaacagtttctgttatgataaagacctttcaattgtggccgaaggacaaactgaacagcggtcgcggttcttttgtgagtgcatttttttctattaatagttatttaatagtcaatttctctgttgaggaatccttccaacttttggaacaagttataaacgggttaagttcattctcaacacccgaaattgccctgtcatatctacaagacgcctgcagtctaactcacattgacaacattattgcaacggataacaaaattgctgcttgttattgcaaacacatgctactgccaagcttaaagtatttttcacaggttgaacagcctacatcttcaagaaaaacttccgtttgcctgtccggttttatgagcaaattccttctacaaccacgtgtagactatatgaaactaaacgaaaagttcgttcaagagaatgcatccgaaattagcgatgaaatggcttattattattttagtagttttgtagaattcctatcgaaagacaattttgctcaactagaagctatctttaccgttctcgctgccaaaaatcctggtttaaagtgccgatttctggctcttctatctgattcaaagaaaaccgtttctcaagagtttttagagaacctgttatttgaaaccttatcatcaagtaacggacatgaatcattatcgttaataccaactatcctgaaattagatattgaaatttccataaaacatacttcccgcttacttgagttggtttatttgaaacattctaccgatgctctcttttcttatcaaatttgggatttaataatccagtctcacgcgaacgcaagagaattaccaatcttctttaacaaaataaatgaatattccgaaaaaaagcctgattcttattttttgttgaatgatcaagtatatgtcaagtctgttacgaagcagttatttacgttatctacaatgcaatggaaaaatttactgcaaaatttacttgaccaagttaatcgcgattccactaatagggttcccttatacctgatacgcatatgtttagaaggactatcagaaagtgtttctcacacaactcttaatgaattaaagcctatattatcccaggtatttattttggagtctttcgataacaatcttcaatgggacttgaaataccatataatggaagtctatgatgacattgtccctgaagaggaattaaagaaaattgaccacatattttcctccaatatttttgatactacaccagaacatcttgaagagctattcttttattgtttcaaattaagagagtatatctcttttgacatttccggtgtaatcttgaagttcatgcgtcattttgaaaatctggatcatgaaaccaaatcaaatttatcgttttctatcgtgtcaaaatttgcaactttagtcaacaacaacttttcgagagacgatatttcttccttggttgatttgttattaacagattcgactaaactgtgggaattattaaacaatgatgacattttcgaagaggcaaatatcacacatgctttggtaaataagctcgctttatcatgcgacaagggttttgcgttagacgcattgatccaaatccctattcaatgtatcaacaaaaacgtaagggtcgcacttatcaacaaacttacgagtgaagctgcctgtttagatgttagtgccaagaaatgtatccttcatctattagcaagcccaactttcaagtcaaatatcgaaatggatttctttgaattatgtgagaaaacagtaacgactcccgaaatagctattttagaaagcgaagaagtacaagttggaggtgaagaatccgttttcgaaaaagtctggactaaccatttatcacaggcaaaagaacctataagtgagaagttcttaaataacggatatgatgttattaagaagacgatgttatcgcccaatggcgaggagaaaataatccttgctagttttgttgtcgcaaaatttttgaaacaaaatactaaacatagggcggttcaagacataatcgtcaactatgccgtaaagatcatagaagattattcgcaacagtttgaccctaaggcaatcccccttctcagaacctctatggccagattatatgagatagcagcattcggaaaatgtgacatttccaagcataaagcaacaattctaggatcattctctaaaatcatgcttcggtaccattccgacaaaatacgtcacccaaaagaagagcaggaaatgtttttgcttcattcactcttggtcgaggataagttagaatacatttttgcggagtacttgaatattagccacacagttaaatgcgattttgctttagagttttgcttaataagaagtcttaaacaaggccctgatgcccttaaccgccttattttgaatagcgcccaatcattctccaccatcaatgaaatttgtgctgaaaaatttattacaatttttatcataatgttgaaacagatcacaagggacaacaatcttggacatcatctttttgtagttgcgatgctagaagcctataccagttgcaacgtcaaaaagtttggccacaggtcttacttacttttgtttaacgctgtcaaggaatttttggtctcaaaaccttggctctttacgcaatactgcattgagatgttgcttcctttctgcttaaagtccataagcttactaaccagcaatgagccatactttgaaattgatgaatgctttgtcagcatcatcgaagttatagaccatatactgttagtccacaggtttaagttgtctaatcgtcaccatttaataaactccgttctttgccagcttttagaaatactagcaatgcatgacggcaaactctctatggggccagcggatgccgtatctagactaataacaaactattgtgagccgtataatttctcaaatgctcaaaatgggtcgaagaacaacttaagctcaaagataagtttgatcaaacaatccattagaaaaaatgttcttgtggttctaactaagtatatccaactgtctattactatacaatttagttctaccatcaagaaaaacttacagcctggtatttatgcaatatttgatatattatctcaaaacgaactaagtcatttgaatgctttcctagacacacctgggaggcagtatttcaaatcactctaccttcaatacaaaaagagtggtaaatggcgcgaagattaa

SEQ ID NO: 1431 - DNA, 1050 bp, Saccharomyces pastorianus
atggaccagcaaacttcatcttttatcaatgacaaactatttactgaggtgaagcccgtacttttcacagatctaatacatcatttgaaagttggcccatccatggcaaagaaattgatgttcggatactacaaacgtaccaccaatgctaaattcaactgtgtagtaatgtgctgctataaagatcaaaccatcaagattatacatgatgtcaccattattccagaccaagatttaatagtcgattgcttcatttatgctttcaatccaatggatactttcataccgtactacgatatcatcgatcaaaagggttgtctgaccattaagaatccgtatgaactcacggtttctgaatcatcgagggctgtagagaggactaagaccttggaagagaaacctaaacagttggttaggcccacagtaagatcaaaaaccacaccagaagaatctgctagtaagaaatccaaatctaaagacatgggcctcaggtccactgctctactggctaggatgaagaaggatagagacgataaagaagcctcgagacaaaacgaactacgtaagagaaaagaggagaacatgcagaagataaacaaaaaaaacccagaaagagtagctcaaatggagcaattaaacaacctatttgtagaagacgacttagaagatgaagagctggacgagaacacacgacccaaatcgcctgaaaaagctgctgtcaatgacaacgataagaatagtaatgatttagaagacctgttagaaacaacagcagaagattcgctcatggaagtgcctaaagcaaagcaaacagaatgctcagtaatagagataccaaaagagcctaaacttgaagaagagtcctcttcgtttattgacgaggacggctatatagtcacaaagagaccagccacttctaccccaccaaggaagtcatctccagtggcgaaaagagccttatcttctaaacaacaagaaacaccatcaacaagtaaaagatcaaaaaagcaaggtactttagaaagcttttttaagaaaaaatccaaatga

SEQ ID NO: 1432 - DNA, 423 bp, Saccharomyces pastorianus
atgatagacttgaaagtctcaccgctaacaaagatcatttctctttcagggttcctggcactggggttccttttggtcatactaagttgcgcattattccataattactacccattatttgacatcttgatctttttactggcccccattccaaatacccttttcaatacaggtaatcagtaccatacatccgacttcatgtcggattcgtcgaacactggccaggatctagctcattttctgacagggatgctggtgacaagtggtgtggcgctgcctgtcgtcttctaccattgccaattgatcggccatctaagctgcatcatgtgcatgaccggtggtcttatcatatattccagtattgttattttcaagtggtttttcaagaaggatttcaatgaagatgactcccttttcggttaa

SEQ ID NO: 1433 - DNA, 1968 bp, Saccharomyces pastorianus
atgcttgctgctaaaaacatactaaacaggtcgagcctgtccaactccttccgcgtcgctgcgcgtttgcaatctaccaaggtgcaaggctctgttatcggtatcgatctgggtaccaccaactctgccgttgctctgatggagggtaaggtgcctaagattatcgagaacgctgaaggttctagaaccaccccatccgtggtggctttcaccaaggagggtgagcgtttggtcggtattcctgccaagcgtcaagccgttgtgaacccagaaaacactttgttcgctaccaagcgtttgattggtcgtcgtttcgaagacgtcgaagttcaaagagacattaagcaggttccatacaagatcgtcaagcactccaacggggatgcttgggtggaggccagaggccaaacctactctccagctcagattggtgggttcgtcttgaacaagatgaaggaaactgccgaggcctacttgggtaagacggttaagaacgccgttgtcaccgtccccgcctactttaacgattctcaaagacaagctactaaggacgcaggtcaaattgtcggcttaaacgttctgcgtgtcgttaacgaacctaccgccgctgctttggcctacggtctagaaaaatccgactccaaggttgttgccgttttcgatttgggtggtggtactttcgatatctccattttggacatcgacaacggtgtcttcgaagtcaagtccactaacggtgacacccacctaggtggtgaagatttcgacatctacttgttgagagaaattgtttcccgtttcaagacagaaaccggtatcgatttggaaaacgaccgtatggccatccaaagaatcagagaagccgccgaaaaggcaaagattgaattgtcttccactgtgtccactgaaatcaacctaccatttatcaccgccgacgcctctggtccaaagcatattaacatgaagttctccagggctcaattcgaaactttgactgccccattggttaagagaactgtcgatccagtcaagaaggccttgaaggatgctggcttggccacttccgacatttccgaagtcttgctagtcggtggtatgtccagaatgccaaaggtcgtcgaaaccgtcaagtctttgttcggcaaggacccatccaaggctgtcaacccagacgaagctgtcgccattggtgctgccgttcaaggtgctgtcttgtccggtgaagtcaccgacgttctattgttggatgtcaccccattatccttaggtattgaaactttgggtggtgtctttaccagattgattccaagaaacactaccatcccaacaaagaaatctcaaatcttctccactgccgccgccggtcaaacttctgttgaaatcagagtcttccaaggtgaaagagaattggttagagacaacaagctgattggtaacttcactttggccggtatcccacctgctccaaagggtgttccacaaatcgaagtcactttcgacatcgacgccgatggtatcatcaacgtttctgctagagacaaggccacaagcaaggattcctccatcactgttgccggttcttctggtttgtctgaaaacgaaattgaacaaatggttaacgacgcagaaaaattcaagtctcaagatgaagccagaaagcaatccattgaaaccgccaacaaggctgaccaattggccaacgacaccgaaaactccttgaaggaattcgaaagtaaggtagacaaggctgaagcccaaaaggttagagatcaaatcacctcattgaaggaattgatcgctagagtacaaggtggtgaagaagttaatgctgaagaattgaagaccaagaccgaagaattgcaaaactcttccatgaaattgttcgaacaattgtataagaacgactcaggcaacagcaacaacaacaacagcaacaacaatgctgaatccggtgaacctaagcaataa

SEQ ID NO: 1434 - DNA, 474 bp, Saccharomyces pastorianus
atgtctgacgaagaacacacctttgaaactgccgatgccggttcctctgccacctacccaatgcaatgttctgctttgagaaagggtggtttcgttgtcattaaaggtagaccatgtaagattgtcgacatgtccacttccaagaccggtaagcatggtcacgccaaggtccatttagtcactcttgatgtcttcaccggtaagaagttggaagatttgtctccatccactcataacttggaagttccatttgttcagagaaacgaataccaattattggacatcgacgacggtttcttgtctttgatgaacatggatggtgaaaccaaggatgacgtcaaggccccagaaggtgaattgggtgacatcatgcaaactgctttcgacgaaggtaaggacttgatggtcactatcatctctgccatgggtgaagaagctgccatttccgtcaaggaagctccaagatctgattag

SEQ ID NO: 1435 - DNA, 330 bp, Saccharomyces pastorianus
atgactgaattcaaagccggttccgcaaagaagggtgctactcttttcaagaccagatgtctgcaatgccacaccgtcgaaaagggcggcccacacaaggtcggtccaaacttgcacgggatcttcggcagacactccggccaggctgaagggtactcttacactgacgctaacatcaagaagaatgtgcaatgggacgaaaacaacatgtccgattacttgaccaacccaaagaaatatatccctggtaccaagatggccttcggtgggttgaagaaggaaaaggacagaaatgacctgatcacctacttgaagaaggtctgtgaataa

SEQ ID NO: 1436 - DNA, 1590 bp, Saccharomyces pastorianus
atgaaggagaatggtatagataatggtgtggataaatggatagataagggggggagtgacagtgatcatcgtaacaattataacaacagcttaatgaaaaaagcggtgatgaataatgaacaaattgatagaacgcaggatatcgataacgctaaagagatgctaaggaagatatcgagtgaaagcagctcgcgcagaagctcgctgttgaataaggacacatctcttgttaatggcaattcaggtaacggcggcggtacaggaattaatgcgacaagagggagttcgaagagtagcaacacacactttcagtatgcctcgacggcatatggcgtaagaatgctgagcaaggatatctccaataccaaagtcgagttagatgtggaaaacttgatgattgtcacgaaactgaatgacgtgtcattatatttcttaacaagagaactggtggagtgggtattaatacatttcccgcgtgtgactgtttatgttgactctgaattgaaaaatagcaagaaatttgccgccggtgagctgtgtgaagatagcaagtgtagagaatcacggatcaaatattggacgaaggatttcatcagggagcacgacgtttttttcgatttggtggtgactttagggggtgacggtacagtgcttttcgtgagctccgttttccaaagacatgtgccacccatcatgtcattttcgttgggatcgctagggtttttaacgaattttaaattcgaacatttcagggaagatttgccgcggataatgaatcacaagatcaagactaacttgcggttgaggttggagtgtaccgtttatcgcagacaccgcccagaagtggaccctcatactggaaagaaaatatgcgtggtggaaaaactaagcacacaccatatcttaaatgaggtgaccattgatcgtggtccaagtccgtttctctccatgttggaattgtacggggacggctcgttaatgactgttgctcaagccgacgggctaattgctgcaacacccacggggtcgacggcatattcgttaagtgccggcgggtcgctagtgtgccccacggtgaacgcgattgcactaacgcccatttgcccacatgcgttaagcttcaggcccatcatcctgccagagagcataaatctaaaggtgaaagtctcgatgaagtctagagccccagcatgggcggcttttgatggtaaggatagaattgagctgcaaaagggagactttataactatatgcgccagtccatacgcttttcccacggtggaggcctccccagacgagtttatcaacagtataagtcggcaacttaactggaacgtgagagaacaacaaaagtccttcacgcacatcctgtcgcaaaagaaccaagagaagtacgcgcatgaggcgaacaaggtcaagagccagactgaaccattggaagtgatcagagacaaacagccagtggaagttcatgcccccaaagagaacgggaccgacgatgagagcgacgatgagagcgagaactgcgaagcttgtaaattgaaaccttcaagcatggccaagccttcgcaagcaagattctccgtctga

SEQ ID NO: 1437 - DNA, 726 bp, Saccharomyces pastorianus
atgagtaggaacgtggacaaggctaactccgtattggtgcggttccaagaacagcaggcagagtcctcaactggatataaagactattcacgctacaagagacccaagaacgtttccaagataaaatctataaaggaggccaacgaatggaagcgacaagtaagcaaggagatacaacaaaaaagcacaagaatatacgacccgtctttgaatgaggtgcaaatcacagaactcaacgacgaactgaatgatctgttcaaagagtggaagagatggcagtggcacatcgaccacaagcttctggagaaaagaacaaagaggaagacgctagaagacagccatctgctgacaaacgcagggaagataatacacgggaagagatattttgggagggctttggaattgcccgaagtgaaagaatgggtcaaacagcaggagactcagaagcagaatcacacggatatcgtgaacacgaaactcgtaccgaaaaataagaatgacttttactatcttggtaacgttacaactgctataacggattttgaagccaactggacgcctgttttaaaagctcattacaatttgcctgtgaatgagcaaaaaaaagaactagaagaagaaagaggaaaatataaacaagacacgcatgtgcccactcttgctgatatggagcagtggctggtgcagagaagaaagaaaaaattgttagatgaactgaacctttag

SEQ ID NO: 1438 - DNA, 1506 bp, Saccharomyces pastorianus
atgataaggtcagtaaggagggttttcatttacgtatcagtattcgtattgatactgattttgaaaagacaattaagtaccaccgatcaaatgtcgatgaaacagccagtagtggtcattggttctgggctagcaggtctaaccacaagtaaccgtctcgtaagcaaatttaaagttcctgtggtgctgctagataaggctgattccataggtgggaactctatcaaagcatctagcggtattaatggtgctcaaacagacacccaacaaaaactaaaaattatggacactcaagaattgtttctagaagatactatgcactccgcaaaggggaggggaattcccttactaatggacaagttgaccaaagaatccaggggcgctataaaatggttacagacggaattcaatttaaaacttgatcttcttgcacagttggggggtcattctgctccaagaacccacagatcttctggtaaactgccaccagggtttgaaatcgtgcaggcactatcgcagaaattgaaaggtatttcttctgaagattctaatcttatgaagattatgctaaaaagtgaagttgttgatattgagctgaataatgacggccatgtcactggtgtaatatacttagatgagaatggcacccgaaaaatcctgaagtctcaccacgtcgtcttttgttcaggcggtttcggtttctctaaggagatgctaagagagttttcaccgaatttgattcacttgccaaccactaatggtaaacaaacgacaggggatggacagaaaattctctctaaattaggcgctgaactgattgatatggatcaagtgcaagtccaccccactggctttatcgacccaaatgatcgcgaaaataattggaagtttttagctgcagaagcactaagaggtttaggggggatcttattacaccctaccactggtagacggtttaccaatgagttgaacaccagagatgcggtgaccatggacatacagtctaagtgtccaagaaacgataacagagctcttttggttatgagtgaaaaagtttacgataagtatacaaataacatcaacttttacatgtccaaaaatttggtcaaaaaagtgcccattaaagacttgattcaaaactatggcctacagactacggcgcaagacttggttaacgaattgaagaactattctgatgttaataccaaggatgaatttgatagatcattaattaccaacgcctttgatggaaatattgcacccgaaacttctgtgtatgtaggtgagattacgcctgttgttcatttcaccatgggtggtgtgaaaatcaatgaaaactctcaagtgattatgaagaattcagagaaggtattgtccaaaggcctatatgccgcaggtgaggtatctggcggcgtccacggagccaatagattgggtggatccagtttattggagtgtgtcgtctttggtaagacagctgctgacaacatagcaaaattatattaa

SEQ ID NO: 1439 - DNA, 1713 bp, Saccharomyces pastorianus
atgtatcgtagtaggaatagaccaaaaagaggtggtgaagatgaagttaagggtccaaactctgcattaactcagttcctgagagaagaagggatcagcgctgaaaatatcaaacaaaaatggtaccaacgccagtcgaagaagggcgaagatggaaaaggcggaaagagtgaaaaggagcaaagtacgcaggacgatgactcgactacacaggtttcgcaaaaggaagtaattgaagaagaagaggttgatgacttggaacttggcagtggttctgaaacaggaaaggccgagatcgcttatgatgctagaatgaatctggttgccgcagatagtgacgaagaagaatatgaaactaacagtgcgtcggccaccccagtaaatttgagtccagctaagaaccaggagtccttaataaagaagagacaaaatactgcgaaaatcattcaaaaccgccgtaaaaaacgcaagagagctgccaatttattggacagacgtgtcaataaagtgtctagcttacagagtctttgtatcgggaaaatcagtaaaaatatctccaagtggcaaaaggagacgggtgattcttcgaagttggtatttaacagattaagagatgttctcggtggtgtatctaccgctaatttgaacaatttggcgaaagcactatcaaaaaatagagcactgaatgatcatactttacaacttttcttaaagacagatctaacaaaactgacttttaatgactgctctaaggtttctttcgatggctacaagacactagccatcttttcgccgcacctgaccaaattatcgctacaaatgtgtgggcaattaaataatgaatcactgctttacattgctgagaagttgccaaacttgaaagcattatatttagatggtccttttttgatcaatgaagacacatgggaaaattttttcgcaaccatgaaagacaggctagaagagtttcatatatcaaacacacaccgttttacagacaagtcattatcaaacttgttaataaattgcggttcaactctagcctctttgggattatctaggctagattcagtgtcaaactacgctttactgccgcagtacttaatgaacgacaaatttcacacactctccattgaatatccactcaatgaagaatatgttaacgatgagattgtcataaatatattaggccaagtcggatccactttgcgaaagttggttttgaatggttgtgtggaattgacggattcaatgataatcaatggtcttactgcattcataccagaaaaatgccaattggaggtcttgagtttagaagagctagaccaaataaccacggactctttggtttactttttcagtaaagtagaactaaataaactaaaagaatgtagctttagaaggtgtctacagctaggtgatatggcggttatagagttattgctcaatggagctaaagatagtctaacaagcttgagtttcaactcactgaaagagttaacaaaggacgcttttgtaacattaacctgtcctgacttgacatacatagatctagggtttgtgcgttgtgtagacgactcaattattcaactattgggtgagcaaaatcccaaattatccgtaattgatgtgtttggagataatctggtcactgaaaacgcaaaaacaagacctggacttacactaataggaagacaaagtgacagtatataa

SEQ ID NO: 1440 - DNA, 1737 bp, Saccharomyces pastorianus
atgtcaattagacctcttacgctaaatggcttggatgatccggagacttcttttgaggaattgaatacaacacttccgcgatttcaatcccacgaaacatcaacattgagagatagcgcgccaccattgagcacatcaacgtatttaccgactccatcatcaataggtacttccgacactggaacggttttttcaaacagcgctgatgcattctggtctgataaacaaggtgacaatgatcaagatatggaagtagaacaggatgacgaatttttgaatgatttccaagaatttcaaaacaagaaggatgattttgatgatgctataaagacaaattttcatttacgaaacaagtgtgggtctactcccttcaagaacgttgatttcgtaaacgaatttgataaaaaactgaattttgaactagacaaaccaagattaaagcagcccagatcgatgatggagctaaagtcaagaaggaaactgtcaaacagtgtatcttcaaaaaatttgaaaggcgggaattcagtgagattcaaaaaatccatgccaaacttagcgttatttagttcaacgatccgagaagaagaagaagaagaagaagaaggtaaaggggaggaacaacaagaacaggattatgaagatgatgatacacagggtacaattttggcgagattcagttctgatgacgagggtggatttttaacaggattcggagaattggaagacgaacctctcgatcaaacattttccctaagccgtggacaagaccttaaacggcccccattcttaaaaaggaagtctgcttcatcgttgccattaaagatatcgcctactcagtatgacatagtaaaacatgacgaactactaacgcccggtctccatagccggcaacgggaatggaatactcaacaggaactagattcttttagagaggaacgaccagttagacgttatcccagccacaatttacaacttcatggaccagctaaaatcaaaacaataaaacaacagattgatcacaacactccgatgaagaagggttcaatggtatataatcctcagactatgaagtgggaaggaaatgaaaatgtattaaacaaattcagcgatgtggatacagcgaacaggaaagctttactaataaagaataagctccagcgagatgctgatgatcatactgcaaaacaaaaaagatattccgatctacagaactcaagatccgcttcaaggaatcaaaaggttgtcggtaatatggtcctcgatgaacaaaatttgagatgggtaagtatatctgaggatgaagccgacccttttgcaggtattccggagataaatccaccaccagtgagaacaactatgaagaaacgcagctcttctccattcttacgttcccaaagccaactgagcccatcaccttcctcaaatggtaataatggtgggtatcaaagtacggcagctcaggtaagactacgaaaataccattccatgaggtcactaaatgctccacccgaagatttggcgctgaacacaactttccacttgagctcaaaaacactggaaaaattttatcacgaggagaatagatggaacagaaagttggcatcttggttcataccacaagacgagaccattaccggcgtcgacgaagaaactatggatgaaagcaccattggtggcaagagaaaatcttacatgtacgaaataaggaatatggtaataaactcgacaaaagattaa

SEQ ID NO: 1441 - DNA, 1500 bp, Saccharomyces pastorianus
atgttcaaccatgattggaagtactccattaattcaaaaacctttgacgatcttgatattgagttatttcgaaaccataggtttaaaactgttttgaactacataataggcgttattggatggaacggactgaaagtggctctcttcgtatctgacgtttacacatgtatcaaactactagcattcaactcgtggtcaaataacataattcgtccttacttatcctttgaaatatcaaagtggttatttagtggttgcattcttgcatctatcgtgctactggtatgggaatccatagctggaataaggatatataagacaggaaatatatcgttgacatatgttaacaatttttctagaaatctaaattccgtgctcaattattctaaattttgcgtttacaatatgatcgaacggaaggggtttcgacagaaaatgacatttttcacttttttccaactaaaagattgtataagattaatcttcacagacacaccaagacaagtaattaacggtcttacattatggtcggtgcttgtaaccgttaataagagcgaagatttgggcgatctggaatcatttagtggtttaatcaataaattgaaaaacatcggaaaaaccaatcacgaagaagcagtgatactgtcattaatgctcttttcgtttattgtttggacattatttgtgttcaaattcttagtggctatcatttgctcaatatttgtttactataagataattaacgatcaaaaatacggcgggttgcgtgaatatatctgtgttactgttagcgaaaacattgacgaacttgttgaaagacaaagaaaaaaggaaaatgagagcacaatttataagacaggccttcttgaatcccaaacctttagtgattttaatgaattagaaaataaactcgagtcatcttttaatgaaacctcgtacacttccaataacgattccacgatagagttagtggagaggagaccagaatataatagtcaaaatgcgtttgaatatgttccaataatgaagaaagtagaaacaacggaatcgtttgtcgacaatggtaatgcgcaacatgcaactagattctctgcgattttagacccaccgaataccaatacgtacaacaccagtaatataaaaaaaagtctcgagacgcaagatagaaacttttcagacgctcagagatatgaagattcgagcgtcctcagtgggctcaaccagaagtcgtctactaccaggctactacaatctacaacctcgacagaagttcacatgtcattagactcaacaccaaatacaatgaatttccaaaagtcgaataatgaaactcggaggcccaagccacctagtttacagacaagcgggatggtaaagtcaagcactgtttcagaggacaatgagagaatatatactccaatgaaggcatacttcagggaaactggtcttccgaggaaaggtctactagaagatgaagattatacatatcactacacctaa

SEQ ID NO: 1442 - DNA, 486 bp, Saccharomyces pastorianus
atggctcaggctgtagttaagtgtggtatatgccacgagagtgatggcaaatataaatgtcctaagtgtagcatacgatattgttccttgaaatgctacaaagatactgaaaagcacattcataaaaacgttctagaaccccaaaccgaaacggaccctagttcagagtccaataataacaacagtgctatcgtaaccggtaggaaaagtttgaagacaagagcattcgatgaagtttatcaaaataacgtccaattgcaagaactattaaagtacaatacagtgaaattccatttagcgaaggtttatagaattctatcaactaccgttagcgacggaagttccggaaacatgagtagcgacctacaaaaagagttagctgtaaattaccttaacacattgcgatatggtggtatacattataatgaggctatcgaagaattttgccaaatactattagatagattaaatgacgttaaagaataa

SEQ ID NO: 1443 - DNA, 444 bp, Saccharomyces pastorianus
atggctgttcagtttatactgtgctttaacaagcaaggagtagtgcggttggtgaggtggttcgatgtgcacaattcagattcgcaacatagtcatgacgccattgcgcagatatataggctcatctcctccagggaccacaagcaccagagtaattttgtagagttctccgattcgacaaagctcatatatagaaggtacgctgggctctatttcgtcatgggcgtggacctgcttgatgacgagcccatatacctttgtcacatccatctgttcgtggaagttctggatgcatttttcggcaacgtctgtgagctggatatcgtcttcaacttttataaagcctacatgattatggacgaaatgtttattgggggcgagatacaggaaatctctaaggacatgctgttggaaaggctaagtattttagataggcttgactaa

SEQ ID NO: 1444 - DNA, 2454 bp, Saccharomyces pastorianus
atgacgaggaacagcaaagacaaagaggtacataaaagtccctcggtcagcactttaaaactattggggaagcgtctgttcaattcgaacagtcacactgacaattcttcattattactcagtgctgaacaattgggtaatggtaggagtttaaggaaacgaccaacgtctccatccagcggcggcgctagtagcggtgccaattcaccttcctcttctgccggtgctcggaatagatctgcttctttgcataggaagaaaaacaatgtttcagttgggctctcgagtggacctgtgtcctcgcataagtcttccgtcgcgttgcaagacctaatcaaacataacaataatccttacttaaactctccctcggatatcttgggcacaggtactggcattgcctcgacaagagatagggatagatctgctatagaaagggaaaaagaaaaagagagggctagagacaaggaaagaaacacgcatcatgcgggcttgccgcaaagatcgaatagcatggccagtcatcactttcccaatgaaaatatcatttataacccctacggtataaacccaaaccatgctagaccagatactgcatttgccgacactctaaatatgaataaggagaatgatttaagtttttacatgcatgatgggaacgccaagatacggatgttaccgctgccaatcgccaacccgaatgatttcttacccgaagatatgaaacaatatagcgtccatttaacggataattttgtattcgacacggataataagccaatcggttccggtgggtctagtgaggtgaggaaggttaaatcgagttacaggcaaaaggatgtttacgctttgaagaaattgaatatgatataccacgagtctcccgagaagttctacaaaagatgctcaaaagaatttatcattgccaagcatctaagccacaacgtgcacatcacgaacactttttgtcttgtgaaagtacccaccacaacgtacacaactcgtggttgggggttcatcatggaattgggtgtcaaggatcttttccaattgatggaaagaacaggttggaaaaacgttccattcggtgaaaaatactgtcttttcaaacaggtggctcaaggtatcaggttttgtcatgagaacggtatcgctcatcgtgatttgaaacccgaaaatgtcttgatttccaaagaaggtgtttgcaaactgacagatttcggtatttctgattggtaccatgtggtgcctcatgactacaccagtccggtgaagacttgccagggtatgataggttccccaccatacactccaccagaagtgatgtatttcgacgccaagaagcattatcctgaaaggctccaaaaaccttataatccattggccatggattcttatgccctcgggataatgctgatcaccatgatcaacaatataattcctttcatcgattcctgtaacactgatgcgagattcagagagttcgaattgtcgtacgataacttcatcaaccaccaaaatcctcacttcagagacaagggttgccacaaggcaggtcccggtgccgaatacagtttggcaagaaatttcaaaaatactgaggctacacgtgttgcatggagattggctgaccccgaccctgccacaagatacacaatggatgatttattcgaagacccttttttccaacaaatagaaacctgtgtcgagccaaatgacgacagtttcgtgaaggcgcctgaattaagaaaatctacttctatcagtgattctacggaaaactttccagatgctcccaacgagcaagaagtcagtcatacttcgaatccattcctgaaaagagaacctttgagtactaaacctagatcaatgctggaaattgctcaatctccatcacttaaactgaagcccaaactgaagagcaaaacaaaggctaaatcacatgatatcatggataaagaaggtttaaaaatcgttacacctaaaccacaagggaaagaacagggcgaagatcaaaatgaagacaaagatgaagacgaagacaaaccaacggaaaacttttcaaccaacgttgacagtttattagaaaaggcgacaccaacttccaccaaagtcgatgacattccaagcgaagaaaattctacaacaaaggagttaaagtcaatgatcaactctaccccttccacaccaacacacaacggtccaactccggtccccgtgaaaactgccacaccattgaataaaggtatgagcgatttatcattaagatcagagacgccaatttctgtcaaggacactagcgcacccaatgtgtcttcatcaagcaactcgattagaagtttcggtagtccaaatgtgtcctccttaaagaaaaagaaggtcatccatcaccacttagatatcactaacagcgtcacgaacgtgtcatccgtgagcgctttcgtgtcaagatag

SEQ ID NO: 1445 - DNA, 378 bp, Saccharomyces pastorianus
atgtctgtcgtagggtcgttaattttctgcttggactgtggtgatcttttggaaaatcctaacgctgttttgggctccaatgtcgagtgcagccaatgcaaagccatatatccaaagtcacagttctccaatttaaaagtcatcactacaacggcagaagacgcgttcccatctgcattaagagctaagaaatctgtggtcaagacatctttgaaaaagaatgaattgaaggacggtgctaccatcaaggaaaaatgtccccaatgtggcaatgaagagatgaactaccacactctgcaactaagatctgcagatgaaggtgccactgttttctatacatgcacctcctgtggctacaagttccgtaccaacaactga

SEQ ID NO: 1446 - DNA, 1689 bp, Saccharomyces pastorianus
atggctgctcgtccacaacaacctcctatggaaatgccggatctatccaacgccattgtggctcaagacgagatgggtagaccctttattattgtgaaggatcaaggtaacaagaagagacaacacgggttagaagcaaagaaatcacacatattggcggctaggtcagtggcctccattatcaagacttctttgggtcctcgtgggttagacaagattttgatttcacccgatggtgaaatcactattactaacgatggtgcaactatcttatctcaaatggaactagataacgaaattgccaaattgttagtgcagttgtccaaatcccaagatgatgaaattggtgatggtactacaggtgtcgtcgtcttggcaagtgcattactcgaccaagccttagaattgattcaaaagggtatacatccaattaaaattgctaatgggtttgacgaagctgccaagatagccattgccagattagaagacagatgtgatgatatttctgcatcaaacgacgagttgttcagagactatttattgagggctgccaaaacttctttgggttccaagattgtgtccaaagaccatgatagatttgcggaaatggctgtggaagcagtcactagcattatggataagagccgtaatgacgtggacttcgatttgatcaaaatgcaaggacgtgttggtgggaccataagcgattccaagttgattaatggtgtcattttagataaagacttttctcacccacaaatgcctaagtgcgttttgccaagggaaggttccgacggtgttaaattggctatattaacgtgtccatttgagccacctaagcccaagaccaagcataaattggacatttcttcagtagaagaataccaaaaactacaaacttatgaacaggatacatttaaagaaatgatagatgatgtgaagaaagctggtgcagatgttgtcatatgtcaatgggggtttgacgatgaagctaaccatttactgctacaaaacgatttgcctgctgtaagatgggtaggtggccaagaactagaacatattgctatttccacaaatggtcgtattgttccgagattccaagatttgtctaaggacaaattaggtacttgttccagaatctacgaaaaggaattcggtactaccaaggaccgtatgctaatcattgagcaaagtaaagaaacaaagactgtaacatgttttgttcgtggttccaataaaatgatcgtggatgaagctcagcgtgcattacatgattctttatgtgtggtacgtaacttggttaaagattcgcgtgtggtttacggtggtggtgcagcagaagtgaccatgtcgctggctgtttccgaagaagctgacaaacaacgtggtatcgaccaatatgcattccgtggctttgctcaagctttagacaccattccaatgactttggctgaaaactcaggccttgatccaattggaactttatctacattgaaaagtaaacaactgaaagaaaacacttctaacattggtgttgattgcttaggctacgggtccaatgacatgaaggaattatttgtcgttgatccctttatcggtaagaaacagcaaattcttttagccactcaattgtgtagaatgattcttaagattgataatgtcatcattagtggtaaggatgaatattaa

SEQ ID NO: 1447 - DNA, 1350 bp, Saccharomyces pastorianus
atgtcgtatttaaacaatcccgctgttgtcatggacaatggtaccgggcttaccaagcttggtttcgccggtaacgattctccctcgtgggtcttccccacagccatagccacagctgcaccttccaatacgaagaaggcttcgggcgccggcgcatcttcaggagcaggtagcgatacatcatacttcggtaattctacgtctgccaccaactttaacggtgtaaccggtggcctgctgtccaacaacttgtccggcaagagaggtacagaggatttggatttttacattgggaatgaggccttggtggcatctcaaggaccctcttattctttgagttatcctattagacatggtcaagtggagaattgggaccacatggagaggttctgggaaaattccattttcaagtacttaagaacagaacctgaagatcatttctttttattgaccgaaccaccattgaatcctccagaaaacagggaacaagttgctgaaatcttttttgaatcattcaattgtgccggtctatacattgctgtgcaagcggtgttggctttggccgcctcttggacctcttctaaggtaacagatagatcactaactggtaccgttatagattctggtgacggtgtcactcacgtcattccagtggcagaaggttacgttattggatcggccatcaagaacattcctattgctggtagggacatcacgttgttcatccaatccttgttaagagaacgtggtgaagcagacacttctttaagaaccgcagaaaagatcaagcaagaatactgttatgtttgtccagatattgttaaagagtttaacaaatttgatagagatccttctaaattcgcacaatttgtggtggaaaatcaagaaaaaacaaggagaaaagctgtggatataggttatgaaagattcttggctccagaaatctttttcaatcctgaaattgcatcatcagacttcttgactcctttgcctacggtggtagatcaaacaattcaggcttgtcctattgatgttcgtaaaggtttatacaacaacatcgtattatcaggtgggtccaccatgtttaaggatttcgggcgtcgtttacaaagagatttgaaatcgattgtaaataatagaattgcgcaaagtgaactattaagcgggacaaagtcaactggtgtggatgtttctgtgatttcccatagaaagcaaagaaacgctgtctggttcggtggttccttgctggcacaaactgcagaattcaaaagttactgtcacaccaagaaggactatgaggaatacggtccagaaattgttagaaactttagtcttttcaacatggtttga

SEQ ID NO: 1448 - DNA, 7437 bp, Saccharomyces pastorianus
atgagaccgcatgaggagccgagttggaaaagtagagtgttgaaaactgctaacaacgatatggacatgaacagagatgtaccgctggcaccgaatttggacatgaatatgaacatgaatatgaacatgaatatgaacatgaatatgaatatgaacagggacaggaacgagtctggcctcctttctaatagatttggtgggatggtggcaggaaataccgaggacgttaattaccggccgattttggacaatattttccacgaattgactagtgattatgaggacgagcggagattggctagtagttcgttattcgatctactggtgtctttagagcacgagctgtcgatagaagagtttcagggggtctcacacgagataaacaataagatccttgagctggttcacacaaaaaaaacgaacaccagagtgggggctgttctctccatagacaccttgatatcattctatacattcactgaggaactgcccaacgagacttcgcggttggctggttaccttcgaggtctaataccttccaatgacgtgggtgtaatgaggctggctgcaaaaactttgggtaaactggccgttccgggaggcacatacacctctgatttcgtggaattcgagataaagtcctgtttagagtggctcactgcctccacagaaaaaaattcattttccagttctaagccagaccacgccaagcatgcttcactcttgataataacagcattggcagagaactgcccgtacttgctctaccagtacttaaactcaatactagacaatatctggagagctttgagagacccgcatttagtaatcagaattgatgcttccaccacattggctaaatgtctctccatcctacgaaatagagaccctcaattgactagccagtgggtgcaaaggctagctacgagctgcgaatacggctttcaggtgaatacgttggaatgcattcatgcaagcttattagtttacaaggaaatcttgatcttgaaggacccctttttaaatcaagtgtttgatcaaatgtgcctaaattgcatagcctacgagaaccacaaggccaatatgatcagagaaaaaatttaccaagttgtacccttattagcatcattcaaccctcaattatttgcaggcaaatatttgcatcaaatcatggacaattacttggagattctaacgaaagcctcgacaaagaaaacaccacattttaaagatgacaagccacagatattgatctcgatcggtgatatggcatatgaagttgggcccgatattgccccgtatgtgaaacaaatcctagattacattgaacatgatttacaaacaaaattcaaagttagaagaaaattcgagggtgaaatcttttattgtattggaaagttagcaatgccattaggtcccgtcctggccaaactgctgaacagaaatatcctaaagttcatgttcaggtgccctctttctgattatatgcaagaaactttccaaatcttgactgaaagaattccatctttaggtccaaagataaatgacgaactgcttaatctagtttgttccactttgtctggtacacagtttattcaaccgggatctccaatggagataccaccattttcgaaagaaagagccagagagtggagaaataaaagcatctttcaaaaaacgggggaaagcaacgatgataacagtgatgtaagaattattattcaagccttccgaatgctaagaaatattgaaaataaattttcgttggtggaatttgtgagagttgttgccctatcttacatcgaacatacagacccgaaagtaaggaaattagccgcactaacatcttgtgagatttacgtcaaggacaatatatgtaaacaaacatctttacactctctgaatgctgtatcagaagttttgtccaagctcttagccattacaattgctgaccctagacaagatattagattggatgttctaaaaaatttgaactcatgcttcgattcacagttggcccaaccagataatttaaggctcttgttcaccgcactacacgatgaatcgttcagtatacaatcggtagcaatggaactcgttggaaggttatcctcagtaaacccggcatatgtcattccatcaataagaaaaatattactagaactcttgacgaaactaaaattctcaacttcctccagagaaaaggaggaaactgcaagtttattatgtacccttatcaggtcaagtaaagatattaccaaaccatatattgaacctcttttaaacgttcttttaccgaaattccaggattcttcctcaacggttgcgtcaacagcattaagaaccataggtgagctatccgttgtaggaggagaagatatgaaagtttatcttaaagacttgtttccattgatcattaaaacatttcaagatcaatcaaactctttcaaaagagaagcagctctcaaagctttgggtcaacttgcagcctcctctggctatgtcattgatcccttacatgattacccagaattactgggtatattggttaacattttaaagacagagaactcccaaaatattagaagacaaacagtgtctttgataggtatattgggcgctattgatccatatcgtcaaaaggaacgtgaaattacctccacaacgaacatatcggcagaacaaaacgccccgcccatcgacattgctcttcttatgcaaggtatgtctccatctaatgacgaatattataccactgttgttgttcactgtttattgaaaattttgaaagacccatcactatcatcgtaccatacatccgtaatacaggcaattatgcacattttccaaacactaggcttaaagtgtgtttcgtttttggaccaaatcatcccaagcatcttagatgtaatgcgtacatgctctccatctttattagagttttactttcaacaactttgttctttggtcagtatcgtaaagcagcatattaggccacatgtcgattctatatttcaggctatcagagatttttcatcggttgttaagttacaaataacgataataagtgttattgaggcaatatcaaaggctttggaaggtgagtttaaaagactaattcctcttactctgacacttttcttagttactttagagaatgataaatctgctgacaggattctttcaagaagaatattgaggctattggagacatttggtcctaatttagagggttattcgcatttgattgtcccgaagatagtgcaaatggctgaatttaccagtggtaacttacagaggtctgcgattatgacaatcggaaagctggcaaaggatatcgatctcttcgaaatgtcatcaagaattgttcatgctttagtcaggatactaagtggtacaacaagcgatgaactctcaaaagttattatgaatactttgagtttattacttttacaaatgggtacatcatttgctatcttcattcctgtcatcaatgaaattttaatgaggaaacgtatccagcacacgatatacgatgatttgacgaacagaatactgaataacgatgctcttcccactaaaattttggaagcaaatactacagaaaatccatccacggatccagtggatgcggcggatgcaggtgttgcaaagttgcccataaatcaatcagttttgaagagcgcttggaattccagccaacaaagaactaaagaggactggcaagaatggagtaagcgattatctattcaattgcttaaagaatccccttcccacgcactgagagcttgttcgaatctcgctagtatgtactatccgttagctagagaactcttcaatactgctttcgcaagtatttggacggagctttatagccagtatcaagaagatttgatcgagtcgctatgcatagccttgtcttctcctcaaaatccgccggaaatacatcaaacgttattaaatttggtcgaattcatggagcatgatgataaagcattgcctatcccaactcaaaatttgggtgaatatgctgagagatgccacgcatatgctaaggcattacattacaaagaaattaaatttatcaaagagcctgaaaactccacaattgaatcacttatcagtatcaataatcaattgaaccaaacggacgctgcaattggtattttaaagcacgcccagcaacaccattcgttgcaattaaaggaaacatggttcgaaaaactagaaaggtgggaagatgcactacacgcttataatgaacgtgagaaggcaggagatacatctgtaggtgttactcttggtaagatgagatctcttcatgccctaggtgaatgggagcaattatctcaactagcgtctagaaaatggagaatatctaaattaccgacgaagaaattaattgctcctttggcagccggtgcagcatggggtttaggcgaatgggatatgcttgagcaatatattagtgtaatgaaaccaaattccccagataaggaattctttgatgcaatattatatttgcacaaaaacgattacgaggatgctggtaaacacatactaaatgccagagatttgctggtaactgaaatatccgcactaattaacgaaagttacaatagagcttatagtgtaattgttagaacacaaataatcacagagtttgaagaaataattaaatataagcaactggcgcctaactcggagaaaaaacttcattatcaaaacctttggacgaaaaggttgctgggttgccaaaagaacgttgatttatggcaaagagtactcagagtgagatcattagtgattaaaccaaaacaagatttacaaatatggatcaagtttgctaatctgtgtagaaaatccggtagaatgagactggctcaaaaggcactgaatatgcttcttgaaggaggcggtgatcctagtttaccaaacaccgctaaggctcctccacctgtcgtctatgcacaattgaaatacatctgggctacaggggcacataaagaagcgttgaatcatctgataggatttacatctagattagcacatgatctcggtttggatccgaataacatgattgcgcaaagtgtcaaactatcaagtgcaagcactgccccgtatgtggaagaatatacaaaattgttagctcgatgttttttgaaacagggtgaatggaggatagcaactcaaccaaactggagaaatacaaatcctgatgccattcttgggtcatacctgttagcgacacatttcgataaaaactggtacaaggcatggcataattgggctttagctaactttgaggtgatatcgatggtacaggaagaaaccaaattaaacggaaataagaatgatgacgatgatgacacagcgatcaacaacgatcatattcgagctgaaagcagcattctaggaagcggttcattgactataaatggaaacagatacccattagagttgattcaaagacacgttgttccagcaattaagggtttctttcattcaatatctttattagagtccagttgcttacaggacacactaaggttattaactcttctgttcaactttggtggtattaaagaagcttcgcaagccatgtatgaaggcttcaatctgatgaaaattggaaactggttagaagtgttgccacagctaatttcccgtattcaccagccagatcccacagtgagcaactcccttttatctctgctttctgatttaggtaaagctcatccacaagcacttgtgtatcctctaaccgtggcaattaagtctgaatctgtttcaagacaaaaagcagctctctcaataatagagaaaattagaattcacagtccagtcctggtgaaccaagctgagttagtcagtcacgaattaatcagagtagccgttctgttccacgaactatggtatgaggggttagaggatgcaagtcgacaattttttgtagagcataacatagaaaagatgttcgctactttggagcctttgcataagcacttaagtaatgagcctgagacgttaagcgaggtttcatttcaaaaatcgtttggaagagacttgaacgacgctcatgaatggctgaataactacaaaaaatcaaaagacgttaataatctaaaccaagcttgggacatctattataatgtctttagaaaaataactcgccaaataccgcaattacagactttagagttacaatacgtttcaccacagcttttggctgctcgtgacctggacctagtagtccctggtacatattccccaggaaaacccactgttaaaattgcaaagtttgaaccgctattttctgtgatttcttcaaagcaaaggcctagaaagttctctataaaaggtagcgatggtaaagattataagttcgttctgaaaggtcatgaagatattagacaagacagtcttgttatgcaactgtttggtttggttaacactttgttgaagaatgactcagagtgtttcaagagacatttggatatacaacaatacccagctattcctttgtcacctaaatctggtttactgggatgggttccgaatagtgacacgttccatgttttgatcagagaacaccgtgatgccaagaaaattccgttgaacattgagcattgggtaatgctacaaatggcccctgactatgaaaatttaactcttttgcaaaaaattgaagtattcacgtacgctctcgataatacaaagggccaggatctctacaaaatactatggctaaagagcagatcgtcagaaacgtggttagaacgcagaactacatatacgagatctttagctgtcatgtccatgactggttatattttggggctgggtgatcgtcatcctagtaatttgatgttagatagaattaccgggaaagttatccacattgattttggtgattgtttcgaagctgctattttaagagaaaaataccctgaaaaggttccatttagattaacgaggatgctgacatacgcaatggaagttagtggaattgaaggtagtttccgtattacatgtgaacatgtcatgagagtcttaagagataataaggaatcgttgatggcaatcttagaagcatttgcatttgatccattgatccattggggattcgacttgcctccgcaaaaacttactgaacaaactggaatccaattaccattaataaatcctagtgaactattaagaaaaggggcaataactattgaggaagcagcgaacatggaagcagaacagcaaaacgagactagaaatgctagggcaatgcttgttttaagacgtattacggacaaattaacaggtaacgatatcaagaggtttagcgagttagacgttcctgaacaggtcgataaattaatccaacaagccacttctattgaaaggctgtgccagcattatgttggatggtgtccattttggtga

SEQ ID NO: 1449 - DNA, 1062 bp, Saccharomyces pastorianus
atgtttgaagggtttggacaaaataagaagcgtaaaacaacgaagttagctacagagcagtcattggcacaacaaccatgggttgaaaagtatagacccaagaacttagatgaagtgacagctcaagatcatgcagtcaccgtcttgaaaaagacactacaatcagccaatttacctcatatgctgttttatggccctccagggactggtaagacatctaccattttagcattgaccaaagaattgtatggtccagaattaatgaaatcaaggattttggagttgaatgcttctgacgaacgtggtatatctattgttagagaaaaagtgaagaatttcgcaagattaacggtgtctaaacctagcaaacatgacctggagaactatccatgtcctccatataagattatcattcttgatgaagcagattcaatgaccgcagatgcacaaagtgctttgcgtagaacaatggaaacttactcaggcgtaacgagattctgtatgatttgtaattatgtgacaagaatcatcgacccattagcatcccgttgttcaaaattcagatttaaagctctagatgccaataatgctattgatcgattgaaatatattagcgaacaagagaacgtcaaatgcgacgatggtgttttggcaaaaatcttggatatctctgcgggagatttgagaagaggcattacgttactgcagtccgcttcgaagagagcacaatacttaggtgacggtaaaaatataacatcgattcaagtagaagaattggctggtgtggtacctcatgatgttttggtggaaattgtcgacaaagtcaagagtggtgatttcgacgaaattaatagatatgtgaacatattcatgaaaagcggttggtcaggtgcgtcggtggtgaatcagctacacgaatactacattaccaacgatagcttcgatactaactttaagaaccaaatatcttggttactgttcactacggattcgaagttgaataatggtaccaatgagcatattcaattactgaacttattagtcaagatatctcagctgtaa

SEQ ID NO: 1450 - DNA, 594 bp, Saccharomyces pastorianus
atgagcaacaacgaaattgtatttgtcactggtaacgccaacaaactaaaagaagtccagtcaattttggcccaagatgccaacagcaataataagactattcatctaatcaatgaagcactagaccttgaggaattgcaggatatagacctgaatgctattgcattggccaagggtaagcaagctgttttggccttgggtaaaggtaaaccggtttttgtagaagacactgcgttgagatttgacgaatttaatggcttgccaggtgcttatatcaagtggtttctgaagagtatgggactggataagattgtgaaaatgctggaaccatttgaaaacaagaatgccgaagccgtgaccactatttgctttgctggttccaaaggcgaatatcatatctttcaaggcattacaaaaggtaagattgtctcgagtcgtggtccaactacattcggctgggactcaatctttgaacctctagaaagtcatggtttaacgtatgcggaaatgagcaaagatgccaaaaatgctatctctcatcgaggtaaggcctttgctcagttcaaagaatacttgtatcagaatgagttttaa

SEQ ID NO: 1451 - DNA, 1170 bp, Saccharomyces pastorianus
atgggtttaagcacgattatatgtatcgggatggccgggtctggtaagacaacgttcatgcagagactgaactcccacttgcgggcagagaaaacgccaccatacgtgatcaatctagatcccgcagtgctgagagttccgtatggtgccaacatcgacatcagggactcgatcaagtacaagaaagtgatggagaactaccagctggggcctaacggggccatcgtcacaagtctgaatctgttcagcaccaagatcgatcaagtgattaagctagtagaacagaagcaggaccaattccagaactgtatcatcgacaccccgggtcaaatcgaatgtttcgtctggagtgcgtccggtgccatcatcaccgaatccttcgcctccagtttccccacggtgattgcgtacatcgtggatacgcctagaaactcgtctccaaccacgtttatgagtaatatgctgtacgcctgttccatcctatacaagacaaaactacctatgatcgtggttttcaacaagaccgacgtatgcaaagcggacttcgctaaggaatggatgacagatttcgaaagcttccaaatggccatcaaagaggatcaagacttgaacggtgacaatgggctgggttctggctacatgagttccttggtgaactccatgtcgctgatgctggaggaattctactctcaactagacgttgtgggcgtctctagtttcactggtgacggctttgacgagttcatgcagtgtgtggacaagaaagtcgatgagtatgaccagtactacaagcaggaacgtcaaagagcgctgaacctgaagaaggagaaggaggagatgaggaaacagaaatcgttgaatgggctgatgaaggacctggggctaaacgagaaggacaccgctgctgcaggcaaacccggcagcgatcacgacagcatagacgcccttagcgacctggaagaggacgccaacgacggccttgtagaccgtgacgaggacgaaggagtcgagagagaatacacgttcccaggcgaggagagaacccagggtgaggtcaacgagacctctgctccagacctacaaaaaagataccaggatgccatgcaacaagtagcaaaaacggccactagcgagactgcggaaaacatcgctaagtatattagaaactga

SEQ ID NO: 1452 - DNA, 621 bp, Saccharomyces pastorianus
atgaaggaatcagcccaagagatcattcagcaactggtccacagcgtggacttccagtcctccaagtttcaattggccatcatgtgcacgatgttcaatcccatcttctggaatatcgtggccaggatcgagtaccacacgcactcactcaccaagatgtgtggaggagccaaaaagggctgctacgtgttggcagccaccattttctcgctagggatcatcagagacatggtctacgagtctgcattgcgcgaacaatccacatgctctttgatcgtgggcgaaaactggaagaagctgggcatggccttttttggtgcaggccaggtgcttgtgttgagctccatgtacaaactgggtatcaccggtacgtacttgggtgactacttcggaatcctcatggacgacagggtcactgggttccccttcaacgtgtccaacaaccccatgtaccagggctccaccctgtccttcttgggtatggccctctacaagggaaagcctgccgggttggtcgtatccgccgtggtctacttcatgtacaagattgctcttcgttgggaagagccattcactgccatgatctactccaaccgtgagaaggccaaaaagaacatgtga

SEQ ID NO: 1453 - DNA, 1248 bp, Saccharomyces pastorianus
atgtccggcataattgacgcgtcttctgcattaaggaaaagaaagcatttgaagagaggcatcaccttcaccgtgatgatcgtgggccaatccggctcaggcaggtcgacttttataaacaccctgtgcggccagcaagtcgtggacacctcgacaacgatcctgttgcccacagatacctctacagagatagacctgcaattgagagaggaaacagtggaattggaggacgacgaaggtgtcaagattcaactgaacattatcgatactcccgggtttggtgattctctggataattctccatctttcgagataatttccgattatattcgccaccaatacgatgagattctgttggaggaaagccgtgtgagaagaaatccaagatttaaggacggtagggttcattgttgtctgtatttaataaaccccactggccatggtttaaaggaaatcgatgtagaattcatgaggcaattgggatctctggttaacattatccccgtgattagtaaatctgactcgttgacaagagacgaattgaaactgaacaaaaaattgatcatggaagatattgacaaatggaatctgcctatttataacttccccttcgatgaagatgaaatatccgaggaggattacgaaacaaacatgtacttgcgtgcgcttttaccctttgccatcatcggatccaacgaagtctacgacgtgggtggagacgttggtactattcgtggtagaaaatacccatggggcatattggacgtggaggattcttcaatctctgattttgttatcttaagaaacgcgttgttgatttctcatttgaacgacttgaaaaattacacacatgaaatattgtatgaaaggtatagaaccgaagcattgtctggtgagtctgtcgcaacagaatccatccgtccaaacctcacaaaattgaatgcttcatcgtcttcatctaccacaacaagaagaaacacgaatccgttcaagccaaatgataatattaataatggcattctcagcccaccatctgatacacacgggcaaaaagccagtaccaataacgaaacttacatgacacgcgaagaacaaatacgattggaagaagaacgactaaaggcatttgaggaaagagtacagcaagaattatcactgaaaagacaagaactgttgcaaagagaaaaggaattaagggaaatagaagccaggttggaaaacgaggctaaaattaagcaagaggactaa

SEQ ID NO: 1454 - DNA, 936 bp, Saccharomyces pastorianus
atgtctctgtctgctgctcctgttatcccccagtactcggtctctgactatatgaagttcggtctagccggcgccatcgggtgcgggtcgacccactccagtatggtccccatcgacgttgtcaagaccaggatccaactggaacccactgtgtacaacaaggggatggttgggtcgttcaggcaaatcatcgccggcgaaggtgccggtgcgttgttgaccgggttcgggcctaccttgctgggctactccattcagggtgcgttcaagttcggtgggtatgaagtgttcaagaagttcttcatcgacaacttgggctacgacactgcctcgcagtacaagaactccgtgtacatggggtctgccgccatggccgagtttttggctgatattgcgctgtgtcccctagaggccaccagaatcagactggtctcccagcccaagtttgccaacgggctggtcggcgggttttccagaatcttgaaagaggaaggtgtcggctccttttacagcgggttcacaccaattcttttcaaacagatcccttacaacattgctaaattcttggtctttgaacgtgcctccgagttctactacggatttgccggtccaaaggaaaaagtgtcctccaccaccgccactttgctgaacttgctttccggtttgactgctggtttggctgctgctattgtctcgcaaccagcagacaccttgttgtccaaggtcaacaaggccaagaaggccccaggccagtctaccgtcgggttgctagctcaattggccaagcaattggggttctttggctcctttgctgggttgcctactcgtttggtcatggtcggtactttgacctctttgcaattcggtatctatggttcgttgaagagcactttgggctgtccaccaaccattgagattggtggcggtggtcattag

SEQ ID NO: 1455 - DNA, 1179 bp, Saccharomyces pastorianus
atgataagttcaagggtcaatgctcgagtttggcaaagatctatttctatcttgagacctcaagcggccaaagcagagagcaatattgtttccaaagagagaacatatattgaagagttgaacaaggatatcgccacttctcgtttcaaactggtggatcaaaacggtcaaattgcatctataactgtacaacctgatattccgatctgcattaaaaaggattgtttggtttctatccataatttgaaccatctctccctttcttataaatggctcaatttttggtccaatttgatcaaattccgttcatttagatcttcgttatttcataagatcattgggtcctctactatggaaattctagcttcaccaaatttccaaaagtcgggaaggtcttccaattcttccaggactttgtctgtgttgaatttgacggggactaaggattggaatgtatttggcaaagattcaataattgcatttgaacaaaattccagtttggaaatcaaatcgccaatcttacccacgcctaggactctggcttcgggctcattgaagtctcgactaccaccgaaatttcaaattttgaatggcaggggtaatgtactagtgtgcggaggtggttcggtatattcaatggaattgattgacgagaacgacaaaatcctggtgaactcccggaatattttggccatcaacggtcaaagccaattggacattgccaattccgttgagagacaggaattgcatgtagaggccgcgaacatcgaggatagtggtaagagagtgcccaaacttatcacgaacccaacgttacaatccgcctacggacacaccactcggtttttcaaaagactaggtagttggtttcgaaaccaatatgaaaagagatacatttacggtatcgattcgtacttcatgaaggtgaagggcccgagaacaatactgattcaaacgcacgaaatgacgacatctaaagataatattctaagcaaaataacttccaagggccacgtcaagaggaacacagaagacgacgtcaatgacactctagaggaacgggttgccaatgatgtcaattccaagataattgaacttgccaatagaccttcattgttcattgcgactgtgtccaaaaatgggaagattgattttcaaagtacttcgaagttcacataa

SEQ ID NO: 1456 - DNA, 342 bp, Saccharomyces pastorianus
atgactgatgagctaaaacagtatgaagcattaaaggctgaactaaaaaagtctcttcaagatgggaaacaacaggaagacgcctttgacagtttacaacaagagatttacgataaagagacagagtatttttcacacaacagtaacaacaatcattccggtcatggtggaactcagacgtcaaaggcgcactactccggtaatgtcatcaaggggtttgacaccttttccaaatcacatcatagccatgcagattcagcatttagtaacaatgatcgtattttttcattaagcagtgcttcatatgtaaagcaacagcataatcaagcgcaaagcgaatag

SEQ ID NO: 1457 - DNA, 930 bp, Saccharomyces pastorianus
atgtccgaagaccaacgtattgttagtcagccgattgaactgcataagctgtccattgttgataaacattcacaggatcagaaacagcagcacgagcagccagtgcattcaggattacaatcaccaagggccaccacacctctaaaacctaaaagacttgctatacccatatcaagcccacaaagaagttctttccaaaatagtttcgtaaaccagtcgcctgttagtgacaacactagcccagtttccgccgatcaagatttaatttataaactggctgcaaaacaaagagaaattaatgaattaaatttcaagctacaagctgctcagaaagaattaaagcaattagagttgaagttcaaaaacatactaccccaaaacgaacaacaaaaattcaacagtcagaatacgaacgaatacctttccacattttctagaaagattcaacaaactttggtcgatgtcaataattcaccaaatgtgctcaagagcaaaaggagtataaacgatttcttcaacaagaccaatcgcaccgcaaacgataatgcaaacaatactatgcccacccgtaggccgaatcgttcaccgaatcgtacccaacagcgtgtacaagatacgggtcctaatcttactccaaatgcaaatgcaacacctcctccattaccgtcaagaaatacaaagggaaatttaaacacaaccgctcctgttgatgatgatacaccattttttcaaagaataattaacaagtttagtcaaatgaatacggaagaagaagaatttgacgatttcatggaaaaggggaaaagtaaaaaagataattattatattaaggaaaatttgggctatgagtatgatgaagtgcgcagtgacgatgacgatgaagaattcgagcctatgggtgacatacccattcatttatttaaaaggtag

SEQ ID NO: 1458 - DNA, 318 bp, Saccharomyces pastorianus
atggaacatccagcatttacattgggtcttttaaccgctaccggtggtctcatgggttactaccgtaaaggctccatcccatccttagtatccgggttggtattcggtagtgtgtacggtgttgccgggtacttgctgcactttaacagagacggtgggctggaaatggccctgggtgcatcgaccttgttgctcggtgcagggatcattagaggtatgccttccaggttcaccaagcctgtccccgttgttctaaccgctttaggtggggttggtagttactactactataataaatacaaggaattttacccttga

SEQ ID NO: 1459 - DNA, 327 bp, Saccharomyces pastorianus
atgtctgtagttcagaactcaccacggctgcaagagcctcaggaggagcagcagcagcagctctcgttaaaaataaaacagttgaagttgaaaagaatcaacgaactaaacaataaactaagaaaagagctcagtcgtgaaagaatcaccgcttcgaatgcatgccttacgataattaactacacttcaaacacaaaagattacgctctacccgagttatgggggtaccccagcgcaggttcgaatcattttagagaaggtttaagaaaggctcaaaaaaataatcatttgtcaaactcaaataatgcttgttgtacgcttatgtaa

SEQ ID NO: 1460 - DNA, 2907 bp, Saccharomyces pastorianus
atgaatagtcaatcagatgcgatggatgaacgatatagcatgaccaagttggaaaatagattaagaactttccaagatggggttgtacttcaaaagaaaaaattaagatggagtttcaaagtcattccataccaggcaatggccaagcttggtttctattttgatccagtgatagatcccaaaacgtcaaagttaaacaaggactgtgtaagatgctgctactgtcaccgccgaacatataacgttagagattgcagatccaggaaaaaagatgttctcgaaacgctaagcaatataacgaggagacatctaactgattcagacaataagcaagtatgcctcttaatttacttgcgaaataaactattaaaggattacagtttccatatgggtgtttcagactggaaaaacgacaaacatttcagcgaaccagacagtaaaatcatgttaaactttagaagattcacttttaaggatgattggccacatggtatctctcacaatgagcaccaactgaatatagaaaacatggttaatgcggggcttatacgttatgataccagcatagaaggactaaaggatccaaatatggataaggccctcatgagtgactcatgttactgtatttattgcaagcactccttacaaggttggtcatcgcacgatgatccgctaaggcggcattacgacatctctcaaaaaggtaattgttatttctttcaaatacgcaatcggtttgaaagaatgaggaacgataaggatagcaccattagtagttcagataccatcagccaaagttgtggggccaccaccacacaagttgaagaggaaagagatgacgttgttgcagtgaaaaccacctctcaaagtcaaaattctttagtctcatcatcttctcctggtaagaatcttcaaaacaacggtgacaatggattgaatagtcttgttattcaacatgatagaagtgtactgagtgaactaaacgacgagtactcaaagcaaaataaaataaaagagaaacagcaaatacatctggagaatggaaataccactttaagagcggacaatacaaatcaaggtgtttccgcagttgaaaatggaattagcctaactcctattgtaaaagaaagcaagcgtccaaattctcaacttgcgcaattttcatctccttcaaggaagaggaggaagttcaaaagaatatcacccagaagaattttcgatgaagaagatagcgaaaactcttttgataatagtactgtcggtttggaaaacaaagataaagatttagttatcgacttcacaagccatatcaataaagcaagagatacggggagaaagaatgcaattctggacgacagtacggacgaattcagttttagtaatcaaggacatagtacctttgatatacccgtaccgacctcctcgcatttactcagagacataggttcagacattaagattgtcacacaggacccagaaaaccctattaatgcaagttcaaactcaaaagaagcagttatgaaagaagaaaaatatttggccagtgatgacagaaacgaagatagcaacgacacgcgacttgtaggcagagatttcaacactactactcctggaaaatctggaagtatagaccagaggtcgaacgacaccaatgctaacaaaggtctctctaacgagactcgaggttcatcggtaccgcatgagttatatcaagacaaaattacggaggtaagaacagaaagcgaggaaggacagaaaaatgatgtaaacctgccaatacggcgactttcggatgcaagttatagtgatatattgaatagtaactccaataatattaccgacaatataccaaaaggagagatagatgggagcaatcttcaaacctttgatgcatctttacacaaaaaagctctgggagatgctggcgccaaggaaagatctactaaactagatagtttaccaccaaaagaaccagtaattccagcgcacagaaaattggataacattgacatagatttacatttgtcagtatcagacttctcatcttcttcgcactctgagcaatcatcaaagagctcaagcgccatctcgacaccggtagcaagtccgaagataaatgtcacacgtagcttgcatgcggtcaaagagctctctggtctggcaagaaaacaattcaatgatttggaattcgctaataagcaggacaccactaaaatgttggagtatgtgtctgtgaagaatgaaactactggagaagagtcgccgatttttgaaactggaacaccaattgcctacgaagaacacaagtcaaagaaattatttgaaaacgagtttttggggaaagaactggagacgcctatttatttatcaaccgtagatctgaacaaatcacccaagcctgaacctgggtcaatcttaccagtcgtaggtaattcaatttccagtacaagtttacatccacagtactcacccctagagaaacaaaaaaaggagaaaactttgaccacagataccgaatgtgcgacgggatgtttattaaatgaggagaccaaaaacagtagagctgactttggtgaatggtgcaaaattgatgaaaacagattgcttgttaaaaattactttcatgatttattgaagtatataaacaacaatgacgctacattgtctaatgacaaagacggagatctagcatttttaatcaagcagatgcccaatgaagagttggatatgacattcaccaactgggtaaatttgaaggtgcgatctatcaagcatgaattcatagatgattgcgaaaaaaagttgaacatcctgagaaatgactttgatactgctaagaattacgttgagactttggaagatgatgatgaattaatcaagattgctaagaaaatgggtgttttatag

SEQ ID NO: 1461 - DNA, 3261 bp, Saccharomyces pastorianus
atggacaaaagcaagcaaatgaacattaacaacctgtccaacattcctgaggtaattaacccaggtattaccattcccatatacgaggaggagtacgagaatggagagagtgctaatggtcaactacaacagccgccacagaagttaggatcttaccggtcccgtgcagggaaattctccaatacactgagcaacttgctgccctccattagtgccaagctgcatcattcgaagaagaacggccatggcaaaaacgctgttgagttttcctccagcaacaacagttctcagtcgacggtggcttctaaaaccccgagggccagcccctcccggaacaagatgatggacagcaccatagacaatgtgtccatggatagaccgggcagtttaaccccacctcaagacatggaaaaactggtccatttccctgattcgaccaataatttcctgatccctgctcccagagggtccagtgactcgtacaacctgcctcaccagatttccaggacaagaaataatacgatgtcatcccagatcacttccatgtcgtcaattgctcccaagcctcgcacttcaagcgggatatggtcttccaatgccagcgccaatgaccccatgcagcagcaccttttgcaacagttagatcccacaacgagcaacaatacaaacaatccgaacccgcttaacgactattcaacaaagaccgcatttttcgacaacttagtatctacaagcacgagccaaatgatggacagtaaaatgaatgcaaatagtttggctattccaaactctctttggtcaaactcaagacaaaggtctcaatcaaacgcttctagcatatacacagatgcgccgctttatgaacagcccgctcgcgccagtatttcgtcccattatactatgccaatccaggactctcccttggtggctgatgagatcgatccgcattctattaactgggtaaccacagatcccgctgtaccatccataaaccaaatttccaatctattgcccactaataccatttccatttcaaacgttttccccttgcaacaccagcaacctcagttgaataacgcgataaatttaacaagcacctcattggccactttatgttccaaatatggtgaagtcatatccgctagaactctaagaaatttgaacatggctttggtagaattcacttccgtggaaagtgccgtaaaagctctggatagtctccaaggcaaggaggtttccatgattggagcaccaagtaaactatcgttcgccaaaattttacccatgcaccaacaacctccacagttcatcctcaattctcaaggcttgccattgggttctgaaaataacaatttacaaccacaaccattattacaagagcaattatttaatggatctgtgactttccagcaacaaggcaatgtctccatacctgtatttaaccaacaatcacagcaatctcagcaccaaaatcatagttccggttcaggtgggtttaataatgttctgcacggctacaacaacaataataaccctcacaataacagcaacaactctgcaaacgaaaaggaacagtgcccctttccgttaccgcccccaaacgtcaatgataaagaagattcgttaagaggtatcattgagcttttcaaaacaactgccgatgaatatcaaatcaattcattaataaaaaagtcacttaaccacaaaggaactccggatactcaaaattttggtcccttaccggaaccattgtccgtgagagagttcgatccaccaaagttgcgcgaactaagaaaatccattgactccaacttattttccgatttagaaatcgaacagttagcgattgccatgcttgaagaattaccagaattaagttcagattatctgggtaatactattgtacaaaagttgtttgaacattcatcagatataattagggatgtaatgctaaggaaaacaagcaaatacttgacctctatgggtgtccacaaaaacgggacgtgggcgtgccaaaaaatgatcaccatggctcatactcccagacaaatcatgcaagtgactcaaggtgtcaaagattactgtaccccgttaatcaatgatcaatttgggaactacgtcattcaatgcgttttgaagtttggatttccttggaaccagtttatttttgaaagcataatagccaatttttgggttattgttcaaaatcgatatggtgcacgagccgttagagcttgtctagaggcacatgacatcgtaactcccgaacagtcgatagtcctgagcgcaatgattgtcgtgtatgctgactatttaagtacgaacagtaacggggcactgttggttacatggtttttagatactagcgttctacccaatagacattctatcttggcaccaagactgacgaaaaaaatagttgagttatgtggtcacagattggcttctctaaccattttgaaaatcctaaactttagaggtgatgataatgccagaaaaatcatcttagactctctgtttggaaattcgaacgcacacgattctttaccaccaaaggagttgaccaagcttttatgtgaaacgaattatggtcctacctttgtccataaagttttggcaatgcctttattggaagatgatttgagagctcacattataaaacaggttagaaaagtgttgatagattctactcgaatacagccaagccgccgtttattagaggaagttgggttggcatctccctcaaattcacataacaaggcaaagcagcaacaacaacagcatcataataatagcatttcacatatgtttgccactccggatgcatctggacaacatataagaggcctttctgtttccagtgttaaaagcgccggatcgaagcataccactatgaatactggaacaaccacggggtctaccgcatccacactgtcaccaggccagtcattgaatgctaactctacaatgggttatttcaattatcctggtgtcttcccagtggggggcttttcaggcagtgccaataatggatatggtgttaacaatgatgatcttaattcccaattcgatatgttaaacttgaataacggaactcgtttatcattgccgcaattgagtttgactaatcataacaacactactacagaaatattaaacagtatcggctcatctaaaggccatacgaacaataacaacaacaaaaattataatgaggacaatcccgcttttgaaactatgactttacactcagcaaattaa

SEQ ID NO: 1462 - DNA, 996 bp, Saccharomyces pastorianus
atgagttctagtgaagatgaagacgacaaattcctgtacgggtccgactctgagttagcattgccttcgtccaaaagatctagagagaatgaacaagaacaagatgcctctaatgatccgggtacagccaagagacaaaaacaggattcttttgaggaaaccgttccaaccatagccaaatatgatcattccgatgaagatatatactctgattcctcaaataacgagagcaactctgacgtagaggttatcataagcacaggccctgatcctactcggctagacgccaaattgttgggctcctatcaaaacgtaacaacatctggaagcaaagacgtaatcagcgtagctaccgacgtccctgtgaccataaataaaacatcagatgaaagacccgcaacagagggcgaaacagatcaaggcgtaacgacgtcagagtcgaaagccgttactacagagggtgaaggaaatgtaccgaagacaatggttggatctattgatctagacaaagaaggcattttcgaaagcgtcggtataacaactatagaccctgaagtactaaaggaaaagccttggagacaaccaggagctaatttaagtgattatttcaactacgggtttaatgagtttacctggatggagtatttgcatagacaggaaaaattacaacaagattacaaccctagaaggatcctaatgggtttactaactctacaacaacaaggcaagctaaactcttctaacgacacagacttgaatctcggcaatatgattgacaacaacaacaacaacaacaacaacatcaacaattcgaatatgtccaatctaaataataatatgggtaatagcatctctggaacaccaaacccttccgcaccaccgatgcatccaagtttcccaccattacccatgtttggtagtttcccaccattccctatgccaggtatgatgccacccatgaaccaacagcaaaaccaaaaccaaaattcgaaataa

SEQ ID NO: 1463 - DNA, 1113 bp, Saccharomyces pastorianus
atgcaagccgctatccacagaaagctcaacactgctttagaagatgatgttcctcttcttttcccttttgaacaacaacaacaacaacaacagcaaccagacttttattacgacgcagcgactaatcaacaagatcaccccagtttttcctttggatctacaatctccccaagaagttggcattttgaaaaatcagacaacgactcaaatattccctcctctcaattacagcacttggttcacacacaaccaattcacttgattaaccctcagattttattcaacgaagagtttttgaacttggaaaacatcgcttcgcagcctcgttctaaagaaaatagaagtataaacggcaatgaaacagaaacagctactgaaaaacaaaaaagggactcaaaaagtacaaaatcttcctctttatcatcacttttttctaatgacgatacagcttccacgtattattcttcttacaacaacaacaatatcttccaaaaaaccgataagaaaaacgatgatattgatatgattgacacaatgaaatttgaaactaataccaacttacagaaagacataaagatatttcaagaaatttttgattttaatgaatttgcatacgcacaagatttttacccacacagtacgaactatacttattcgaaaccctcaaacgtccataactcaataaccaccaaaaatatagactcatactatcagcaccaataccagaatctaccccatattgaaaatatgcactccattaacaaccgtcattataacaacaacaaaagcgttaattataacaatagtagccttcttcacaataataataacaacagcgccagtaacgcgtcccatagcatgtacgaagctgaaccgtttatagatgagcctcaagtgccatcatgctattacccattagaaatttccttggatattgataggacaccagcacaaaaactaaactcggaagaattagaatttgttaaaaggctaaacgccaaactatcaagatatgctgctgcctattcagttagtgcttccaacgaccaagattattacgataaggtcagatttcaagagatttcctataaatttagtaaaacatattcttag

SEQ ID NO: 1464 - DNA, 969 bp, Saccharomyces pastorianus
atgtcccaaaaaaagaaagcttctcatccggctatcaacctgattgcaggtggtactgcaggtatgtttgaagcattgtgttgtcatcccttagatacaattaaagttagaatgcaaatctacaaacgagtggccggtatcgaacacgttaaacctccaggtttcatcaaaaccgggagcaccatctaccataaggaaggtttcttggctctgtataaaggtctcggtgctgtggtcatcggtattataccaaagatggctatccggttctcgtcttatgaattctacagaaccctattagtcaataaggaaacgggaattgtttctaccggtaacacatttgtggctggtgttggtgctggtatcactgaagccgttcttgtggtgaatcccatggaagtcgtaaaaattaggctgcaagctcagcatttgactccgacggaaccaaacgctggccctaaatacaataacgccattcatgccgcctatactatcattaaagaagagggggtttctgcgttgtatagaggtgtttctttaaccgcagcaaggcaggcaacaaaccaaggtgctaacttcacagtctattctaaattgaaagaatatctgcaaaactatcaccaaatggatgtcttaccttcgtgggaaacatcttgtataggtttgatttcaggtgccattggaccgttttccaacgccccattggatactatcaagacaagattacagaaggataagtcgacatctttggaaaaacaatctggcatgaggaaaatcgtactaatcggtacccaacttctaaaagaagaaggctttagagcattatataagggaataaccccaagagtaatgagagtggcaccgggtcaagccgttacgtttaccgtttacgaatatgtaagagatcatttggaaaagacgggaatattcaagaagaataataaaccaaagccaaaaccattgcagtag

SEQ ID NO: 1465 - DNA, 849 bp, Saccharomyces pastorianus
atggtcccgaaattctacaaattttcaaatggctacaaaatcccaagcattgccttgggtacttacgatatcccgagatcacaaaccgctgaaatcgtctatgaaggtgccaagtgcggttaccgccattttgataccgcagtgctgtatggtaatgaaaaggaagtcggtgacggtattaagaagtggttggacgaagatccagaaaacaacaaacgtgaggacattttctatactactaagctatggaattcccaaaacgggtataagagagctaaagcagccattcagcaatgtttgagtgaagtctctgggttaaaatacattgatctcctattgattcattcaccattggaaggttccaaattgagactagagacatggcaggctatgcaagaggccgttgacgaaggaaaggttaagtctataggtgtttccaattacgggaagaaacatgtcgatgaacttttgaattggccacaactgaaacataagccggtggtcaaccaaattgagatttctccttggattatgaggcaagaattggcagattattgtaaatctaaaaaccttgtcgttgaagctttcgctccattgtgtcatggttacaaaatgactgatccagacctgttgaaagtatgtaaagaggtggatcgtaatccgggtcaagtactaatccgttggtctctacaacacggttatttaccattgccgaagaccaaaaccgttaaaagattagaaggcaaccttgcggcttacaattttgaattgtcagatgaccagatgaaaattttagatcatcctgacgcttacgagcctaccgattgggaatgtacagatgcgccataa

SEQ ID NO: 1466 - DNA, 717 bp, Saccharomyces pastorianus
atgagcggaaaggagcgtgccgtggtaccaattgaatcaaaccctgtagtttttacagaatttgcacacaaattaggcttacaaaaggaatgggcatttttcgatatatatagcttaacagagactgaattattggcatttttaccaaggccagtaaaggccatcgtgctgctattcccaataaatgaaaaggccaattcaactgttaacgaccaaagttcaaaggcaagaagtacagatgttatatggtttaaacaatcagtcaaaaacgcgtgtggtttgtatgcaatccttcattcattgagtaataaccggtcattgttggaaccaggatccgacttgataaaatttctagaatctcaaagtaacagtgcaactccgagaactatgtttgatgatgcaatcgctgatcaatttgtcttggatgtaattaatgaaaatacacaaacattttctaccggccaatcagaagcacctgaagctacggtggacattaatctgcattacatcacatacgttgaagagaatggtgagatatttgagttggatggaagaaagctaagtgggcccatttccttaggtgaaagcgatccaactgccgctgatctgattgaacaggacatagtcagacaaagagttgcgtcatatatgaagagtgctgataaagaggatgtattgaattttgccatgctaggattaggccccaactgggaatga

SEQ ID NO: 1467 - DNA, 798 bp, Saccharomyces pastorianus
atgtttgttattaaaagaggtatccacacggtaccaaggctacccaatactaaagcactactacaaaagggagttcccaaagtactcagttcttctggtttcaaggtagcatggaccgactaccagcagtacctgtgtgataagctgacgctagctactgcagggcagtctctcgagtcatatcatccattccatatactgctgaaaactgcagggaatccattacaatccaatattttcaatttagcttcatctgttcataataatcacttgtttatggagaatattcttccttctattaccgaaagtgatagtgattctccaatagggaagacagaaccatccaggctatttttgtccagaatccaagactcgttcaacggcagtgactgggacgtagtgaaagaagaaatgatccatcgttcagaaaacgaagtgttgggccagggctggttatttctcgtagaaaatagtgaaaaaaaactctttatattaacctgtcaaaacaacggtacgccgtattatttccccagaaaccagacattcgatttaaacagcgcaatttctatcgacgagtttggtaccttgaagcaaatgaaagaaatgattgaaaactcaaccaaactgaatggtaaagttcaggactggaccatgcctctaatttgcgtcaacctatgggatcatgcctatttgcatgattacggcgttggaaacagatctgagtacgtgaagaatgttcttgataacttgaattggtcagtggtcaataatagattattctctgacatgtccaaataa

SEQ ID NO: 1468 - DNA, 465 bp, Saccharomyces pastorianus
atggttcaagctgtcgcagtgttaaagggtgatgccggtgtctccggtgtcgtcaagttcgagcaagcctccgaatctgagccaaccactgtctcctacgaaatttctggtaacagccccaatgctcttcgcgggttccacatccacgagttcggggacgccactaacggctgtgtctctgccggcccccacttcaaccctttcaagaagacccacggtgcgccaaccgacgaagtcagacacgttggtgacatgggtaacttgaagaccgacgccaatggtgtagccaagggctctttccaagacaagttgatcaagttgttcggtgtcaattccgtcgtcggcagaagtgtcgtcatccatgctggtcaagatgacttgggtaagggtgacactgaagagtctttgaagaccggtaacgccggcccaagacctgcctgtggtgtcattggtataactaactaa

SEQ ID NO: 1469 - DNA, 1023 bp, Saccharomyces pastorianus
atgtccgctccattggtagtattgggtaaccctcttctagatttccaggctgatgtcacggctgaatacttggccaagtattcgctaaaagacaacgacgccatcttagtcgacgccaagtccggcgatgccaagctagccattttcgatgagctcttacagatgcctggctccaagcttgttgccggtggtgctgcgcagaacaccgccagaggcgctgcctatgtcttgggcgccggccaggttgtctacttcggttccgtcggtaaggacaagttcagtgaaagattgcttaacgaaaatgaaaaagctggtgtcaagtccatgtaccaggtacaaaccgacgtcggcaccggtaagtgtgccgctttgatcactggccacaacagatccttggtcactgacttgggtgccgctaacttcttcaccccagaccacttggacaagcactgggacttggttgaagccgctaagctcttctacatcggcgggttccatttgactgtgtctccagacgcgatcgtcaagttgggccaacacgccaaggaaaacaacaagccattggttttgaacttgagtgctcccttcatccctcacgtcttcaaagacgcattagccagagtcttgccttacgccaccatcatcatcgctaacgaatctgaagccgaggccttctgcgatgccttccagttgggctgcgccaacaccgacttggaggccattgctcaaaaaatcgttaaggactctgcagttgacaagaccgtcatcttcactcacggtgtcgaaccaaccgtcgtcgtgtcctccaagggcaccgccacctacgccgtcaagcccttggactcctccaagatcgtcgacaccaacggtgccggagacgcctttgctggtgggttcatggccgggttgacccaaggaaaggacttggaaacctctattgacatgggtcaatggttggctgctttgtctatccaagaagtcggtccttcttacccctcccaaaaattatctttctctaaatag

SEQ ID NO: 1470 - DNA, 2052 bp, Saccharomyces pastorianus
atggagtacatcaagattgctaaagtatcaaatgtagtactgcatagaagaggcacagccaccgaaggtactttgcacttgactactcatcatttgatctttgagtcctctcaattatcgacggaattctggtttcactacccactgatttatggagtgcataaaaacccgggcagtaccttactgtcaaaattgacgtccacaaaccaaatccaattggaaggcacagattcgcagaactataggctctaccagggtaaggatctttggtcattcgtgaacattaagatcatcgggaaagactacgtggtcttttctttggatttcggcagcgatttgcacctacaagcgaggaaagtgtatgagtccatcttaaatttgactgtcgtcggtaatattaacaagctatacgcttttatttacatgtctaacaacttggagaggaaattgcccgcgcccaatagttgggaaatatacgatccagttagggaatttcaaaggcagggactagatcataatgacgagtcgtgcccttggagactatctatgattaacgaacagtacgaattttgcccgacatatccctcccaactgttcgtaccgaggtctacatcggatacgctactccagcatgcgtcgaaattcagatcgcaaaagagaatccctgttttaacttatcaccacaaggccacagattgtaacattctcagatcatcacaaccattgccggggttgatcaaccagaggtcaattcaagatgaaaaactggtttgggaatgttttagctctttttttaatacagatatcaaaagaaccaagcacgtgatagtagacgcaagaccgaggaccaatgcgttggcgcaaatggccttgggtggtgggacagaaaacatggataactacaatttctttctagcagacagtaatctaggtgtcgataagaatataaaattgcccaccgtgacaagattatttctcggtatagataacattcatattgtttccaacacagctgcatatatgacggagatcatctgccaagctggcgatttgaatttaccgttagagcaaaatctgatcaagtcccaaaagttcaccaattggctgaaattgaacactcttattctcaaatcagttgatatgcttctaaaatcaatgattttcaatcactccaacgtgttggttcattgttctgatgggtgggacaggaccagtcaggttgtttctctcttagaaatgtgtttggatccgttttatagaacatatgaagggtttatgattttagtggaaaaagattggtgttcctttggtcacaggtttctggaacgaagtggccatttaaattctgacgtcaggttccacgacaacactatgcactcgttatttaacgacggcgatactaatggcgatagtttcgacatggaccaagacgattatggtgaagatgatggtggagatgacgaagatacgaacttaataaatataagtaaaatatccaaaaaatttaacaacaatttcaaactgaataagaagagtctaaagtttgtttccccggtcttccaacaatttctagactgcgtatatcaattattgacgcaaaatccagacctgtttgagttcaacgaaagattccttagaagactaatatatcatttatattcatgtcaatacggaacgtttctttcaaacaacgaaaaggaaaagtttcaacaagatctgccgaacaagaccaaaagtgtttgggactattttaggtctaggaaaaagcagtttataaatccaaattttgtacagagggacaatagcgtaaaggatgatgaagaagttgcagaagacgaaaaagtggaatggatttcaccagacttgaaaaaaattcaatggtggtggcaactgtatggaaaaaaggattcagagatgaacgacgaattgcgccataaaaaaggttcttcatcactacccatggataaaaatagtaaagagcactgcaattccgatggatctaagggcttaaatctctcgatttttgggtttgatatgtttaatagaaagtga

SEQ ID NO: 1471 - DNA, 852 bp, Saccharomyces pastorianus
atgaaccagatactgaatgcgcaaagactgatacaattatcgcagttccatcctaaactgaaaaatatatggtaccttgttgccgccgccactttcagtgtttgtaacgagccacaggaaatacccaaactgtaccattatgccatgctactgagtaacgacaacgctcatatgtatagattcacattagcctcacaaaccattgatttacttcgttcagattcacaaataaggaaaactctaattaatgaaaactatcaacagccgacgttctttcaaaagcaactcacagcgaaattcagagaagtaattcttagaacggggcccttagcaggccttccaaaggccatcaatggcctcactgtgttaagggaaaccactccggacattttgctaccgcatctggattcaatagacccatgggacgctgccatgggtaatagttcttcgttctcagagactgccatgagaaggaaacatgacaagacaatccaggaaagagatcataccatacaaaatgggttacggcattggaattccatatataataaagtttccacccgtgtggtgaataatctgaactcctcgtacccagacctgtggtattatacactagctcacgtttatggcccattattctcatttgatgagatattatccgcgcaagaaacgagtttagtaataatcgcctctttggttcctcaagatgtcaaccctcaattgcgtgggcatttgaaaggtgcactgaatataggctgtgataaggagactgtagaagctgtcagaggattggctatactcgtatcccaatggtgtggtatccaatggaaatccggtgttgtaaaagtataa

SEQ ID NO: 1472 - DNA, 606 bp, Saccharomyces pastorianus
atggcgaatacgcacggcatacgatacattcgtttgaagcaggtcttcaatcgtgcattggatcaatcgatttcgaaattacagagctgggacaaagtgagctcatgcttcccgcaatacgtgaacaccaagcaaggcgctataaatgttgccaactgtcagcgacagttgacggaattctggacggagttatgccaaagggagttcaaagagatcatagaagaaagggacgtggagcagaaactgaatgagttggacgagctaatcgcggaagccaaggaccgttacatgggaggtggcctcaatgatggagacgagaggcccgcaatcgacgaactttccagcaaggaacttgtggaatgccacgtctacagccagcggatacacgccgtgcaagagatagacgaacggctggcgaaggtgaacgagatgaacgatcagttagctcgggaattggacgacctagaagcacaagtggatgcggaaaaacaggagatcaacgagatgtatgacgagtatttgggctctcacacggaccagccagtgaatggactgctgctgcaaagcctgagcgatatggttttggagttgaaggaaaactactag

SEQ ID NO: 1473 - DNA, 744 bp, Saccharomyces pastorianus
atgctgcattctgcgaggagacatttgttgtgcaggccacgtctattgtggcagagcggtctcgggactgctcgtttccagtcttcgctgcgagcaccggccaacgagcccttggcagaggaccaggtcgacgaatggctcgaggccattaacgagctgaagactgaattctcttcaaaggactacctgccggaaacttcgctggcgcccccaggccaatccaagatagacctcttgcatggcccgcacacagaggccaagaccaggcccaccacggagcagctggagcagtgggaggcgttgaagtccgtgcccatccctccacgcaaggacccgacgctggaccacatcaccaacatgatcatgcgccacggaaagaaggagaaagcgcagtccatgctgtctaaggcgttgtacctggtgtactgccagacccggcaggatccgatccaggctctggaaagggcgctggacgacttggcccctctcatgctcaccaagacttttaacacgggtgtggccaaggcctcggtcatccccgtgccgttgaacaaaagacagagaaacagaattgcttggaactggatcgtgcagagcgccaaccagcgggtgtccagcgactttgccgtgcgtctgggcgaagagctcgtcgccatctccaagggcacctcctctgccttcgacaagagggaccagattcacaaaaccgccatcgctcacagagcatacatccaactgaagtaa

SEQ ID NO: 1474 - DNA, 837 bp, Saccharomyces pastorianus
atgaatgctaatactaccacctcggcgatcgggtttgccagtcctttcgagaagctgtcgttcttcccgcactcgcccaacctgatactcgcacatctgcacgagatcatcttcagcttcatcttttaccaattcgccttctcagtcgtcgcaccgttcttgaacagggtgatcttccgcaagcattacaccacgatccatgacccgttattgaaagttgatttcgacgtccacaccgtgtcgatgattcaggctgccatcacgaacaccgtcctgctgcccaccctcgccacgccgatgcactacaatgtcgtcacctacgcggactcgtacagctcaatggtctcctcgctaagcgtaggctactttctttgggacctgaccatgtgcatgcgtcatttcaagctttacgggctcgaattcaccggccacgcccttggatccacgtacgtgtttctgttgtccttgaggccgttctgccagcccttcatcggcaggttcctcatctacgaggcctccacccccttcgtcaatatgaactggtttatcgtgcagtgtaacgcgaagagcaagaactccattccgctgtggttcaacgtcgtcaacggcttcctgctcatggccgtgttcttcttggtcagaatctgctggggcactctcgcatccgccctcttgttcaagcagatgtggaatgtcagagatgagttgcctaaagtctccgccgccataatgatgtcgctgaacatttttatgaactttctgaacgtcctgtggttcaggaaaatgctcaggttagtcaagaaacttacaaagtctacctcgtctaagctcgactga

SEQ ID NO: 1475 - DNA, 1362 bp, Saccharomyces pastorianus
atgtttgatctcaagacaattattgaccgtcctaatattccgtggaaactaatcatttctgcgttttccatcgcccaattctctttcgaatcttacttaacctacagacaataccaaaagctatctgaaacaaagctacctcctgttctggaagacgaaatcgacaatgaaactttccacaaatccaggaactactctcgggccaaggccaagttctccatcttcagcgatgtctacaacctggcccaaaaactagtcttcatcaaatacaatttcttccctaaaatctggcacatggccgttaatttgtcaaatgcgatcctgccggttaaattccacatggtctccaccgttgcacaaagtttgtgtttcttgggtcttttatctagtttgtccaccttggttgatttgccactatcttactacactcacttcgtcctggaagaaaaattcggtttcaataaattgaccttcaaattatggatcgccgacatgttcaagagtctttctttggcttacgccatcggcggtcccatcctttatctgttcctgaagatttttgataaattccccactgatttcctttggtacattatgatcttcttatttgtcgtacaggtactagccatgacaatcatcccagttttcatcatgcccttgttcaataagttcactcccttggaagaaggcgaattgaagaaatctatcgagaatttggctgacagagttggcttccccttagaccagattttcgtaattgacggatccaagagatcttctcattcaaacgcatatttcacagggttacctttcaccagcaagagaatcgtattgtttgacactctagttaacagtaattctactgacgagattacagctgttttggcccatgaaatcggtcactggcaaaaaaaccacatcgtgaatatggtcatctttagccaattgcacactttccttattttcacacttttcaccagcgtctacagaaactcttcattttacgacacctttggctttttcacagagaggatgactggtggtttcattgacccggtcatcactaaggaatttcctattatcattggatttatgctatttaatgatttgttaactccactagaatgtgccatgcagttcgtaatgagtttgatttctagaactcatgaatatcaagctgacgcttacgccaaaaaattgggctacaagcaaaacctatgtagagccttgattgacttacagatcaaaaacctctctaccatgaatgtggatccactgtattcaagctaccattattctcacccaactctagctgaaagattgactgctttagattacgttagcgaaaagaaaaagaactga

SEQ ID NO: 1476 - DNA, 2196 bp, Saccharomyces pastorianus
atggaaaaaattcctaccctgtaccctaccggacaagagttcgaaaacccaatagactatctttctaaccctcacattaagaggctcggcatacggtatggtatgatcaagatcataccaccgggggacttccgtcccccggtgtcaatagacgtgcagaacttcacgtttcagccaagaatccaaaatctggaaaatctagacctgataaataggtgcaggctatttttcatgaagcagctaaataattttaatagatctgttaaggatgcaacgaaaagcattcttaaaactccttacgccgtggtggaatgttcggatcctgctcacccagcggaaaagcttcaaaaaaaaatctacttttatgacatcttcgctgaattaataaaaactaatccggcgctcactgacacttcgcagtcttccagaaaagggctgagattcatagggatttcccaaatcagagaaaacactagtctttggaggacgatctctaaaaatctcaaagtgccaaccggtttgttgaaacacgtttttgaaaaatacattgcttcgtactatatatttcttcattcgttgaatgagaatgttcacacagcactgcataatgatcaatatccgaagtctctgctaagtgacgacgaggacggctttgaccttgattctgattctgattctgggtccggttcagaagaagaggaggaggacgacgaggcttgcatcgtatgccacaggacgaacaatccaaaaaggacgatcttgtgtgattcgtgcgacaagcctttccatatctactgtttgacaccgcctttggaacgcgtgcctcccggtgattggatttgtaatacttgtattgtcggcaatgggtattacggtttcacgcaggattcgcacgactattcactaccagaattccaagattactgtaaccatcaaaacgccaagctgctatctaaaagaacgttgtcaattgatgagctggaagagatgttctggaatttggtcaccgaagaccatcgcaacggattaacgacagttaaatacggtgctgacatacacaacgaatctcctggacaaatcactggattccccacgagagcatttatacccaaggatctgagtgagaacgaacgagaggaatatgtcaagtattgcgatcatcccatgaatctgacaaatttacccatggttcataattcgctattgccactgtttgaaagaaacatttccggcatgaccattccatggatttacatcggatcattgttctccacgttttgttggcacatggaagaccaatatactctaagcgccaattatcagcatcaaggcgaccctaaagtctggtacagtattcccgaatccggctgcgctaaatttaatgacctactaaatgacctatcacctgacttattcatcaaacaacccgatttattgcatcaactagttactttaatatccccctacgatccaaacttcaagaagttcggcattcccgtgtataaagccattcaaaaacctaacgagtacattataacgttcccaaaatgttaccatgccgggtttaacacggggttcaactttaatgaagctgtgaattttactacagatttttggctaccttatggatttggtgctattacggattacaagtcaacccaaaaaccatgtgtctttgatatgtttgatttgatgatcaatattttgaataaatacaacaacggcactttatcctttaatgacgcctttgctagacaatgctactcctcattgatcgtcttttataataaggaattaaaacgcatacgaagaattcaagccattgtgccacggacgcaccttctgaccttcaattccggtccggaagatgatgatgacgaatatgatgtgttctgttctcaatgtaaaaccatatgttcagtggcctttgtattgcatgcgctcagtgaccccgaatctttaagaacacataagaggcacaagaaaaaccatttgagtattaagcagtggaatgaaatttccacgacaaatcgtaatttaagtgttttgtgcactcaggatttcttgaaaacgctccaaaactcaaacagtagtggtgacgaagaatcgtgcgacaacgatgaattgtacttaaccaaatcattggaagacattgaaactttaataaagcaagttggcgtaaagctagataaataa

SEQ ID NO: 1477 - DNA, 1536 bp, Saccharomyces pastorianus
atggttttgcctagactatatactgctacatcccgtgctgccttcaaagcggccaaacaatctgccccactcttatccacttcctggaaaagatgcatggcctcagctgctcaatctaccccaatcaccggtaaggttaccgctgtcattggtgccattgtcgatgttcattttgaacaatccgacttacccgctattttgaacgctttggaaatcaagactcctcaaggtaagctggttctggaagtcgcccaacatttgggtgaaaacaccgtcagaaccattgccatggatggtaccgaaggtttggttcgtggtgaaaaagtccttgacactggtggccctatttccgtcccagtcgggagagaaactttgggtagaatcatcaacgttattggtgaacccattgacgaaagaggtcctatcaagtccaagctaagaaagccaatccatgctgaccctccatctttcgccgaacaatctacgtccgccgaagtcctggaaacaggtatcaaggtcgtcgatctgttggctccttacgccagaggtggtaagattggtcttttcggtggtgccggtgtcggtaagacagttttcatccaagaattgattaacaatatcgctaaggcccatggtgggttttccgtcttcaccggtgtcggtgaaagaacaagagaaggtaatgatttgtaccgtgaaatgaaagaaaccggtgtcattaacctggaaggtgagtccaaggtcgccttggttttcggtcaaatgaacgaacctccaggtgccagagccagagtcgccttaaccggtttgaccattgctgaatatttcagagacgaagaaggtcaagatgtcttgttgtttattgacaatatctttagattcacccaagccggttctgaagtttctgccctattgggtcgtattccatccgccgttggttatcaaccaactttggccaccgatatgggtcttctacaagaaagaatcacgaccacgaagaagggttccgttacttctgtccaagccgtttacgtgccagccgatgatttaacagatcctgcccctgctactacttttgcccatttggacgctactaccgtcttgtccagaggtatttcagaattgggtatctaccctgcagtggatccattagattctaaatcaagattattggatgctgccgtcgttggtcaagaacattatgacgttgcctctaaggtccaagaaactctacaaacctataaatcgttacaagatattattgctattttgggtatggatgaattgtctgaacaagataaattgactgtcgagagagcaagaaagattcaaagattcttatctcaaccattcgccgtcgccgaggtctttaccggtatcccaggtaaattagtcagattaaaggataccgtcgcatcatttaaagccgttttggaaggtaaatatgataatataccggaacatgctttctatatggttggtggtattgaagatgttgttgctaaagctgaaaagttagccgctgaagctaactag

SEQ ID NO: 1478 - DNA, 678 bp, Saccharomyces pastorianus
atgtctgacaccgaagctccagttgaagttcaagaagatttcgaagttgttgaagaattcaccccagtagttttggctactccaattccagaagaagtccaacaagctcaaaccgagattaagttgttcaacaaatggtctttcgaagaagtcgaagttaaggatgcttctttggttgactacgtccaagttagacaaccaatctttgttgctcacaccgctggtcgttacgccaacaagagattcagaaaggctcaatgtccaatcgtcgaaagattgactaactccttgatgatgaacggtagaaacaacggtaagaaattaaaggctgttagaatcatcaagcacactttggacatcatcaatgtcttgactgaccaaaacccaatccaagttgttgttgatgctatcaccaacactggtccaagagaagacaccaccagagtcggtggtggtggtgctgccagacgtcaagctgtcgatgtttctccattgagaagagttaaccaagctatttctttgttgaccatcggtgctagagaggccgctttcagaaacatcaagacgattgctgaaactttggccgaagaattgatcaatgctgctaagggttcttctacttcttacgctatcaagaagaaggatgaattggaacgtgttgccaagtctaaccgttaa

SEQ ID NO: 1479 - DNA, 1218 bp, Saccharomyces pastorianus
atgagtttagaggatacgttagcgaacatgtcattatatgacgccaaaaaatatttccgtaaggctcaaaatgttgtgtttaattacactgagatggagggtaaagtccgtgaagcgaccaataacgagccttggggcgcctcttctactttaatggaccagatttcccagggtacttataacttcagagaaagagaagaaattttgtccatgatctttagaaggtttaccgaaaaggcaggtagcgaatggagacagatttataaagctttacagttacttgactatcttattaaacacggctcagaaaggtttattgacgatactagaagtagcatcaacttgatcaagattttggagtccttccactatacagattctcaaggaagagatcaaggtatcaatgtcagaactagagttaaagccctcattgaattattaagcgacgatagtaagatacgcgcggaaagaaagaaggcaagagaaacagcaaagaagtacaagggtgttgctggaggatctgttgccgctgatagcagcttaaattccaaggccggtttcaattctacgaaagtacacggtattagcgtcagcgcggattttgatagtgatgatgaagataatggagagaactcttccagaggaaacggttacagagatagtgggtcaagggataccaccactcctcagtcggaaacacaagaaccggaagattttgtcgactttttctccaacggatcgtcacaagtacccaaagatctcatacaagaaaataacgaaggtgaaggagacgatgatgacgaattttcagaatttcaaagcgctgttcccgtttccaacacttcgttcaatttgttaaactccaacccaattgggaccaccgccacttccgctaattcaacatctttctacaacaattctactgtcagtcagagcaatgttactcctgccattgccgctgagcctaaaaaagcagaccctttcagcttgttgttttcaacagccaaggcatcctcagaagcacctattacccctaaagtatcccaaactaatgcctcctcctcaaaccccctatctaacaatacgacagcattaaatatgaacgagaacgatgatgatgatgaattcggtgaaatgcatggtggagctgtccaacaagaacaaaacactaccaataagggcacttcttctaacgaaatcgatttgctttctttttaa

SEQ ID NO: 1480 - DNA, 1008 bp, Saccharomyces pastorianus
atggacgaagaccttttttatgatagattgcaccaacggtgcccgcgagagtacttactgaaggagttagagacgaacgagcacgctgttattctaaatgtttcgagattcatcaacgaaatggaacgagtgcaagctacaaacgcatattactgcaagacgataatcaaagctcttttggacaatgactggatttttagcaaagctctcacaatggcagacgaagacgaagacggtcccgaaatatccgattatctctatgagaagtacatcgaacttctgagcacgggcaaaccagacccaacgatgaaagagatcataaggtacagatttgatggaaccgtgaagatcagcatcgaagaaacgccgaatttgatcagtgcggccagtaccacggggtttagaacgtgggaagctgcgctatacatgggagacttcctcatgcacgagccgctactagaatttgtgaatgaagacgacaagaagaagttgaacgttctcgagatcggtgccggaacaggcattgtaagtctcgttctcttgcggaagtattgcgaatacgtgagcaagatgtacgtaacggacggcgactcggacctggtggagacgcagcttagaaggaatttcgagttgaacaatgcctggcgtgagcaggggccagacatcagactgcaaagactatggtggggtagcgacagagtccccgacgaactggacctggtggtcgcagcagacgttacatacgactcgacgatcttccctgaactgtgccagtgcttggccgaatgccttgccacaagccaatgtaaaatgtgcttactgtccgcgacgatcagatgcgactccaccgacgaagagtttgcccgagagtgccataaagtcgggttgaagtacaccgtggtaacgagcaccgaggatgataagaacagcgaggcccggatggtggaaaacctgctctttaaacctttgattgcgcccattcgaatttacaaggtagtgagacaatag

SEQ ID NO: 1481 - DNA, 1920 bp, Saccharomyces pastorianus
atgatatctagaacagtaggtgagtcgattccacccaacacgaagcacgccgtatcggtgtgtttaccgacatgggaagccacagtgggctatgaagaaggtgagagcgacatcataaactcgcttactaccggctacccaagattcttcgttcacaagtcaatcaagaaactgtgcgaagttttgtgtgctaagtattctatggaaaatgagacttgcctttgtttcccgtcttataagattgctaataggtgcagagagttcattaaagtgaaaacaggtatttcaacaaaagtacgcatcttacagctgtgcacacctaagcccatgaaccaagaggagaaactttggaggagggaatgcaagattacggtggtatttgtggaccaggagatctttccggtaatgaaacagtactggcagcatactggtgaaattgtatccagtagaatggccgaatacatcctacacgagttggaagtcaaggaaagcttgaagagtacgggcacagctagcaatattagaaaatacgcggctgaagatgagagcagagtaaacgaagaatacgttgaaacgagatttggtagaaatttgaatttcctggcagctgataaagctaagtttctaataaggaaaagaatcgctacaaaagttgttgaaaaactagattcagaaagcgtgtcggacttgttctcatttgaacattataacgaaggcaacggtcccttcaatgccgggagtggagagccgttcggcgaaagccaattgaactctgacgttcctgctgaaacattcaactccacgggagagagcagtacaagcagtacttttgaagacatatctagggacgacttaaactatcacgtcaatccgaacacggatgtttacttgttccctagtgggatggcgtccattttcactgcccacaggctgctgttgaaccttgatgctaaccgcttatcaagatcctctaataggcaggacaagctgattgggtatggcccccccttcaaaaagacggttatgtttggattcccatacacagatacgttgagtattcttcgaaaattcaatcacacgcacttcttgggacagggtgattcgacatcaatggacgttttgaaaaagattttacattctggcgaacaaatactggcagtgtttattgaggcgccatcaaacccgctattaaaaatgggagatttacaagaactgaaaagactctcggatctatattcgttttatatagtggtcgatgaaactgttggcgggtttgtcaatatcgacgtattgccctttgctgacattgtttgtagttctttgaccaagatcttcagtggtgattcgaatgttattgcaggatccttagtgctgaaccctaggggcaagatttatgaatttgctagaaagtttatgaaaactgaagacggatacgaagattgtctatggtgtgaagatgccttatgtttggaaagaaattcaagagattttgtagaacggacaatcaaagtcaatacgaacactgatgtattgttaacgaaggtattgctaccacaagtgggaaagttgttcaagaaaatctactaccctagtttaacatcagaggaaaccaagaagaattatgacaacgttatgtctacaaaagatggtggttatggtggcttgttttcattgacttttttcaatatggaggaggcaaaaaagtttttcaacaatctggaactatgtaaaggaccgtctttgggtacgaactttacgttggcatgcccgtatgccattatagcacattaccaggaattggacgaaatagcccaatatggagttgaaaaaaatctcgtaagagtcagtgtaggcttagaaaatagcgatattttatgtaaggtctttcaacaagctattgataaagctttggaagaatga

SEQ ID NO: 1482 - DNA, 3147 bp, Saccharomyces pastorianus
atggatattacagaattactacagtgcttcgcctgtactttggaccaaaacgctgccataagaaccaatgcggaaactcaccttaaaaacgcaagtaagacaccagggtttttaggtgcttgtttagatatcatcgccgccgatgaggttccagaaaatatcaagctatcagcatctctatacttcaaaaacaagatcacatacggttggtgcactaatgagagacacggctcaaatgaattattagattcacaagttgatttggacgaaaaaccagtcgtgaaggatatgttgatcaaaacaatggtcagcgtctccaaaacttctccacgttgtattagagtgctaaaatccgcccttactgtgatcatctcagaagattatcccagcaaaaaatgggatgatctattgccaagctcattagaattgctctcaaatgaagacattgctgtaacatatgttgggcttctatgtcttgctgagatattcaggacgtataggtggaagagtaatgatgaaagacagggcttagaagagttgattttaaattatttccccgctttattaaattacggctcaaatactctgttccaagacggcaaatacatgaataacgagcaaattggtgaattggtgaaactgattgttaagatctataaatttgtttcatatcacgaccttccatttaccttacagcgcccagaatcgtttactccatgggcatgtttctttgttagtattattcagcaaccactacctcaagaaattttggtcatatccgatcttgaagtaagaagcaagaatccttgggttaaatgtaaaaagtgggctctagcaaatctttacagacttttccaaagatacgcatcaacttcagtaacaagaaaattccaatatgatgaatttaaacaactgtactgtgaccaatttttgactcagttcttacaagtcatcttcaagcaaattgaagaatgggggactggccaattgtggctaagtgatgaatgtctatactatatattgaacttcatcgaacagtgtattgtgcaaaaggctacttggaaactcgttggtccacattataatgtgattcttgaacacgttatttttcctttattgaagcctagtgctgatgctttggagacttttgaaaatgatcctcaagaatatatcaatcggaatatggacttttgggatgtcggttactctccagatttagccgcacttgctttgttaacaacatgtgtcacaaaacgtggaaaaatcaccttacagccaactttagagtttatggtcacaaccttacaaaattctattggtgactacagcaatatttccttagaacatgccttgcaaattgagtcatgtttgagaatattctctagcattattgaccgtttgatcaccaaggactctccattcgtcaatgaaatggaaaagtttgtattgacgtttgttttgccatttttcaaatctcaatatggattcctacaaagccgtgtttgcgaaatttgttcgaagttgggttcaatggattttaaggacccgataataatttccaccatttatgagggcgtgatgaactgtttaaataactctaacggttcattgcctgtagaattaatggcagcattggcattgcaaacgtttattagcgatgatcaattcaatcaagagctttccagacacgttgtgcctacaatgcagaaactactaagcttatccaacgatttcgagtctgacgtaatttctggcgttatgcaagattttgtggaacagtttgccgagcaattgcaacctttcggtgttgaattaatgaatactctggttcagcaatttttgaaattggcaattgatctacatgaagcctcgaatatagatccagattcattcgcaagtgtcgaggatgttcctgatgagtctgagaagcaaatggcagcgttgggtatattatcaacaacgatctctattttgttgtcttttgagaactcgcctgaaattttgaaaaattcggagcaatcattttatccagctgccgaatttattctgaaaaatgatatagaagatttctatcgtgaatgttgtgaatttgtagaaaactctacatttttattaagagacattacacccattagctggaaaattttagagctgattggggaatgtaataggaaaccaggtagtatggtgtcttattacttaagcgacttcatgttagcgcttaacaatatgttgatttatggtaaagacgaattgaagaagaatgaattttacactaagattatattcgagatttaccaaaaggctgtcgttgctgaagataatgctctagatgacttaagagtagtctttgacttatctcaagaattagttcttgcactaggtgacaatttaccgcaacaatatagggaatgcttattagaagatgttgtgaaggctatcttaacagagaaaaacgagttgaaaactaacattgtttttagcgtaaccgcttttaatgtcgtaatttcaaatctgataacagagcctttaatcacgttacagtatttgagacagcaaagatgtcttgaaattttctttgagacatggattacaggctacattccgaattataaaagatgttatgatattaagttatcggtccttgcgcttttgaaaattattctgaatttacaaagtagcgattactccatgttgaacttggaaaacctagttccacaattggggacccttgtgactcagttagcttcaagacttccagcagcgttgagacaattagctgatcaacgcaaagaattttcatcatcaggtttcggaggtgacaccaagtgggatgaagcattccttgacgttggtgatgaggatgacgacgaggatgaaagtgacttgaccgagaagtatttagagttgataaaaaacagatcagactccttggattttgtagacggctatgacgcgaaggaaacgtttgatgacttagaagaggacccattgacaggatcaatattggatactgttgacgtatacaaggttttcaaggagtccatcataggcctacaacatgtcgacagtaatagatatcaaggtataatgggtctcctgacgccagctgatcaagaacttttcatggggattatgaatgcctag

SEQ ID NO: 1483 - DNA, 630 bp, Saccharomyces pastorianus
atggcggaagatgaaagaatgtacatctcctataataatattcacaaactttgccaaaaagtcgcaaagcatattttagcaagaaatgaaaggcctgatattattatcgccattactggtggtggtatgattcctgcgagaattattagatcgtttttgaaagttaagggtcaaaagaatattccgatccaagctatcggtttatctttgtatgaggatttagggttgaaaaacagtgtagaaactatcggcaaagaggttattagaactcaatggctagattttagtgctttgaatcaacatttcgattccctgattggtaagaaaatcttaattgttgatgaagttgacgacactcgaactactcttcattacgctttgtcagaactggaaaaagaagtcgttgaacagcaaaatcttttgaatagaataaacgaggatacggttttttctatatttgttctacataataaggataagcccaagaaagccgacttacctgactctatgattaattctgggcgttatattgccgcgcaaactgtccctgatatgtggttatgttatccttgggatgctgaagacattgaagaacataccgaactggctaaagctcaagggaatgattga

SEQ ID NO: 1484 - DNA, 2127 bp, Saccharomyces pastorianus
atgagtaaaaaactatcattggaagaaaggctttctctggctacgaagaagggaagaaaaaagagcaagagatcaacatcgaacttatcatcaccctcacctgcagtaccctcaagcagtgaacaagaaatgaatggcgcgtctttcgatgatcctactgccggtgtggaatcaaacgatgatgctgagaacggggacgatacagtacgattgctaagcacggaagagagcggtacacataaactaataacaactgcagtcgaaagtacagcgcatatcgatccggataaagctggaaaatctgaaggcactataataccattgcctcaatggctacctaagaattttctagacctcagtgttgaggaattggtcaaaaaaataagcccggaataccaaaggcttaacgagcagattgacgacctaacaaacgaactcaacaagaaaccccaaatcgagactagggactctagtttctttaaattggttaaagagaaagacgatttgatagaccaattgaaaaaagaaggcacaaaattagcagagacagaattgaggcaatctaatcaaatcaaagctttgagagcgaatgtaaaagatttagagtatgatgtatccacactaactgaggattcggcacagaatgtagacaattttaacgagctgcaatcattgtatcataacttacaaggacaattggctgaagccacaaacaaacgaaaggacactgataaacaaaaagagttactagaaacattcgagaaaaagattgaagaaaaggatggtttgattaagagtttgcaacaatctttagatgaagtagaaatattgctcgagaaggagagaactgaatttcaaatggaaaagaaagcattacaagaagcaacaatagatcaggtcacagcactggagacaaaactagaaaaactaagaatagagctggataattccaatcagatttcaaatgcgaaatcaaatagggacggtggcgccgataacgatgaaaacagctccgaagtaaaagaacatacattgtcccaatataatctgttgaaagaacagctggaatcaagtaaggccaactggaatagtattgaatatgctctgaatattaaaattgtggatttggagaaccgccttacatctacaaaaaaggaaaaaaaaagatttgaagaagcttatcaaaccgccctggattcatcagaaactttaagcgagcaattggaaaaggaaagagataatcatctaaacgccgtttctcaagtcaaggagctggagagacagatagagactttaaaattatcattacagagtgtaaatgatgattacaatttattgaagaagaaatatgatattcaaagagctcagttagagaaaaatgacgatgattcaaaaccgcatcaagagaacagtgttgggaaagttgtcgaaaaattactttcagaatcaactagtagcttgaattccatgaacggaaatattgaagacgagtggattttgcctcaagaaaactccatgctgtcattatcaatctcaaaattggaagatttagaagacgattcatctataaaacccataggagatgggccgcacgacaccctaggtagtgaagaaacacaacactttagtaggaaaaatgtagattttagcatcgacgatatcccagaggaagcagctgatttgcaagcaatccaggaaggaaaatcgatgaaatcattaaacaatacatcaataccgtacagaagagcgagcgctcaattatcgaattctaatggccatataaatgctcatttggtgaataagttaagtacggaattaagaagactggaaggagaactatcaacctcaaaggaatcatacaataacttgttaagtgaaaaggcaaaggcaaacgacgagatattgaggctacttgaggaaaatgataaatttgatgaagtcaataagcaaaaagatgagcttttgcgaaaagtagaacaaatacaaagtaaattagagacctctttacaattgttgggtgaaaagaccgaacaagtggaagaattagaaaatgatgtgtctgacttaaaggaaatgatgcatgagcaagttcaacaaatggttgaaatacaagagaagatgagatga

SEQ ID NO: 1485 - DNA, 720 bp, Saccharomyces pastorianus
atggatacagaaaaggatctgctggatgcgtacataaagaacttggagaaccaaatcggaaacaaacggtattttttggagcaagctcgaagcgccatcgatgagatcacgaataggcatatagaaccagaggggaaacctactgacccaggaatcttcgcagagttactgaaaaagcctatgttattaccagagagagcagacccaatcggcttcagcttggtgtcgaatttcttgtcatcgaggatccaaacttccagtgaatggctttcaataatgggcgatcaatcagtcgataaaaaggcaatggtgtcgttgcaaaaaaacactaacagtgacttgaaagagctgctggtattactacggcatcagtttgccaatctggataacagaaagcaaaacctgactcatctaaagacatcaaaagtaagaaatgaggagctttggggatcacttaaagacttcgtggtgagctttctagcaccgaatatggacaacaatggggagtctatacatatcctaacgagagaaactacatttatattaaaaaggctgattgtgcatgattcaactgtaacgatgaatgatttttcatccaagactatgccaatatacaggcttttactcagggcaaatatagttacagtaactcaaagccctaccaactcagatgttaaatacattaagctaatagactttaatgggaccggcctgacctaa

SEQ ID NO: 1486 - DNA, 264 bp, Saccharomyces pastorianus
atgtcttcattatcaacatccgatttggcttctcttgatgatacctctaaaaaggaaattgccactttcctagagggtgagaactctaagcaaaaagttcaaatgtccatccatcaattcactaatacctgttttaagaaatgcgttggctctgtcaataatccagatttaagttctcaagaagaacagtgtctggctaactgtgtgaacaggtttttagataccaatatcaggatcgtcaatgggttgcaaaacacccgttaa

SEQ ID NO: 1487 - DNA, 4329 bp, Saccharomyces pastorianus
atgactgcttcaaatatcttgacactcccacaattgctggcgcaatattcctcgagtgtttcccaaaataaagtgttttacactacccccacaaaaaacagtcgttcaaccttcaaagggcttgaatctgctgcaatagatgctactcatctgttgaataatcacgatccattcagtggcatcaagactcaactttctaaggacactttaactactgtctttacagacgaaactactttggtcaaatccattcaccatttatattctctacctaaccaatttccactcgtgatcactgtggatttgaacttgcaagattattctgtgattcctgcattaaaagatctctctttccccatcttgttgtcgtctgatttgcaaactgcaatctcaaacacagctgcctcatacaagattgctaccggctccctaactgccgtttttcactttattaacttggcaaagattggtacgagtaccgctattggacaaaatatcgatgttccaactttagagattgccaatgaggaaactgaagtaccaagctcagaagaggttttgccattaacaaattttgaactggtaaaaggcatagactcacctagtactgctatcgttaatctgtcaccatatgatgaagaagtcagcaatgtattaccttcaaatgcagctttgatcaagatcaaagcatacagaccatggaatttttccgacttcttggaaatattgccatcttccatcaccaagattgctgttttacaaggtgcctctaccaaatcgcaatcaaatgaatttcaaccattacttttagattttttcagtaacttcaatgaattggtatctaggagtatcgaccaggtggtactaactaatgttggtcttgtagacgattaccaaagtgttatcaatactgtcatatcgaatattaacaagaaagaacctgatgccaatctgttcttgggtaaacccaatgaaaacgcggaggaccaagctgaaatcactcagttaatatcctccgtcaataaggtgttaaatttagaggacgcttacaccaaggtactaaaacagttatttttttcaaatctgcaaattttgaaccaattttcaagtgagacaattgaaccaagcaatccagaatttggtttcggacgctttttgaagcaagaaaccaaacgtgaagaactggtcaatttagcaaagagctctctcgagccaagcctatacttttctgaagatgctaacaaaattgttcagttgttatctaaatgggtgtcatttcatgatcaggatcttgatgaagctcaattacaagaagcaaactcgataggtcatgaaatatttgaacttttacaatccaaccaagattcctccactgctttaaaattcttaaagattgcccctacaagtgattcttttatttttaaatcaagttggttaattggttcagatgcttggtcttacgatttgggccattcaggtattcaacaagttctgtcatctcgtaggaacattaatgtcttattgatcgattcagagccatatgaccacagaaagcagaaccaagatagaaagaaggatgtcgggctatacgccatgaattattatagtgcttatgttgcttccgttgccgtttatgcttcgtacacacaactattgactgctattatcgaggcgtctaaatataatggtccttccattgtcttggcctatttaccatacagttcagaaaacgacactcccctagaggtcttaaaggaaaccaaaaccgctgtcgaatctggctactggccgttgtatagattcaatccaatccatgacgatccatcatctgataaagaggcattcagcttggattcctcagttattaggaagcaattacaagatttcttggatcgtgaaaataaattaactctattaaccaaaaaggatccttctttatcaagaaacctaaagcattctgctggcaatgcattaacgagaaaacaagaaaagagaagcaaggctgcctttgatcaattattggaaggcttgtcaggaccaccattacatgtctattatgcctcagatggtggcaatgctgcaaccttggcaaagagattgggagcaagagcctatgcaagagggttgaaggctaccgtactatccatggatgacgttattctagaggaattacctggcgaagaaaacgtagtttttgttacttctactgcagggcaaggtgaatttccacaggacggtaaatctttctgggaagctctcaagaatgacaccactctggatttagctactttaaacgttgctgttttcgggttgggtgattctgaatactggccacgtaaagaagataagcattatttcaacaagccttcgcaagatttgttcaagcgcttagagctgttgagcgccaagaccttgattcctttaggtctaggtgatgatcaggatgcagatggtttccaaaccgcttattctgaatgggaacctaaattatgggaagctcttggtgtttctggtgctgctgttgaagatgaaccaaaacccgttaccaacgaagatattaaaagagattccgatttcttgagaggtaccatcattgaaaatttaaaagatgaatcctcgggtggtgttactcattctaatgaacaattgatgaagttccacggtatctatacgcaagacgatcgtgacataagagacgtgcgtaagtctcaaggcttggaaccatactatatgttcatggcaagagctcgtctaccaggtggtaaaactactgcccaccaatggcttgctttagatcatttgtctgacacctctggtaatggtactttgaaattgactacaagagctaccttccaaattcatggtgttttgaagaaaaacttaaaacataccttgagaggaatgaatgccgtcttaatggacactttagcagctgcgggtgatgtaaacagaaacgtcatggtttcagctttgccaaccaatgctaaggttcaccaacaaatcgccgatatggggaaattgatttctgattatttcttgccaaagaccacagcctatcatgaagtttggttagaaggtccagaagagcaagatgaagattcgtcatggccatccatctttgaaaaaagaaaagatggcccaagaaagaagaagactttggttagtggtaacgctttggttgacattgaaccaatatatggtccaacttatttgccaagaaagtttaaattcaacatcgctgttcctccttacaacgatgtcgatgtcttatctattgatgtcggtttaattgctatagttaacccagaaactcaaatcgtggacggttataatgtctttgttggtggtggtatgggtaccacacataacaataagaaaacttatccaaggttaggctcttgtttaggttatgtcaaaactgaagacatcattcctccattggaaggtattgttattgtgcagagagatcatggtgatcgtaaggaccgtaaacatgctcgtttaaagtatactgtagacgatatgggtgttgaaggtttcaaacaaagagtagaagaatattggggtaagaaattcgaaaccgaaagaccttttgaattcaagtctaacatcgattactatggatgggtcaaagatgaaactggattaaaccacttcacagcatttattgaaaatggtagagttgaagataccccagaccttccacaaaagacaggtataaggaaagttgctgagtacatgcttaagaccaattctggtcacttcaggttgactggtaatcaacatttggttgtctctaatattacagacgaacatattgatgaaatcaaatccattttgaagacttacaaattggacaacactgatttcagtgggttaagattatcctcatcttcctgtgttggtttaccaacctgtggtttagcatttgctgaatctgaacgttttcttcctgatatcattactcagttggaggactgcttagaagaatacgggttacgtcacgattctattatcatgaggatgactggttgtccaaacggttgttctcgtccatggttaggtgaattagcccttattggtaaggccccacatacttataacttgatgcttggtggtggttatcttggtcaaagattaaacaaattatacaaggccaacttgaaggacgaagaaatcgttgatttcatcaaaccattatttaaaagatacgctttggaaagagaagaaggtgaacactttggtgatttctgtatcagagcaggcatcatcaaaccaactacagaaggtaaatacttccatgaggacgtctctgaagatgcctattag

SEQ ID NO: 1488 - DNA, 4755 bp, Saccharomyces pastorianus
atgtttgctagattgcatggtaagaaacaaaggccaatttcttccatcaattctcaaactccaagaaccagcaatactacgcacgcaaatagtatatccttatcatcaggaaatttgatagtaggctcaaataaaaacttgagggaaaaaggcgaccagtttaactctcaactgaggtcttctaataggaatataacttcagataacaaaaataatggcaattccactaacgacgatgatgattacaatgggatagaacaaccccatcgccatcagagcccaggactgaaaacaaggacacaccaagctgagttaggctatcacgagtccagattttcagacaatttggtaatgttaaacctaatcgaattcccagatataaaacctggcaatctagtagaactgaaaacctaccataaggatccatctccatcaaatcgagataagaaaatttattttatcgccaaggactttgaccaagaaaccaagagaagagcgaagacgtctaatgtttcggtactttcgggtcaattacaaactctattagatttaccttccagatctaaaatatggataaaattaaaaccgaacaaagtagacttacaagtagacgtggttgaattcaatattaaggactgtttattgaatagaggtgatatgtggtttttatcatctaaaatcgttgatacatgtgtttttatggaccaaaaactgacattcctagattctattagaggcacaatcaaggggatttatcgaaatggtaaaaaaattgtctctggatatattggtgaacaaacaagaataatcttcagatctgagtctgctaggctgatttttttgattcaaattacagatgaaatgtggaatttcgaagaaactggtgaacagttatttcaaaagatggtcaattcatttttccccaagatttttaaaaagtggaaagatatagatactcatcatactattacaatagcgtttgctatatcaatggatctatcggatacttcgttcagagacctaaaacccggtgagtctttgaaaaattcaaaggattattttagaatagttgtagatcaagtcagtattattcactgggttgatattatggaaactttaaggaaggaattcatggaaatcagaaaggatttgttgaacaaaaaaacggataaaggttacagcatagctaaggggagattttcccctgtaattaaatcaaactttcttgaactggttaacttcgccacaacaatcttaacagatccgttcaaacagttggatttaaggcataccactacacatgttatgattatttctccaggatctgggttatttgatgttgattatagtttgttgagactaactgggaagaagttactatctcttgaaatgacaatggatttaatttgtctttcaaaggctccactacacatcgtacctcttttcaggtatcgagattttgagaataaactccatcactgcgtaccactttggctaagtgtatttttttggaacgaccatgctaaaaagaataactcagaatggactccaaggtgtaaaatttatgaattacagatgatggggattacagaaaatgaacttatacaggaggttgacgtcgaatatttacaattcaataaaaaagtaaaatgtttatcagaatttatgaatgattatgatgaaaatgcatttcagctcaagattttacccgctgattcaaacaaaaaactgtctaataaatcagatttaaaattcgataccgtatttgaggacgagattgttgtaaaagagaaaaaacttcaggcaacaacaactactactcatggcaatacaaggtttatatggaaggcgcccaaatttgctattccggtaataaaggacgtacaaaaaccaaacgtaataccagatctgtcaataaaaacgatagagacttctccctacgatgaagcgaacactacaaatgatattattaacactcccactttttctaacaacgataatactgaaataaacgactcactggcctctgtaagatccgctgataaccaaaatacatctttagcgctggattcgctgaaagggctaagtaagagaaactcattaaaagattttactcaaagagttataacgaaattcatctctaatatggatgtaaacaaatgcaaagaatcaactcctgtaacaactaaagatggaatcagcaactcaaccatagataaaagcacgccagcactactttcttctgaaagtaagacaggtaatattagattacaaagtaaaagctttatgattgacagtaacatcaacaatcgcggtaatttgataatcaagaaaaacctctccatttttggagtgcctgataaggagaccataagtggctctccgtcttcatatttagaatcatcacataccaggacttcctccagattttctaccgtgtctgataaaaccccattcattacagagggacagaagtttaaatctgataattccaatgcttttagcctttcacagcgatttaggcatcgtataaatgaaacttgggtggacatcaaaagcccctcaattcctgtcagcaatgaatttgccaatgacttgttacctttacgctggaaagatgtatggccaaaatatgtggcgaaaaaatatagtaagtggagatccttcacaactccggcagaattaccgatcacaatttctgatttcccatcaaaggatgattttgaaaggaacttcatctttagaaatcattcagtcactttgaatagtgatcaggaacaatataatcaaacctacaaagatttactacgcgatatgatttatatgcgattactgactggtttccaaatctgtgttggtgaacaagtagaaaaaattgaactatctagggaaaacgacgaaagtgaaacggtggttaataaatatttggacttcaacaaatacaaaaccttcaagctttatctgatgattgactccgaaatacacagaataacatgtggatcgagtggtataattgatgtggaaaggtatctaagaaatgatgaggtaaacttgtttgatcaagttcccagttacattcctttagttaagacgagatatgaaaactcatttcgtgatgcaatgattgatcccttacatgtcaagagagaatctttgaattggaaccaaattgaccaagttctagcgggatatggcgactatttaatggataggaaatggcacggatttagagccaaatacgtggtgttaccaacagatatccctcctaacacttattctatggtcatcaatgataaaaatgaaaccttaaaccctgaagaaatcagagtagaaggattaaggaggttaattggttcaatcactagggcaagactaaggacggaaaaggaaaaacaagtaaagaaaacaaagagagaagaaattcaacccgaagttatgttctacacaggtccgctatacaactttattaacgagcaacagacatcattggaaagctccactataaatttcaaggattcaattttcgttaacgacaataatcttttgaataaaagtgttgaattatcgaagctagcgtaccaaatacaacgtggtgaaaatcgcataaccttagttaatagaaagtggcactggaaaaaacatgatagatgctttgtcggttcagagatggttaactggttaataagaaacttttctgatatagatactagagaagatgcaattagatacgggcaaaaaacgatgaaggagggactgtttgttcatgtcttgaataagcatagttttttggacgggcattacttttatcaattctcgcctgaatacaggatggacacaaacaggctcgagaaaatatcttcggatcgctctacgtcgtctgatccgaagcaaatactgagaaaagcatctaccggtagctcaaatgatccaggcgctataacaccattctctacagttgtacctgctataagtgcgtcaaacgcttccgttgctgacacaaatgaaccatcacgcccgatcttaatgttgagtaattctcttgttatagatgtcgatcccgccggcaaatcttccaagcaagaatcatgtactgtacactatgatagagttcataatcccgatcattgttttcatatcagattagagtggttaactacgacccctaaattgattgatgacttagtagggaactggtccaggctgtgtgaaaggtatggtttgaaaatgatcgaaataccttgggaagaactttgtacaatcccatctgttaatccattccactcttttgttgaaattaagctagctgtcaatccttgggaagatcctgagttcaaagatagagagctttttgctaaaagtaaattttattatcatgtttatcttctgaaggcatctggatttttattagataacagggcatccaagtttctacaaagccaagatatagaatttgatatcatgtattcatgggggaaaccgcagttcaagtacgttcaatatatccatcatactggcgcttacgttgcagaactacgagaaaatggttgcctctttttagcccctaacaatgtttatatttctagggtgaatccgggaaacataattgggaaaatccattcttcctcaagctctgcactagatgctcaaaaagtgatccttgatttcaaatcaacttgcttagattaccagaaactaagatcaattttcttggatgcaaaggaaacgtggattacaggaaagatcgtagaggaatag

SEQ ID NO: 1489 - DNA, 1080 bp, Saccharomyces pastorianus
atgtctactaaagttgttaatgttgccgttatcggtgccggtgtggtgggttcatctcttttggaccaattgttggctatgaagtctaccatcacttacaatttggtccttttggccgaagctgaacgttccttgatctctaaggacttttctccattgaacgtcggctctgactggaaatcggcattggccgctgccagcgacaagactttgccattggacgatttgattgctcatttaaagacttctcctaagccagtgattttagttgataacacttccagtgcttacattgctggtttctacaccaagtttgttgaaaacggtatttccattgctacaccaaacaagaaggctttttcctctgatttggctacctggaaggctcttttctccaataagccaaccaacggtttagtataccatgaagccaccgtcggtgctggtttacctattatcagctttttgagagaaatcgttcaaactggtgatgaggtagagaaaattgaaggtatcttttctggtactctatcttacatttttaacgaattctccactagcgaagctaacgacgtcaaattttctgatgttgtcaaggttgctaagaaatcaggttacaccgaaccagatccaagagacgatttgaacggtttggacgttgctagaaaggtcacaattgtcggtagaatatctggcgtcgaagttgaatccccaacttctttcccagttcaatctttgattcctaaaccattagattctgttaaatctgtcgacgaatttatggaaaggttatccgattatgacgatgatttgactcaattgaagaaagaagccgcagctgaagacaaagtattgagatttattggtaaagttgatgtcgccaccaaatctgtctctgttggaattgaaaaatacgattactctcatccatttgcatcattgaagggttctgataatgttatttccatcaagactaagcgttacactaatccagtcgtcattcaaggtgctggtgcaggtgctgctgtcactgctgctggtgtcttgggtgatgtcatcaaaattgcgcaaagactttag

SEQ ID NO: 1490 - DNA, 4947 bp, Saccharomyces pastorianus
atgtctatgttcaatgctctcaattcaaacatcgacggtgagcaatacgaggcagaggagcattcaagagagctacaaatcgagcaaagcttcaatattctgcaggatgccctaatcgatcttaagaacagagattttcaaaaatcggatagcaaattccaagagcttttccaaattgatgttgtcaagcctgatagatggggcgtgtaccgtaattcctctcccacattggataatctgcgatatttatgttacaggaatagagggatgtattatcatttatatttggaaagtaattatgaaaatctgaattcacaggacttggttaattgcgttctaaaagcagttgagaatttggttgaatccattcagcacagtgacgccgatttttcagttacgaatttgctggttcgcatcttcagaggttttaatagcgccaaattggaacggttaatctcagagtatgaatttacgaaagaggagaacctttcgctcttactaggtcgtcatcgcaaatttatattaagtgatttgactcaaatgatgaataactacatagaccttacaaatacattactggttcccgatttatcggataagacgatctttgagagatatcatctggataagtataagggcattgcaccagaaggtctggcttttgggccaatcctctctaaaatttctgagatgaaaagggaagatgaagagataatgaaaaaactggatgtattcaatgtcacattgaatgaagaatcttgggatgaagtggcgaaagctttaaaaaatctactccctagtgttaagacatcgtctctcatcggcagaaatatggacccttataacgaagttgaagagcccattgaagccattaaatttgatttatcggaatcaatcaataataccccgtccttagaaaaagatgaagaacaacaagatgaagagcaagatgaagagacaacgcaagtggagaataaaagtgacaattcagtgcccttagaaaccaaagttagtgaggaatccaggcctaataagaggcctgatgaacatttggatacgacaaagcctcttcaaagaagtagtaagcgtttcaaagagagggaacatgacaactcaaaagagcttgtcatggacgttcataaaagattctttactgaattcaatacattgctgtcgtatatacaaataaactcattttatgatttcgatacatttgcctccaaattcgtcattggctctgatggtagcccatttgataaatttattccatacactgacttttatgaatgtttgaaatcttggaacagtagatataccgacattttcaaccagaatgactatttatctagcggctctaacgaaaacgaagaattgtttcaactaaatgctctcctgaagtcgaatgcatttgataacaaggaaggttttcctagatatttgagtgacttggattcggatcacatcaaatcctttgtatccgaagtgaacgggggtagtcttcattttcatgaagtacgtttaaaattactattcaaactgcttgggacctatgatgagggaaaccaaagacgtctcgtgattgattacctttgggaaccccagcttctaaagacagttttatggttcgtttttggaattgagttgaatatcttttctttcatcaacaaaaaccaaaagcaatgcaagtatttggccttgtcggtttacgaactgctagtaaatcatttaggaaatattgtggaagaaattacaaacaaacggattcaaggacacaagtcagcggacttaaaaagtcaaagaaataaggtggagaaaagaataaggtcttggcatgcgttactagaacaaattgccgaggaaaaagatacagaattgtacgtccactttcaatggactcattactgttttttgcagtatacctgtgatatcgttgataacaggctttccgaaactttaacatctttggagaagactataaaagatttggactcttgtctagacgttgcttatccaaattatcggcacatacctgctttgaacttgaatacagttcaatcacaaaaaaggaaaataaaaataatacagaacataacagttgaagatatttctgaagatacaacctctgatagtcattcggaaaatcatttggagactctagagcgtgttcttttgcatatattatatccttcaaccaagcaacaagttatcgatgaggagatggtgtcattcatttcgaattcgccatttctactgaaaatcaggctgtggggcgttctcttctcatcatatgttaaaaaatctagtatacaagacgcgcaaaggatttattttcatgtccttgacttcatgaagggcgcgttaaaatcgtctttttacagggaatcgaaccctcatgcaaggcagcaaatgttattaacagttttgacagcaattggttatttttccagtaagttaaataaaattttgaatgtgaataggtgggaaaatagtgattttacgttagaggactgtatgtttgataaattattgaagacattttttttcttttatacagttttattttatgaaagttcggcagttactgaaacttcaaataagtcatttttcaaaagagcttcaaaatcatctggaaaaatgaaggacatcataatagatttatcaactttaattctctattactataatattcaggccagcataaagacgcctactgatcagggtattgagaccactgaactaatttggtctttgcataccctttttggacatttccatttttgtgacgcatcaaatggcaactttttagctttgtctgagaaactattgtgtcaattcattaataacgactcatttttacagttgaaacaaatactatggtgtagatatcactacaccatagccagtgataatttcagtcctgacctgcatgaaacaaaagctgtagagatggaaaagattcattctttacccctaggtacttaccttattaaattgcagtatcaaaacaaaaatccttacctttcctcgtcaaaaaccaccttgaagcaggttatggataatattatagagaaaataggcgatccttcaactgtggacaaccatatcatatctagaaactcgtttttattaaatgaatatctatcgaggccaataacagctaatttgctgaaggatacattttccggcgacacaaatttatacttaactacaccacatgatgagttacaacaaggtatgacagctggcctgttctatgtatccagcttacagtctttgggtttatataaaatgaggaagaagtctatgcaagcaaggccttctgagctggactctattattaggatgttgaagaatgacatcatatacaatacaaaccgttttgaaagttggatactacttggaaagtgctacacttatacagttgaagatgatttaatttggacttcagataagattactgttcctgagaagaaagaaatcattgcgctaactcaaagaaaggcgatattgtgttactcaatggccgtttccatttattacagtaagccgaatcgaaccagcgatgacaaaaagattatattaaaggcgttagatgacttgggctctatgctgattagtgggtactacaaacctatgagtaagctttgctatagctggaaaagtaatgttgaaaacacaatgagattatccgaaactggagaggtaataatggaaaaaacaaagaaaatcaccacaatttcagacttcaatattgaacaaagcatatttttatgtttcaatcgaggatgttttttatcgactagtgccaagttagaggatgacacgtttgtgctaaattggtttagcttttatagtctggctaaattctttttcaaaacagacgatgggaataactgtaaactaatctcgaactatattttaaaaagttgccaaatagcacatgagtcatcacccgttaaagatccgatcatcgaaccgcactacttattagtgaattcttgctataaatggataaaacaaggcatcataaatgtcaatgaggctttagcgctattatctaaagataaccagttttttcaagagcaagaggaattttgggttaatgatgaaggcctagcgggggactatcaaaaaaaggtgttttttgacaagatcatgaaactacttcaccatttattatctgtagataaaaaaaaatggcagcatagacctcgttacagagttgcacgcatattgtttgatgattttggtgatgtggacggggctctgaaagagatggatagtttgatatcggcaaaaagcgtaaacaaaaacttggtcaacatatggaagccagattttgagaggccaggaaagcattttatctacacataccagtatttggttttgtatttggacttgctttttgccatgaaagacttcaatactactggccttgttataaaaaaactaagacgttttggttctggaacagttaacataaatgaacttttagaacgcgccattagcgtgtatacgcaaagtgctaaaataaaactacagttacaagacaaaagttatgtagagcagatcctccccacacttgactatcaagattttttgaaaatcagtgagcagttgaatcagatattcgaccagagcaagcatccggaagaaatagtttccggactaaaactcgcattccaactgaagaaggggcatagcggaattgccttcgacagtgtttgcctgggtatttatttcgagtatctctattatcctctagctcaacagaatcaatcccccgcaaacgataatgaagagaacacgccaataccatcatctgcgggttctattgcatccaaaggcactccagattccacctccaagtcgagtgccgtgaagaagcgtgtcaccaagaaggaagtcttcgatagaatcaaactattagtggacaagatcacgtga

SEQ ID NO: 1491 - DNA, 1029 bp, Saccharomyces pastorianus
atgaaggttgaaaaattgtcaaatggtttggaagctttagtaagaactgaagaggatgatcgcgagggcttctccttcctaaatattatggaccgtgtggaccccttaccagagaacttcgagagttacaataacttcaaagagagtgtatattatatgtgtacacacaatggtacaaaaattggattcgtattgaaattcgttattgctgaaatgaaggctctttgcagagaaacctttgaagagactttccaattagatgagctgaatcatacgttaaggttcagaagcgagaatttcgatcaaaggaacgacttaattgatcaattggctcacacaatgtatctggaatcatcaataagtggtgttaagggctggagagatgaaaagtacgctatttgggtggatagaaagccatacgtccttatcgaacgtgcgatggcgggtgtacttggtataaccacatacggggtgcatattaacggttatgtgctagatccagaatccaaggagattcggttctggatcccaagaagatccaaaacaaagcaaacatggccattaatgctcgacaacattatagctggaggattaggatatccatacggtatatatgaaacagttttaaaagagagcgtcgaggaagccaacttgcaaaagagtattattgaagccagtatcaaggctgccggtgttgtttcttacctctactttacaggtgacatttctgtgacggcattcgacaaggaatcagattttatcgttggagaagtggaatatgtctacgatttaaagctcgataaggacattattccaaaaccgaatgacggagaagttgaaagtttcaacctattcagcttacaagaaaccatcaatgctttgaaaagaaaagaattcaagcccaattgcgctttagtaacggtagaattcttgattagacatggctatattacaccggaaaatgaacccaattatcttgaattagtggctagaatgcacagaagattaccattccctacattaaactaa

SEQ ID NO: 1492 - DNA, 2289 bp, Saccharomyces pastorianus
atgtctgtgcccaagaaacgtatccatggaaagtcgtcgcctcccaccggggacgtggatgatcctcagttgaaatacacaaagggcgcgtcaaaatgtgaacaaatctctgaacactggctattacaatcattacctgcgccacaatcgcactatagcttctgggctactgtggttactttagtcgcctttgctgctagattttataagatttggtatcctaaggaagttgtatttgatgaagtacatttcgggaagtttgcatcttattatttggaaagatcgtatttctttgatgttcatcccccatttgctaagatgatgattggcttcatcggttggttatgtggttatgacggttccttcaaatttgatgagattggatacagttacgaaacacatccagccccatatatagcgtaccgttcctttaatgccatattgggtactttgaccgtaccaatcatgtttaacactttgaaagaattgaactttaagcctattacatgtgcatttgcatcccttttggttgcaatcgataccgcccacgttacagaaacaagattgattcttctggatgctattttgatcatttccattgctgctactatgtactgctacgtccgtttctacaagtgccaactgcgccaaccatttacatggagttggtacatttggttgcatgctaccggtttgtctttgtcattcgtcatttccacaaaatatgttggtgttatgacttattctgctattggttttgcagtggtagtaaacctgtggcaattattggatatcaaggccggtttatctttaagattgtttatgaaacatttcagcaaaaggctaaacggccttgtgttgatcccttttttgatttacttgttttggttctgggttcactttaccgtattgaatacttcaggcccgggcgatgcgtttatgtctgcggaattccaggaaacattgtatgattctccgttaaatattgattcaaaggtagttaactatttcgacattattaccctcaaacaccaggatacagacgtgttcttacactcgcacttggcgcattatccacaacgttatgaagatggtcgtatctcctctgctggccagcaagtgactggttatgcacaccctgattttaataaccaatgggaggtgttaccaccacatgacagtgatatcggtaaaggtcaagcggttctcttgaaccagcatgtcagattaagacacgtagccactgacacctacttgttagcccatgatgtggcttcaccattctaccccactaatgaggaagttaccgctgtatcattagaagacggtgacggagagtcatatccggaaactttatttacttttcaaccactaaaaaaatcagatgagggccatatcttgaaaactaagactgtttatttccgacttttccatgttgacacctctgtagccttgtggacacacaatgacgaactattgcctgattgggggttccaacaacaggaggttaacggtaacaagaaagtcactgacccttcgaataattgggctatcgatgaaatcgttaacttggatgaagaccgaaaggtatatgttccaaaggttgttaagccattaccatttttgaagaaatggatcgaaactcaaaaatccatgttcgagcacaacaataaactgtcgtcggagcatccatttgcctctgaaccatacagttggcccggtagtttaagcggtgtttcattctggactaatggtgatgagaagaaacaaatctatttcatcggtaacattattgggtggtggttccaggttgtttcattggccgttttcgtcggcattatcgtggccgatttgcttacaagacatcgcggttactatgctttaaacaagataacaagagagaagttatatggaccattaatgtttttcttcatttcctggtgttgtcactatttcccgttctttttgatggctcgtcaaaagtttctgcatcattacttaccagctcatttaatcgcttgtttattttcgggggcattatgggaggttatcttcagtaattgcaaatctttgaatttggaaaccgatgaagatgttccaggtacaccttatgaaaagaaccccaagatttacgtcaaaccatatgcagtgtttttggtgtgtgcctccactgctgtcatttggtgctttgtctactttgcaccattggtatatggtgacgtcagcttatctccatcagaagtcgtttctagggaatggttcgacatcgaattgaactattcgaagtga

SEQ ID NO: 1493 - DNA, 1131 bp, Saccharomyces pastorianus
atgaccttagcgcccttagatgcctccaaagtcaagattaccaccaccgaacacccatcggagccaaaaccaaacgaccagctggtctttggtagaagcttcaccgaccacatgctaactgcggagtggactgcggcaaacgggtgggacgtcccggagatcaagccctaccagaatctgtcactggacccatccgcgtacgtgttccactatgcttttgagctgtttgaaggtatgaaggcttacaggacagttgacaataaaatcacaatgttccgcccagacatgaacatgaagcgtatgaataagtctgcccgacgaatttgtctgccagctttcgactcggaggagttaattgccttgattgcaaagctgatccaacaagataagcgtttgattccggagggaaagggctactctttgtacatcaggccaactatgattggcactacggccggcctgggtgtctccacgccagacagagccttgctatatgtcatttgttcccccgtgggcccttactacaagaccggtttcaaagcggttaggctggaagccactgattacgccacaagggcttggccgggcggctgtggtgacaagaaattgggcgccaactatgctccttgcgtcctaccacagttgcaggccgcctcaagaggttaccaacagaacttgtggttgtttggcccagagaataatatcactgaagtaggcaccatgaacgcattctttgtcttcaaaaacaccgaaacaggcaagaaggaactggtcactgccccattggacggcaccattctggaaggtgtcacgagagattccatattaaccctcgccaaggaaaggctcgatttaaatgagtggactattagtgaacgctactgcaccataggcgaagtttctgagagatccaaaaaaggcgaactagtagaggcttttggttctggtacagccgcgatcgtttctcccatcaaagaaatcggctggaagggcgaacctatcaacatcccattactgcccggcgagcaaacgggaccattgaccaaggaagttgcccaatggattaaccaaatccaatacggcgaagttgaacatggcaattggtcaagggtcatcaccgatttgaactga

SEQ ID NO: 1494 - DNA, 2457 bp, Saccharomyces pastorianus
atggttaagataagtacagcagctatagccgttgcactagcgacgggtgccgccgctattactgcgaccaccactttatctccgtatgacgaaagagttaatttgattgaactggctgtttatgtttccgatattaaggcccatctacttcaatattatgctttccaaaattcacataagactgaaacatacccacccgaaattgcccaggctgtttttgctggtggtgatttcactactatgttgaccggtatttcaggagacgaagtcactagaatgattaccggtgttccatggtactctaccaggctgagaccagccatttctagcgccttatctaaagacggtatttacactgctataccaatgtccacctctacttccacaacttctaccacttctgtcaagcctttgactacctctactacctctactacgaagccttccaccacttccacaacgtccaccacttctgtcaagccttcgactacctctactacctctactacaaagcctttcaccactttcaccacttccacaacttctaccacttctaccatttctactacttctactacatctaccacttctgcagaaactcgtctttctactgcacctttctctactgctacttccactcaagtttctagtcccgctgaatctgcttcttttgctcaggttgcatcctctgctgaggttacttcctctgctgaagttacttcctctgctgaacctacttcctctgctgaacctacttcctctgctgaggttacttcctctgctgaagttacttcctctgctgaagttacttcttctgttgaacctacagcttcttctactgaaattagttcttctgaaatcacctcttccgctgaacttacctcttctagtacgtattttactcaagtcgctgcttcttcaagtgaagctactacctcagccgaatctaccttttctgtcatctattctaaccaaacaaccacagctaccaaatccaactctgctgttgtttcttctagccaagttctcgtatctgttgaatctagcccctttggcgtttcaactcaagctgtagcttcttctactgaagccgctaatttctttagtgaaaccaccacttctacggaatctagctcttccgtggtttcttctagtcaaacaaccacgactgctgggtctagcttttctgctaagcctagctcctctgttgcttctaccaagcccgccattttgtctactgacgccactacttctgctcagtttagctcttctgtcgtctcttctagtcaaattatcacatctgctgaatttacctcttttattgaaccagcttttacgggaatttcttctagtgaaggtgtcacctcaggcgcgtattcctctattgctttttcatctagcgcaaatactgcttcaatcgatcatacttcctctgtagaatttttgtcatcagaggtaactagtgctactccgacgtccacttctttttcttcatctacggtccctgcatcattcgttaatcctacttccgcagcttcttccccgggttcttccccagtttctgctgcttccttggcttcttctgcctcgatctcttcagttattactagcaatgtcaatgaaacttccagtagtgctgccaacagtaaaatcacgtccgttgtatatggtagtaatgcaactttgacagccactaaagtctcgactgatgacgctaccgttactagctgcaagggtggctgcactaaagaagacaccacttcaaccaaaactcaactttccaccgttaagaccactgtgacgagttgttcagccggtgtttgctccactttgaccgctccaatcactaccgtcaccgctaaggctgctatgaccaccgacgtcactgttactagttgcaagggtggttgcactaaagaagacaccacttcaaccaaaactcaactttccatcgttgaaaccactgtgacgagttgttcagccggtgtttgttccactgtgattgcaccaattaccaccgtcaccgcaaaggctactacgagcactaacgtcaaagatattaatgaaggtaccacatcaaccaaaattatgccttccgcaattgaaactaccataaccagctgttcggctggtgtctgtaccactttgaccgctccaatcactactgtcagtatcggggctggcacatcgaccaagacagaactttctaccatcaaaactactataactagctgcgcaggtggtgtgtgcaccactgtgactgctccaatcaccaccgccacgaataaagccatatgccaaatttcagaagtttccacggccgcatctgcttctgcttcatctgcttcatctgcttcccatgctattgatatcaacacgaacggtgcttataggtttgataatagaggcgtttttggtgctgctattgttgctggtgccgctgctttactgttataa

SEQ ID NO: 1495 - DNA, 1632 bp, Saccharomyces pastorianus
atgtcagggggtgcgagcacgaattcaaatgcttccatagacgaaaaaaacctaaacatcacttcggaagctgaaattaaaaacgaagatgtatatgcggaacctgtcctaagtacagtcttatcacctaacggtaaagttgtttacatcagtgacaaggtagatgaggctatgaaattggccgacgaagccaaggaaattgaggttacgccagaagaagacagaaaactacgctggaaaatcgattattgtatgtttcctttaatgtgtatactgtatgccgtccagttcatggacaaaatttccacaagttcggctgcggttatgggattaagaactgacttaaaaatgcatggtgaccaatactcctgggtcacttccgccttttattttggttatttattcatgaatctaggtccggtacagttaattttccaaaaaagtaaacatatgtccaagatgcttgcaattttcatcattgtatggggattactcttggccttgcatgctgttccatcggttaagtactcatcttttatcgcattgagggtgcttttaggctgtgcagaaagtgttgtcacaccctgcttcaccatcatcactgctcaatattggaaaacagaggaacagttcacaagaatctcaatttggtttggtatgaatggtcttgggtccattctgatcaacgcgattgcgtacggtgtctatattcatcaagaatcctatgctatcaagggctggagggctttgtttgttatcaccggtgtaattacaattttcgttggggccttgatatttctctggattcctgatgatccatcaaaggcaagatttttatcaaagagagaaaaattgatggttgtccagagaattagatccaaccaacaagggtttggtaatcacgaaatcaaaaagtaccaaattgtcgaagctttgaaagatgtcaggacttggttatatttccttttcactgtgagttctaatattcctaatggtggtatttcgagttttatgagtattctactgaacagcgatttcgggtatttatcaaaggataccttattaatgggactgcctactggtgctgttgaactagttgggtgcccgctttttggtattctggccgtatacgcagctaataagaaaataccattttggaagtacaaattggcttgggccatctttgctgctgtcttagcattgattgctagctgtatgctaggttttgcaacctcttcaaaaaaggcaagactggctggtgcctacttatggtatatctcccctgtttcgtttatttgtgtcctttccaatattagtgctaactcttcaggctacagtaaaaaatggactgtatcttcaataaatttggctgcatatgctgctgccaaccttgctggcccacaaacatttattgcgaaacaggcccccaagtaccatggtgccaaggttgccatggtcgtttgctatgccgttatgatcgtgcttttatctgcattactcttgatcaatatgagagagaataagagacgtgacaagatagctgctgaaagaggttaccccgaagagacagcaaatttggaattttctgacttgacggattttgaaaatccaaactttaggtacactctataa

SEQ ID NO: 1496 - DNA, 1086 bp, Saccharomyces pastorianus
atgattttagccgactcaatacttttctcaactttatgcgctttcgctgtctcgacacctttgtcgaaaagagactcctgtacattaacgggttcttctttgtcctcgctgtcaactgtaaaaaaatgtagcagtatcatcattaaggatttgactgttccagctggggaaacattagatttaaccagtttgataagtggcactactgttacgtttgaaggcacaactacatttggatacgaagaatgggctggtccattgatttcgatctcagggtccaaaattaacgttgttggtgcttccggacatgttatcgatggccaaggtgcaaaatggtgggatggtaaaggcgatagcggtaaagtgaagccaaaatttgtgaaattaggcttgaccggaacctcgaaagttactggcttgaatatcaagaacgctccacaccaagttttcagtgtcaattcatgttctgatttaacaatcagtagtgtaactgttgacatcagagatggtgattctgcaggtggccataacacagatgcgtttgacgtgggtagctctactaatgttttgattcagggatgtaccgtctataaccaagacgactgtattgccgtaaattccggtacaaccatcaaattcctcaacaattattgctacaatggccatggtatttctataggttctgttggtggccgttcagataatgtcgtcaatggattttgggcagaaaacaataatgttattgactctgataatgggttgagaattaaaactgttgaaggtgcaacaggctcagttaaaaacgtcaactttattagtaacaaaattagcggcataaaggattacggtattgttattgaaggtgattacctgaatggcaagacaaccggaacggtcactggtggagttcctatttctggtttggtgatggaggacaatacagggagtgtaaccagctcagccaaacgtgttaagattttggttgagaatgcttccgattgggagtggtctgggaattcaatcaccggtggttcctccttttctggctgttctgggatcccatctggctcaggtgcatcatgttag

SEQ ID NO: 1497 - DNA, 1089 bp, Saccharomyces pastorianus
atggttctagctaactcggtacttctgtcagctttatgcgcttttgctgtctcagcagcgcctttgtccaagagagattcctgtacattgtcgggatcttctttgtcgtcattgtcggccgtgaaaaaatgtagcagcatcatcatcaaagatttgaccgttccggcaggacagactctagatctaagcggtctaacgagcggcactactgttaccttccaaggcacgactacttttggatacaaggaatgggaaggtccattaatttctatctcagggtccaaaatcaacgttgttggtgcttctgggcatgttatcgatggccaaggtgcaaaatggtgggacggtaaaggtgacagcggtaaagttaagccaaaatttgtgaaattgggcttgaccggaacctcaaaagttaccggcttgaatatcaagaacgctccacaccaagttttcagtgtcaataagtgctctgatttgaccatcagtggtgtaaccgttgacgtcaaagctggtgactccgccggtggccacaacacagacgcgtttgatgtgggcagttccaccaatgttgtaatccagggatgtaccgtttacaatcaagacgactgtatcgccgtaaactctggtaaaaatatcaagtttttaaacaacaactgttacaacggtcacggtatctctataggctctgttggtggccgttccgacaatgttgtcaacggtttctgggcccaaaacaataatgttatcaactctgataatgggttgagaatcaagactgttcagggtgcaacaggttcagtttcgaatgtcaacttcattagtaacaaaatcagcggcataaagaagttcggtattgttattgagggtgattaccttaacggtaaaaccactggttctgccactggcggggttcctatttctggtttggtgatgaaggacaatacagggagtgtaaccagctcagccaaacgtgttaagattttggtgaagagcgcttctaactggaagtggtctggtgtgtcaattactggtggttcttccttttctggctgttctggaatcccatctggttcaggtgcttcatgttag

SEQ ID NO: 1498 - DNA, 945 bp, Saccharomyces pastorianus
atgacggccagcttaactaccaagttcttagacaatacttatgaaaatccatttatgaacgcatcgggtgttcattgtatgactaccccagaactggatgagttagccaactctaaggcaggtgcttttattactaagagtgctacaactttagaaagagaaggtaatcccaaaccacgttatatttccgttcctctaggtagtatcaactctatgggtttaccaaatgaaggtgttgattactatttgtctcacgtactaaaccgccaaaagaagtatcctgatgcacccgcaatcttcttctctgttgctggtatgagtatcgatgagaatctaggcttattgaaaaaaattcaagagagtgaattcaacggaattacagagctaaacttgtcatgtccaaatgttcctggtaaaccacaagtcgcttatgattttgacttaactaaggaaacattggaaaaagtttttgctttctttaataagcctttaggtattaaattgcctccttattttgattttgctcattttgatattatggccaagatcttaaatgagttcccattagcctatgtcaactctatcaacagtgtaggtaatggtctctttatcgatgtagaaaaggaaagtgtagtagtaaaaccaaagaatgggttcggaggtattggtggtgaatacgtcaagccaaccgcacttgctaatgttcgtgcgttttacactcgtttgagacctgaaatcaaaatcattggtactggtggtattaaatccggtaaagatgcatttgaacatttgctatgtggtgcttctatgctacaaattggtacagaattgcaaaaagaaggtgtacaaatctttgaacgtattgaaagagaattgaaggatataatggaagctaagggttatacgtcgatagacgaattccgtggtaagttgaacagtctttaa

SEQ ID NO: 1499 - DNA, 609 bp, Saccharomyces pastorianus
atggacaaagcgtttgacgaaattattggagatgatcatgcggaagactcagtagaccacaaggtaacgaggtaccgtaggagagatttgagaaacgaattggggcccaggctgggatttgggtcttccgatccagcggtaaggtcaggagacagcttttatccacaaaaggaagagccacctttgcccaagagaatcagaatgtccaaaatcccattggacgtttccgattacactcttgatgatatgattaaagagtttggtgccccagtattttcgaagattttcgataacaaagaagatcgtacatgcatttacgaatttgaggatccagaagtaatggaaaagattgtcgaacgttacaatgggcatgagttgaatggtaccaaaatcgaagtagaaatgtaccaacctcagagaaagcatccgagaggtaacacaaacaaccgtcacagacagccggtccaagaacgtagtagaggaagatcgggtagccattactgccaaaagcctagcagagtctctaagaagggcaagggccgcgaaagtaacacacctacttctgttgaagctcttgacgctgagttggacgcttacatgaaaggttga

SEQ ID NO: 1500 - DNA, 2160 bp, Saccharomyces pastorianus
atggtatatcaattgagtgcgacgctgaaagggcacagccaagacgtcagggacgtggtagctgtggatgattcgaaagtagccagtgcttcgagagatgggacagttcggatgtggtcaaaagacgaccaatggcacagtacagtggtttattcagggcagggatttttaaacagtgtgtgctatgattatgagaaacaggtcctgctctttggtggaaaggacaccatgatcaacggtgtgcccttatttgccaccttaggggaggatcccttgtatacattgatcggccatgaggggaatgtttgtagtttggaatgccaagaaggtgttgtggtaagtggcagttgggacaaaaccgccaaagtttggaaagacggatctttagtttacaatttgcaagcgcatagtgcctctgtatgggatgccaaagtggtatcccttacagaaaacaagtacctgactgcttctgcagataaaacgatcaaactgtggcaaaatggggaagtgatcaagacattcagcggaatccataatgatgtggtgaggcacttggccctggtggacagtggccatttcattagttgttctaatgatggtctcattaaattggtcgagatccgtacgggcaaagtgctaaaaatttttgaaggtcatgaaagttttgtttattgtgtgaagctgctgcctaatggagatgtagtaagttgtggcgaggaccggtcggttcgcatatggtccatggaaaatgcatcattaatgcaagtcattacgctgcctgcggtctccgtttggtctatagactgtatgtctaatggtgatatagtaatggggagtagtgataatctcgttagaatattctcacatgatgaatcaaggtgggcatcagaggaagacataaaggagctatcaaaacaggtggaagaatccactataagttccgagacaatgcaatttgacgagtcaaaattatcgccttttgagatcttgcaatctccggggcgtaaagagggccaagttgtggtggtcaaatcacctcaaggcacgatagaggctcatcaatactcaaatagctcatggaccaagattggtgacgttgtcggagcaggtgctaccggaaacgaccaaaaggtggaatacgagggcaagtcatacgactatgtatttgatgtggatatcgaagatggaaaacctcctttgaaattgcctatcaatgctaacgataatccatacacagccgctgataatttcttggcccgctatgaattgccatcgagtcatagagatttagtggtacaatttatcttgaaaaacaccaatggtgtgtcactagatcaaggaaccggtgccgatgatacacccctagccgcatcgtcaacatcatcgacgtcaacaacaacaatgaaggtgttccccgttaaagaatacttagttatggataactttaacccagatactattttcaacggaatcgcaaagataaacgccagtgagaagacgtttgacgatgaaattttggcacaaataggtggtgcgctacatgacatcgatgaaagttgggagctgttgctatcgtttgccaatacaataagatctacttgggaaattaaaacccctgcgtacgacatagtgcggttgatcgttaaaaaattgccttattcgtcagatatcaacgattacattgaagaaggcttgggtaacaagaatatcactctagccatgctaactgtgcgtatcttggtaaattgcttcaagaatgaaaactggggggtaaagctgttagcatctgagcaagtttataaatcaattttcgaaacaattgataccgaattctctcaagcatctgctaagcaatcccaaaatttggctgttgccgtagccacattaattttcaattattcagctcttgtgacaagagagaactctgacctggaacttttgccaattatagccgacgctatgaacaccaagtatggacctttagaagagtatcaagaatccgaagaagccgcatatagactttccatggcatacggtaatttatctactgtcgagcctacgttaagacaatttgctaaatctgtaacatggcttgcaaacattagaaaaagctatgggaacgtgccaagattcaaaaatctgtttgacgatttatcctga

SEQ ID NO: 1501 - DNA, 1872 bp, Saccharomyces pastorianus
atgacaggtccattagtgtacgttcaaaacgcagatggtatcttcttcaagacagctgaaggtaaggggagtaatgatgcagtgattcatttggctaatcaagaccaaattgttcgagtccttggtgcaggagaattcccagctcaaggtgaagtggtcaagattgcttccttgatggggttcatcaagctcaaattgaacaggtatgctattattgcgaataccgtggaagagacgggcaggttaaatggacacgtcttttataagatattgcagcattctgtggtgccctccaagctcaactcaagaattgattcggaagaagccgaatatatcaagctgttggaattacacttgaagaattctacgttttatttttcatacacttatgatttgaccaactcgttacaaagaaatgaaaaaattgggcccgtatcctcttggaaaactgccgatgagcgttttttctggaaccattatttaactgaagacttgagaaattttgccgttaaggattctagaatcgatgcctttattcaacctgttatctatgggtatgccaagactgtggactccattctgaataatacccctattgtcctcggtttaattaccagacgtagtatattcagagcaggtacaagatacttccgtcgtggtgttgaccaagaaggtaacgtcggtaacttcaacgaaaccgaacaaatcttactagctgaaaacccggagagtgaaaaaacacatgttttctcctttttacaaacaagagggtctgttccaatatattgggcagaaattaataatctaaactacaagccaaacttagtccttggcgaaaattcattagacgccaccaaaaagcattttgatcaacaaaagaagctgtatggtgacaactacttagttaatctagttaaccaaaagggccatgaattacctgtgaaagaaggctatgaatctgccgtgcatgcattggacgatccaaagattcattacgtctattttgatttccatcatgagtgccgtaagatgcaatggcatagggtcaagcttttaattgatcatttagaaaaattaggtttgtctaacaaagatttcttccacaaggttattgattctaatggtgagaccattgatatcattaatgagcaacattctgtcgtaagaaccaattgcatggattgtttggatagaacaaatgtcgttcaatcagttttagcacaatgggtcttgcagaaggaattcgaaactgccagcgtcattcctgctgagaccacgtgggaagatagcgctccattactatcctcctatcaaaatttgtgggcagataatgcggatgcagtcagtgtcgcttactcaggtaccggtgccttgaagactgattttacaagaactggtaaacgtacgcgtttaggtgcgttcaatgattttatgaattcggcgtcacgttattaccaaaacaatttaaccgacggtccaagacaagattcgtatgatttgtttcttggcgggtttaagccacatgtggcttctatcaagtcaccgttccccgacagaaggcctgtgtatattcagctgattccaatgattatttgcgcagcaataaccgttttaggtgccacgattttcttccctaaggatagatttgccagtggcaggaatatgttgtatttcgcgggtgccgcagtcatcttggcgctgtcaaccaagtttttgttcaacaatggtatgcagtatgtcaactggcctaagttagttgatgttgggttcttagtcgttcaccaaacacacgataaagagcagcagtttaagggtttgaaatatgcacaaagtcctagattttctaaaccagatcctttaaagagagattga

SEQ ID NO: 1502 - DNA, 1455 bp, Saccharomyces pastorianus
atgtctgtgcacgctgctacaaacccaatcaataagcatgtggttctgattgacaactacgattccttcacctggaacatttatgagtacttgtgccaagagggcgccaaagtcgacgtctaccgtaacgatgccatcacggtggatgaaattgcagctttgagccccgatacgctgctcatctcgcctgggccaggccatccaaagacagattcaggtatttcaagagactgtataaagtactttgctgggaagatccccgtcttcgggatctgcatgggccaacagtgcatgtttgacgtatttggcggtgaagtcgcatacgccggtgaaattgtccacggtaagacttctcccatcagtcacgacaacaaagggattttcaagaatgtgccccaaggtattgctgtgactagataccattctttggccggtaccgaacaatctcttccatcgtgcctaaaagttactgccagcacggaaaacggtattatcatgggtgtaaggcacaagaagtacaccgtggaaggtgtgcaatttcatccggaatccatcttgaccgaggaaggccatttgatgattagaaatatcttgagcatcaacggtggaaattgggaggaaaacgggttgtctccttcaaactctattttggatcgtatatacgcacagcgtaagattgacgttaacgagcaatccaaggttcccggtttcaccatgcaagacctgcaatcgaactataatttaggccttgctcccccagtacagaatttctacgcgaaattgtcatcgtcccacaacagagccgtggttcttgctgaagtgaaacgtgcttctccatcaaagggtcctatttgcctaaaggctgtcgccgctgaacaggctttgaaatatgcggacgctggggcttccgccatctccgtactgactgaacctcactggttccacgggtcgctacaggatttggccaatgtcagaagaatcctagatttgaagttctcccccgaggagaggccttgtgtcctaagaaaagaatttatctttagcaagtaccaaatcctagaagcaagattaggcggggcggacaccgttcttctcatagttaagatgctatctcaacccttgttaaaggagctatacgactacagtaaagatttggacatggaacctcttgttgaagtaaactccaaagacgaactaaagagggctttagaaatcaacgctaaggtcataggtgtcaataatagagaccttcactcatttaatgtagatctaaacaccaccagtaatcttgtggaatctactccaaaggacactcttttgatcgcactttctggaataaccacaagggaagatgcagaaaagtataaaaaggaaggtgttcatggatttttggtaggcgaggctttaatgagatctaatgacgtaaataagttcattcatgaattatgcgagtga

SEQ ID NO: 1503 - DNA, 3075 bp, Saccharomyces pastorianus
  modified_base (1445)..(1445): a, c, g, t, unknown, or other
atgagcagtaagaataccggtgccaccgccgtaggagagattgacgagagtctctattctcgtcaactttatgtgttgggtaaggaagccatgttgaaaatgcaaacctccaacgtgttgattctcgggctgaagggtttaggtgttgagatagcgaagaacgtggtcctcgcaggtgtcaagtctatgaccgtttacgacccagaaccagtccagttacaggatctgtctacacagttttttttaaccgaaaaggatgttggtcaaaagagaggcgatgtgtccagagccaagctggccgagttgaacgcatacgtcccggtcaacgtgttggactcgctggaagatgtcacgcaattgagccaattccaggtcgtagtcgccacagacacagtttctttggaggataaggtgaaaatcaacgaattctgtcattcctccggtataagatttatttcctcggaaacaagaggtctcttcggtaacgtttttgtagaccttggtgacgagttcacagtgctagaccctacgggtgaagaacctcgttctggtatggtttccgatattgagccagatggaacagtgaccatgctggatgacaacagacacgggttggaagatggtaactttgtcaggttttcagaagtggaaggccttgataaactaaacgacgggacccttttcaaagtcgaggttctgggaccatttgcattcaggatcggttctgtcaagcaattcggccaatacaagaaaggtggtattttcacagaagtcaaagtgccccgtaaaatctcgtttagcacactcaaacatcaactatccaatcctgagttcatcattgcagatttcgcaaaattcgatagaacctcccaattgcatctgggattccaagcattgcaccaatttgttattagacataacggtcaactcccaagaccaatgaataatgaagatgccaatgaattaatcaaactggtcacggatttgtccgttcaacaaccagatgttctgggcgaaggtgtagaagttaatgaagatataatcaaagagctttcttaccaggcaaggggtgacatcccaggtgttgtagcgttctttggtggccttgtcgcacaagaagttttaaaggcctgttccggtaaattcactccactaaagcaattcatgtatttcgactcgctagagtcgttgccagattccaaaaacttcccaagaaatgaaaagaccacacaaccactaaactcccggtacgataatcagatcgccgtctttggcttggatttccaacaaaagattgctaactcaaaagttttccttgtcggatccggtgctattggttgcgagatgttgaaaaactgggcgcttttagggctgggttccggttctaacggttgtattgtcgttactgataacgattccatcgaaaagtccaacttgaaccgtcnattcttattcagaccaaaggatgtgggtaagaacaagtctgaagtggctgcagatgctgtctgtgctatgaaccccgacttgaagggcaaaatagatgccaagatcgataaagtgggctcagaaactgaggaaatatttaatgattcgttttgggaaggcttggattttgttactaatgctttagacaacgttgatgcaagaacatacgtggaccgtcgttgtgtcttttacagaaagccactactggaatccggtactctaggtactaaaggtaacacccaagttattattccaagattaaccgaatcatactcttcttctagagatcccccagaaaagtccattccattgtgtacactacgttccttcccgaataagattgatcacactattgcctgggctaagtctctatttcaaggctatttcactgactctgctgaaaacgtcaatatgtatttaactcaatcgaatttcgtggaacaaaccttaaagcaaagcggagatgtcaaggggattcttgaatccatctcagactctttgtccaatagaccatacaattttgaagactgtatcaagtgggcaagattggagtttgaaaaaaaatttaaccatgatattaagcagctactattcaattttcccaaagacgctaagacatccaacggtgaaccgttttggtccggtgccaagcgtgctccgactcctttagagttcgatatctacaacaatgatcatttccattttgtcgtaggaggtgccaacttacgcgcattcaattatggcttgaaaagtgatgactctgattccaaatcaaatgtcgacgaatacaagtctgttattgaccacatgattatcccagaattcactccaaatgctaatttaaggattcaagtcaacgacgatgatccagatccaaacgctagtgctgctaacggttctgatgaaattgatcaactagcatcatctctaccagatccatccactttggcaggttttaaactagaacctgtggactttgaaaaagatgatgacagcaatcaccatattgaattcataaccgcatgttccaactgtagagctcagaactattttattgaaactgctgatcgtcaaaagactaaattcattgcaggccgtatcattcctgccattgcaacgacaacttctttggtcaccggtctggtcaatttagagttatacaaagttgtggataacaagacagatatcgaacaatataagaatggttttgttaatctagctttaccatttttcggtttctcggaaccaattgcctcaccaaagggagaatacaacaataagacatacgatagaatttgggatagatttgatatcaaaggagacgtcacattaagtgagttgattgaacatttcgaaaaagaagagggtttagacataacaatgctttcatatggtgtttctctgctttatgcttcctttttccctcaaaagaaactaaaagaaagattaaatctatccatctctcagttggtcaaattagttactaagaaggatgtccccacacatgtatctaccatgattctagaaatttgtgcagatgataaagaaggcgaggatgttgaagttccatttataaccattcatttatga

SEQ ID NO: 1504 - DNA, 804 bp, Saccharomyces pastorianus
atgagctgcttggtattaccgctagtcagtgtcgggaacataccgcaattgagtgttgattggctactgaattcgcaatcgaacgagtgggaattcgtggaggcgttagattctaagtacctagtggaattcgtaggaccgctagatagacccgaagatggtggcgactcactatacagaggcactgatatgaagtacagtagcgccttagagttatttcacaacagagaacggaatatctacgccatacagcaacgaacaccgctagtatcagtgaactacttgaataatttcattgtagaggttattctgcccctcttgagcaagtacaacgtacaggagatatgcatctgggactctttgagtgcaatggaggatgaacatggcgttattgtgcgcccgcacgagatatattcgctgggtgaggttcaaatcgatgatatgtctgatcttttgtcgacacttcgtcttaacgcccaagagtcaatggtcaacaattggttacggttcacgccaacgagtttccaagacaagatacccgttgaccagcagatctacaagatcattttccacatacttaatgcttcacaaaggcctcaaactttccgcagcatcaaatactgtagctgcttagccaatgagggtgacaactcactggattcacaacagtttctgcaatggatcacttcccaaaaggccatcgcaagcctatcaacaataagcgagtttgttaggccgatatcgtggcaaggtgtttacggagcggcagattctagggataactttgtagatctatacagctaa

SEQ ID NO: 1505 - DNA, 3336 bp, Saccharomyces pastorianus
  modified_base (758)..(791): a, c, g, t, unknown, or other
atgctagaacggatccagcagctggtaaatgcagtaaacgacccacgctcggatgtcgccaccaagagacagggcattgagctactgaatgaaattaaatcttcagagaatgccatggagatattcatatcactggtcatcaacgagaattcgaatgatcttttgaaattttatggattgtctactatagttgaattgatggctgagggctcaaatgccaatgcgaacagcttaaatttggtcaagtttgaaattactaaatggcttaaattccaaattttagccaataaacaaaccaggttacctgatttcttaatgaacaagatttcagaagtgctaactactttgtttatgttaatgtacagtgattgtaatgggaaccagtggaatagtttttttgatgatctgatgagtcttttccaagttgactcggcaatttccaacactagtccgaccactgatggcaacaacctttcaggtcttgaatttttcaacaagctttgtttgatgatcaattgtgagattgctgaccaaaattttgttagatccaaggaatctcaattgaaaaataataatataaaggactggatgcgtgataatgatatcatgaaactgaataacatttggtttcaatttttaaaactggatgaacaagttgtttcacagtttcctggattaatcaattctactctggattgtataggcagtttcatttcgtggatcgatatatgcggggttaattgcggacgcgaattctnnnnnnnnnnnnnnnnnnnnnnnnnnnnnnnnnnagaaaccaagatttcatgttataattgcatactggccatcatttccaagaaaatgaaacctatggacaaactggcctttttgaatatgatcaatctaaccgacgaactgacttattaccatcaggccatatcaatgaatcctcaaatcattacattcgataatttggaagtttgggaaagtttaacaaaactgattacttcatttggtatggaattcaccattatcattgagcaaacgaatgacgatcctaagctggacactttatacaaacaatcggttatttcaaacgttgatacaattttactagaaaaaataataccaatacttttggaatttatgaataatgagttcgattcaataacaggaaaaacattcccattttggtcgaactatttggcttttttgaaaaagtataaagcgtcttcaccaaatttcataccattgcataaggatttcttaaataatttccaacagatttgttttagaaggatgaagttttcagatgatgaagtcacacaggatgatttcgaagagtttaatgaaactataaggttcaaattgaaaaatttccaagaaatcattgtggtaatcgacccaagtttattcctgaataacattactcaagaaatatccgcaaatctaatgaattgtaaaaatgaaaactggcaagtttttgaactgactatctatcaaatttttaacctaagcgaatgtatcaagaacaattacttcggtttgattaagaatgaaattatgacttcacaaccttcactgaccttagtacgatttctaaatgaattgttaatgatgaaagactttttattgaccatcgataatgaacaaatccaaattttattcatggaattaattgtcaagaactataatttcatattttcggcaagcgctaacacggcaaacgccactgacgatgatgagaaatatctcttgatcttgaacatttttatgagcccatttgccatgtttaataagagggaaaacgttagacttagatcatggtatttattcacaagacttttgaaactaaccaggattaacttgaaaaaaattctgtacacaaataaaactttagtcaatgaaatcaccaataaaataagtccattacttcatattaaaatagcctcaattaattcacaagggacagatgataatgatacaatttttgataatcagttgtacctttttgaaggtattgggttcataatcacattaaacaataacaatcaggacaccgcttcttcatcgtcatcatcttcttcttctagtaccactgctactactgctactatgaactatgatatattagaccaaatattaacgccactattcacccaactagaaggctgtattacacaaggagcttcaccaatcgtaattcttgaatgccatcatatactaatggccattggtactttggctagaggtttacacattggtttggttcctgaaaatcaagttaacaatatggtagttaacaaaaaactaatcaatgactccttagtccataaattctctaatattgcagaggttatattagtgacattttctttttttaacaagtttgaaaatatccgagatgcatctagatttacttttgccagattaattccgattttaaataataaaattttaccgtttattaataaattgattgaattgatcttatcatctaccgatttgaagtcatgggagatgattgatttccttgggtttctatctcagctaattcatatgttcaatactgacttaaactgttaccaattgtttaatcaattacttaccccactaatcaacaaagtccactccattatcaaagaaattgatgagcagcacgaccaacaagcaagcattaataaacctatagacaactctgtcacaaccaccgctgccgtaaacaaaaacatagtggttaccgattcctatagagataaaatattattgaaaaaggcatattttacatttttacagtcattcaccaataattccgtcacatcgatactattatcagatataaacagatcaattttgcctgtcatattgaacgatttggtcacttacacgccacaagagattcaagagacgtcgatgatgaaagtatcattaaacgttttgagcaacttcatcaaacgtttcggaaacgggtcatgcttggataatgatgatatcaacagagatccaaatttgaaaatcgacggtctaaacgaatacttcatcatgaaatgcgttccgataattttcgaaattccgttcaatccgatatacaagtttaacataaaagaggggaatttcaaaacgatggcatctgacctggcaagattattaagagaactgttcctcgttaacaacaacccaactacaaatgacaacgaatgcgtgaaatacttgacccaaatatacctcccacaaatacagctaccccaagaactaagtattcagttggttaacatgttaaccacaatgggccaaaagcaatttgaaaaatggttcgtcgttaatttcatatccgttttgaagcaggatcaatag

SEQ ID NO: 1506 - DNA, 7422 bp, Saccharomyces pastorianus
atgaataaatacattaacaagtacactaccccacctaatctattgtcgctacgacaacgggcagatgttaagcatagaacaagaaagaagctttcgcataaatcacgttcccatgatgatgaaatgtctacagcttcaggcacagattccaatcataatggccccaacgattctggcagagccattactggttctgctccccacaacggaaaaatatcttttgtggactcagaattagacacaactttctccactctaaatttaatctttgatagactgaaaagcgatgtaccacaagagcgagcctctggagctaatgacttgaacactactttgacatctttagcaagggaggtctctgtggaacagtttcaaaggtttagtaacagcttaaacaacaagatttttgaactgattcatggctttacatcaagcgaaaaaataggtggtattatcgcagtggatactttgatctcattttatttgagtacggaagaactgcccaaccagacttcacgactggcaaactacctgcgtgtcttaattccgtctaatgacatcgaggtcatgagattagcggctaatacattgggtagattagcagtaccgggtggtacattaacttcagactttgtcgagtttgaagtaaaaacctgtattgactggttaactctaacggcagacaatagttcttcaagctctaaaatggaatataggcggcatgctgcgctattgattataaaggcattggccgacaattcaccttatcttttatatccatacgttaattccattctagaaaatatatggatgccattaagagatgccaaactcgctatacggctcgatgcagccgtggcgttaggtaaatgtctaactatcatccaagacagagaccctgctctaggaaaacaatggtttcaaagactatcacaaggttgtagtcatggtttaagtctcaatacaaacgattcagtgcatgctactctgttagtttttcgtgaactacttagtttgaaggcaccttatttaaggaataagtatgatgacatttacaaatctacaatgaaatacaaggactataaattcgatgttattagaagagaggtttatgccattttacctcttttggctgcttttgacccagcagttttcactaagaaatatcttgataggattatggtttattatttaacatacttgaaaaatattgacgccaatgccgcaaatatctctgacaaacctttcatattagtttcaataggtgatattgcgtttgaagtcggttctaatatttcaagttatatgacgcctatccttgataatatcagggaaggtctaagaaccaaatttaaagtgagaaagcagttcgaaaaggacttgttttactgtattggcaaattagcttatgctttgggcccagcttttgctaaacatttgaataaagaccttctcaatctgatgcttaactgtcccttgtctgatcatatgcaggagactttaatgatccttaatgaaaaaataccctctttggaacccactgttaattcgagaattttgaacatattatccatatcattatctggtgagaaatttgatcaatcgaatcaatatgatttcaataaccaattttccattgaaaaggctcgtaagttaagaaatcaaagttttatgaaaaaaactgctggatctaacgacgatattactgatgcacaaattttgatccaatgctttaagatgttacaattagttcatcatcaatactccttgactgaatttgttagattgatcactatttcctatattgaacatgaagatccgtctgttaggaaattagctgcgttaacctcttgtgatttatttatcaaagatgatatctgtaagcaaacgtcagttcacgctttacactctgtgtccgaagtattaagcaagctgctgatgatcgcaataactgatccagttgcggagattagattagaaattttgcaacatatgggttcgaactttgatcctcaactggcacaaccagacaatttacgcttacttttcatggcgctgaatgatgaaatattcggaattcaattagaagcgatcaaaatcataggcagattgagttccgttaatcccgcttatgtagttccttctttgagaaagactttgttggagttattgacgcaactgaaatactcaaatatgccaaagaaaaaagaagaaagtgcaacattattgtgtactttgataaattctagtgatgaggtagctaagccctatatcgatcctattttagacgtgattcttcccaaatgtgaggatgcttcgtcggcggttgcatccaccgcaataaaagttcttggtgaattgtcggttgtcggtggaaaggaaatgacacgttatttgaaagaattaatgccactgattatcagcacttttcaggatcaatcgaactcgttcaaaagagatgctgcattaacgacgctgggacaactagctgcctcatctggctatgtcattggtcctttattggattatccagaattactcagtattttggttaatattttaaagaccgaaaataatcctcatataagacgtggaacagttcgtttaattgggatcttaggtgctcttgatccatataaacatagagaaatagaagtgacgtcgaagtcaaagagttcagtagagcaaaacgcgccttcaattgacattgcattattaatgcagggagtgtctccgtctaatgacgagtattaccccacagtagtcattcataaccttatgaagattttaaatgacccgtctttatcaagtcatcatacagcgtctattcaagcaattatgcatatctttcaaagcctaggtttacgttgtgtctcatttctagatcagataattccaggtatcatcttggtgatgcgttcatgtccaccatcacaactggaattctattttcaacaactttgttcacttgtatcaattgtcaaacagcacattaggcctcatgtggagaaaatatatagtgtaatcaaggaatttttcacaatcattaaattacaaatcacaataatatcggttattgaatcgatatcaaaagcgttggaaggtgagttcaagagattcgttccagaaactttgacatttttccttgacatccttgagaacgatcaatctaataaaaaaattgtttctatccgtatactgaagtccttagtgacttttggatccaatttagaggattactcccatttaattatgcccgtagtcgtcagaatgactgaatactccgctggaagtttaaaaaaaattgcaatcattacgttggggagattagcaaagaatatcaacctctcagaaatgtcatcaaggattgttcaggcactggtgcgaatcttgaataacggggacagagaactaacaaaagcaaccatgaatacattgagtttgcttcttttgcaattgggtaccgacttcgtcatatttataccagcagttaataaaacattgctaagaaatagaatccaacattcggtgtatgatcaacttgtcaataagctgttgaacaatgaaggcttgccaacaaatatcatattcgataaagagaatgaaatgcctataaaggataagtatgaggatgaaacgcaagtaaaaaaattacctgtaaatcaaaatattctaaagaacgcatggtattgctcccagcagaaaacaaaagaagattggcaagaatggataaggagattgtctattcaattattaaaggagtcaccttctgcctctttacgtgcgtgttcgagcttggtcggcgtttactaccctctagcaagagaattatttaatgcttcattttcaagttgctgggttgaacttcaaatcccataccaagaagacttagttcaagcgctttgtaaagctttatcatcttctgaaaaccctccagaaatttaccaaatgttgttgaacctggtagaattcatggagcacgatgataagccactaccaatcccaattcacacactaggaaagtacgctcaaaaatgccacgcttttgcaaaggcattacattataaagaggttgagttcttagatgagccaacaaattctacaatagaatcattgattagcatcaataatcaacttcatcaaacagattcagccattggaattttgaaacacgcacaacagcacaatgaactacagctgaaagaaacatggtacgagaagcttcaacgttgggaagatgctcttacggcttataacgagagagaggcggcgggcgaagactctgttgaggtcatgatggggaagttgagatcgctgtatgcccttggagaatgggaacaacttgcaaatctagcttctcaaaaatggagtacggcaaagcctgacgtaaaaaagtctatggcaccattagcagctggtgctgcatggggcttagaaaaatgggatgacatagctcaatatacaagcgtcatgaagtcgcagtcaccagataaagaattttatgatgcaattttgtgtctgcataggaataacttcaagaaggcagaggcccatatttttaacgcaagagatcttttggttactgaactgtcggcgctcgttaatgaaagctataatagagcatatgtcgtcgtcgttagagcacaaattatcgcagagttagaagaaattataaagtacaagaaactaccgcaaaattccgataagcgttttattatgagagagacttggaatacaagattattgggttgtcaaaaaaatattgatgtgtggcaaagaattctgcgtgtaagatcgttggtaataaagccaaagcaagacgcccagatgagaattaagtttgcgaatttgtgcaggaaatccggcagaatggcgttagccaagaaagtcttgaatacactacttgaagaaacagatgatcctgatcaccctaatacagccaaagcatctcctccggttgtttatgcccagctgaagtacttatgggctacgggatcgcaagacgaagctctgaaacaattaatcaactttacttctagaatggcacatgatttgggattagatccaaataatatgatagctcaaagtgttcctcaacgaaacaaaaaaaatccgcgtcatattgaggattatactcggcttctggcccgctgcttcttgaagcaaggagaatggagagtttgcttacagcctaaatggagactaagtaatccagactcgatcttaggctcatacttgcttgctactcattttgacagtacttggtacaaagcctggcacaattgggcattagccaattttgaggttatttctatgatgacatccgtctcaaaaaggaagcaggaaggtggtgattctgcttctagtagcgacataaacgaatttggaaacggtatgattggggttaatacatttgatgctaaggaggttcactattcctctaatctgatacagaggcatgtgatcccagctattaaagggtttttttattccatctctttatcggaatcaagctctctccaggatgccttaagactgttaactttatggttcacatttggtggtatcccagaagcgacccaagcgatgcacgatggttttaatttgattcaaattggtacgtggttggaagtattgcctcaattgatatccagaattcatcagccgaatcaactcgttagcagatcattaatctcactactatctaatttgggtaaggctcatccacaagcattggtatatccgttaatggtcgcaatcaagtctgaatctctatcgagacaaaaggcagctctgtctattatcgaaaaaatgagaatacacagcccagttctagtcgaccaggcagaacttgtcagtcacgaattgattcgagtagcggtgctatggcacgagcagtggtatgaaggtttggacgatgctagtaagcagttttttggcgagcacaatactgagaaaatgtttgccgctttagaacctttgtatgaaatgctaaagagaggtcccgagactttaagagaaatctcttttcaaaactcatttggaagggatttaaatgatgcctatgaatggttaatgaattacaaaagatctaaagatgtcagtaacttgaatcaagcatgggatatttactataatgtttttagaaaaatcagtaagcaattgccggaattacagacattagaattacagcatgtctcaccaaaattattatctgcccatgacttagacttagctgttcccgggacctacgctggtgggaagccaatagttaagatatccaaattcgagcctgtgttttcagtaatctcatctaaacagagaccaagaaagttctgtatcaaaggtagtgatggtaaggattataagtgtattttaaaaggtcatgaagatatcaggcaagatagtttggttatgcaattgtttggtttggttaacacattgttgcaaaacgatgccgagtgttttagaagacatttggatatccaacaatatcctgcaattccgctatctcctaaatccgggctattaggttgggtgccaaatagtgatacatttcatgtgttaattaaagatcacagagaagctaaaaaaatcccgttgaacattgaacattgggtcatgttacaaatggcaccagattatgataattcgacgttattacaaaaagtggaagtgtttacatatgctttgaacaatacggaagggcaagatctttataaggtgctgtggttaaagagtaggtcatcggaaacatggttggaacgtagaactatttacacaagatcgttagctgtcatgtctatgactgggtatattctaggactgggtgatcgacatcctagtaatttgatgttagatagaattactggtaaagttatccatattgactttggtgattgtttcgaagctgctatcttgagagaaaagtttcctgaaaaggtgccgtttaggttgactaggatgctaacttatgcaatggaagtaagcggtattgaaggaagtttccgtatcacctgtgaaaatgttatgaaagttctcagagataataaggattcattgatggccatcctcgaagcctttgctttcgatcctttgattaactggggatttgatttgacaacacagaaaatcgaagaggaaactggtattcaattgcccgtaatgaacgccaatgagttattgagtaatggtactattacggaagaagaagttcaaaaagtagaaaatgaacacaaaaatgcaatcagaaatgcaagggctatgttggttttgaaacgtataacagataaattgacaggaaatgatataagaaggctcagcgatttggatgtgccggagcaagtagataaattgattcaacaagctacctccgtggaaaacctatgccagcattacataggttggtgtcctttttggtag

SEQ ID NO: 1507 - DNA, 603 bp, Saccharomyces pastorianus
atgaagatctattacatcggtgtgttccgctctggcggagaaaaggctctagagttgagtgaggttaaagatttatcacaatttggtttttttgaaagatcaagtgtaggccagtttatgactttttttgctgagacggttgcttccagaaccagtgctggccaaagacaaagtatagaagaaggtaattatattggccacgtttacgctaggagcgagggcatatgtggggttttaatcactgataaggaataccccgtcaggccagcttatactcttttgaataagatattggacgagtacttggtagcacatcccgaggaggaatgggccgatgttactgagacaaatgactcgctgaaaatgaagcaattggacacatatatcagtaagtaccaagacccttcacaggctgatgcgatcatgaaagttcaacaagaactggatgagactaagattgtcttgcacaagactatcgaaaacgttttacagagaggtgagaagttggataatttggtggacaaatcagaatctttaacggcaagttcgaagatgttttacaaacaagccaaaaaatccaactcatgttgcagtattatgtag

SEQ ID NO: 1508 - DNA, 1389 bp, Saccharomyces pastorianus
atgaaaagacagctcataagacaccactatcctcgaagtggcccttggaatcgtgttttctattccaccaaaaagcccgctaagaatgtctcacccacaacaccagctacgatgacttctttggtgtctcagaggcaggatctcttcatgacagatccattgtctcctgggtccatgttcttcctgcctaatggtactaaaatctttaacaaattaatagagtttatgaaattgcagcaaaaattcaaattcggttttaaagaggtgataacaccattgatttacaagaagactctttgggaaaaatccggtcattgggaaaattactctgatgatatgttcaaagtggagaccactgatgtagaaaaggaagaatacggtttgaaacccatgaactgccccggccactgcctcatcttcggcaaaaaggataggtcatataatgagttgcccttgcgattctcggatttttcaccactacatagaaatgaagcttccggtgcattatcgggactgacaagattaaggaaattccatcaagatgacggacatatcttttgcgctgcatcccaggtgaaatcagaaatcttcaattctttaaaacttgtcgacatagtttacaacaaaattttcccctttgctaaaggtgctgctgacacagacaacaactattttataaatttctccacgagaccagatcatttcgttggggacgtagaagtgtggaatcatgcagaacaagtcctcaaggaaattcttgaagagtcaggcaaaccatggaaattgaaccctggtgatggtgccttttatggtcctaaactggacataatgctaactgaccatttgggtaaaacccatcaggttgccaccattcagttagacttccaactacctgagagattcgatttgaaattcaaagatcaagataattcatacaagaggcctatcatgattcacagagccacttttggctccattgaaagattcatggctttgttaatcgattcaaacgagggccgctggccattctggctaaacccttaccaagcaataatcattcctgtaaacactaagaacgagcaacaactaaagctgtgcaacgctttgcaaaaaaaactacgcaacgaggaaaaggcgaatgatatggagcctgttgctttgaatgattggcacttcagtgctgatttagacatacgaaatgaacctgtcgggtatagaatcaagtcagcaattttaaaaaattactcctatttaattatcgtgggtgatgaagaagtagaattacaaaaatataacatcagagaacgtgataataggaaaagttttgaaaaactaactatgaacgaaatttgggaaaagttcattgatctggaaaaaaactataagtaa

SEQ ID NO: 1509 - DNA, 1017 bp, Saccharomyces pastorianus
atgaacaatacagctgctgataaaatcactgaaggccaggatgaagaatgcaagattgaagtcttggacgatactcatctcgacttcatcagcgcagactcggaattgacccaggatttgcctgatgatgttgagatcatcgacttggtccatttgaaaattcagtcacttgaagacctgaacctttaccggtttaaaaacctgaaacagctgtgcttgagacagaacctgatcgaaagtataagcgaagtggaagtattgccccatgacaagatcgttgatctggatttttatgataacaagatcaagcacatctcttccaacgttaacaaactgaccaaattgacgtctttggacttgtcgttcaacaaaattaaacacataaaaaatctggataatttgacccagctggaaaatctgttctttgtacaaaacagcatttccaaaatagaaaatctgtcctctttgaagtcgctgaaaaatttggagttgggtggtaataacattcattccattgaagccgactctttcgaaggcttgagtaacctggaagagatctggttgggcaaaaacttcctgccaagactaatcaacctacatcccttacataatttgaaaatcctatccattcagtctaataaattgaaaaaaatcgaaaacttggaggcattgactaacttggaagagctttacttatcacacaacttcattaccaagatcgaaggcttagagaaaaacctaaagttaaccactctggatgtcacatcgaacaaactcacctcgttggaaaaccttgaccatctgtctcagttaaccgacatatgggcctcattcaaccagatagaccaatcgtttgagagtttaggcaagaacttgtccaatttgtcacgtttggagaccatttatttggaggggaaccccattcagatggaaaataaaacttcttataggagaaaactaactatgaatctgcctccatctctggagaagattgacgcgacgtatataagaggttga

SEQ ID NO: 1510 - DNA, 378 bp, Saccharomyces pastorianus
atgttcaaatcaatctgcaaaatttcgtcccgcatggctccctctgcgtgccgcaccatgttggcccgtcccgtcatggccaactccatactcgcacaaaggttctactccgccaacttgagccaagatcaggtctctcaaagagttatcgacgtcatcaaggccttcgacaagaactcccccagcatcgccaacaaacagatctcaagcgacactcaatttcacaaggacttggggctggactccttggacaccgtcgagttgctcgtggccattgaagaagaattcgacatcgaaatcccagataaagtggccgatgacttgagaagcgtgggtgaaaccgtcaactacatcgcttccaaccctgacgccaactga

SEQ ID NO: 1511 - DNA, 1611 bp, Saccharomyces pastorianus
atggaagttgctccagcattctcgaccacgcagtcagatatcacgttccagaaggtggacgcccgcgaaatcgataggtccgcctacttaggcccggactacaatggcgatgacctcatgcagctgatctcggattactataatatcgaggccctcgtggcgtacctagctcagcatacggagtataaaagtgtcacgcttcagtttcccgacgacttgatcaaagactcctcgctgataataaggtcgctgcagtcgaggtttgccgatgagacggtgaagttttgggttcttgcagacacggcgtacagcgcatgctgtgtggacgaggtcgctgccgagcacgtccacgcggacctggtggtccatttcggtgatgcatgcctgaacgccatccaaagtctgcccgtggtatactcgttcgggaccccatatgtagacataccgttggtggtggagaacttccggagggcgtttcctgacctgtcctcgaaaatatgcttaatggctaatgctcctttctccaagcacctgtcgcaactgtacagtgtcttgacgcgcgacttacactacaccaatatcatatattcgcagataaacacctctttcgtagaaaagagcctcgtaaccatactggatacgttcgacaccccggagaatgtgacccaggttggtgagttcggcaacaacagtatactgcttggaccaggaggaaccacagacggcgtcttgcccgaggaataccatctcttccacctgaccacgcctcaggacccaaggttgctgtacttgtctacggtttttcaatcaatccatatctttgatccagctgcgtctgatcttgtgacagggcccttcccctcgcttatgaagcgttacaaatacatgcatgtggctaggactgcgggctgtataggtattctggttaacacgctgtcgctgcgcaataccagagaaactatcaacgagctgatcaagctcatcagggcgcgtgagaagaagcactaccttttcgtggtcgggaagccgaacgtggccaagctggcaaacttcgaagacatcgatatatggtgcattctcggctgcaaccaaagcggtatcatcattgaccagttcaacgagttttacaagccgatcatcacaccgtatgagctgaatttagcgttgagtgaagaggtcacttggaccgggaagtggatcgtggacttcaaagacgccatcgatgaaatcgaacagaacatgggtggagacgatacgtctgcgaccacttcccacagtgacgagccagagtttgacgttgtgacgggcaaatacaccagcacatcaaggccactacgagcgctaacgcatttagagctggaggcggctgaaaatgaagacgatcgctccaagcagctgactacgagacataccgcctcgggcgccattatcaagggcacagtatccacttctgcggcagcactacagaaccgttcgtggaagggcctgggcagcgacttcgactccgtcgaagttgatgaaaccggtgcggacatcgaagaaggtatctccggtgtcgcacgtggctatgggttcgatcgtacagacgccataaacaaggagcaaaagtaa

SEQ ID NO: 1512 - DNA, 1191 bp, Saccharomyces pastorianus
atgtttaagaaatacaagaaccaagacttggatatggcattctggtggaagaaaaacccgaaaactccttccgattatgccaggttaatagtcgaacagctgaacaaattcagctctccatcattaacccaggataataaaagaaaggtgcaagaagaatgtaccaaatatttaatcggcactaagcattttattgttggtgatacggaacctcacccaacaccagaggctattgatgaactttatacggccatacatcgcgctgatgtattccacgagctactactacattttgtggacctggagtttgaagcgagaagggaatgcatgctgattttctctatttgcttggggtactccaaagacaataaatttgttacggtggactatttagtctcacaaccaaagaccatttcattaatgttaagaacagcagaagtcgccttacagcaaaaagggtgccaagatatttttctaacggtggggaatatgataattgaatgcattaaatatgaacaactttgtagaatcatacttaaggacccccagctatggaagttcttcgagtttgcgaagttgggtaattttgaaatcagtacggaatctctacaaatcttaagcgctgcattcactacacatcccaagttagtctctaaggagtttttttgtaacgagaataacattatcagatttatcaaatgtatcaacaaactaatggctcacggaagttacgtgactaaaagacaaagcaccaagctgctggcctctttaatcgtgataaggtctaacaactcattgatgaatatatttatcaattctccggaaaatctaaagcttataatgactttaatgactgacaaatctaagaatttacagctggaagcattcaatgtatttaaagtaatggtggcgaatccaaggaaatcaaaacctgtttttgatatccttgttaaaaacagagataaactattaacatactttaaaacttttggtttagattctcaagattctactttccttgatgagagggaattcattattcaagaaattgattccttaccacgcataatttcatcgacgacagacaatactaataacaatgtttcttcgaacaatttaaactcgccatcctcagtaataaacaatccatcgacactcttgactcattcaacaacgcctgattcaagataa

SEQ ID NO: 1513 - DNA, 1404 bp, Saccharomyces pastorianus
atgtctagtgctcaaatcgacaatgctctgtcgagttctaccactactctagtagacctgcccaataactctacttccatccagagaaaacaataccccaaggacgacaaggccctcaataggctattagttgaactaaagaataaccctgactcgaacatccttccgcatgaccaatcacattctgaaattttccaagctttgaaaactcgcattggtaagatcaataatgaaacctgtgatcccggtgaagagaactcttttttcatatgcgatttgggtgaaacaaaaagattgtattataattgggtcaaagaactaccaagaatcaagccattttatgcggtcaagtgtaatcccaaccccgaggttctttcattgttagcagaattaggcgctaactttgactgtgcttccaaagtagagattgacagagcactatcaataaacatttctccagatagaatcatatacgccaacccttgtaaagtagcgtcttttattagatatgcagcatcaagaaatgtaatgaagtctactttcgataatgtggaagaactatacaagatcaaacgattccatcccgagtctcaattattattaagaattgccactgatgattctacagctcaatgccggctttctgccaaatacgggtgcgagatggataaggtagactcgttattgaaatgcatcaaagaattgggtttgaatttagcgggtgtttcatttcatgttggctcaggtgcttctgatttcacgagcttatacaaggctgtcagagacgcaagaacagtatttgaaaaagccgctaacaaatacaacttgccgcctttgaagattttagatataggtggcggattccaattcgaatctttcaaggaatcaactgctgttttgcgtttagctttggacgaattctttcctgtgggttgtggtgttgatctaattgctgagcctggtagatactttgtggccacggcgttcactttagcaactcacataatcgccaagagaaagctatcagaaaaggaagcgatgatttatacaaatgacggtgtttacggaaacatgaactgtattttatttgaccatcaagcgcctcacccaaagactttataccacgattcgaaattctactacgacgattttgaatccaccagtgccgacctcgaacctgtcaataagacaagagccacatatccgtataaagtgtccatttggggtcctacatgtgacggtttggattgtattgccaaagaatactatatgaagcatgatgttgtcgtcggcgattggttttatttccctaatctgggcgcctatacttcgtctgccgctactcaatttaacggttttgaccagacagcggacatcgtttacatcaattctgaatccgactaa

SEQ ID NO: 1514 - DNA, 1284 bp, Saccharomyces pastorianus
atgcgtaagtgtaaaatttttgttggtaactctcacccagagttaggtaacatggtctgtcaaagattaggtattgaaccagctccatgttcattaaagaaatttgcaaacggtgaaacctctgttcaaattggtgtctctgttcgtgacgaagacgtgtatgtcatccaatctggttctccatcaattaacgatgatatcatggaattgttgattttagtctctgcctgtaggggcggatctgcaaagaaaatcacagctgtcattcctcagtttccttattccaagcaatgtaaaatgaagaagcatagaggtgctatcactgcaaggatgttggctaatctactggttatggccggtgctgatcacgttgtgtccatggaccttcatgcttcccaaatgcaaggttttttcacgaaaccagttgacaacctatatggaggtccaagcttagctaagtggattagagaaaatgttgaagactatgaagatgcagtagttgtctctaagaacccaggcggcactaaaagagtcactgctcttgctgattctttgaagatcaacttcgctatgattcataccgatcgtcgtcgttctaaggatctgtattctcaaaacaaggatttacaacagttgaaattgaggaagcaatcgatgttgaggaaaaacaaacctatcgtgagacaaggtgatcatccaaatgaggaagaaaacatcattctgagcaacggtatccaaactgctagaatccgtaacggtcacgttatcggcgacgacgaagcagatgacgatgaagacgccattttggaatctgacggtgagcttcattctatcgacgtcatggactcgcatggtttaggcggtacatacgacgctgtcgactctgaagacgaagaagaagtgccagttctttatagagaacaattaattacattggttggtaacgttcgtggtcgttccgccattattctagatgatatgatcgatagaccgggctctttcattagtgcagccgaacatctggtccaaaactgtggtgctaagaaggtttatgttgtcgccacccatggtatatttactggtgactgtttggaagaactagaaaaatccgacgccatcgacaccatcgttgtcactaacacatatcctatttcaagagaatgtatagctgggtccaagaaattggtcactattgatgtctctccaatttttgccgaatgtattcgtcgtgatcattatggtgaaagtatttcggtgctgtttgactctttggcagctctgtaa

SEQ ID NO: 1515 - DNA, 1860 bp, Saccharomyces pastorianus
  modified_base (652)..(692): a, c, g, t, unknown, or other
atgcccgagtacacattattggctgataatataagggagaatattgcccatttcgatccacatgacttatttgaaaacttgcacaccattgtccatgaagatgacaatcaagagaacgaggaagctgagcatttcaattatgatcaagtgctggataagtccttactgtcaagaagttctattgtgggccttggtttaggtttaatgagtccggtattaggaatgtgcacaagcatggctattggactaatcaacggtggcccattaactataatgctgggatttctaataagtggggtgtgcatatggttctcttctctttcactcggggagattgtgtctaaatttccaatggaactgcatgtcgggagtgccatgttagcgccagagaaactcaagctggcatgctcctggtacacagggtggttgatgcttatagggaattggacgatgagcacgagtatcacttttgcaggtgctcaactaactatttctctgattttgatgacaaactcagatcttatatccgaatcacatttgatattttacacagtcattgtattctatttagtggtgaccattgtaggcttcgtgaatttgaagtttgcaagattcattgaaacaataaacaaagtatgcgtttattggatcnnnnnnnnnnnnnnnnnnnnnnnnnnnnnnnnnnnnnnnnntcacaaaggaaaatttagatctttgaagtacgcactatttcattttgacaatggtctatcgggatacaaaagtgcatttctttcgttcattattggcttccaacaatccaactttactctacaaggtttcagtatgctacctgctttagcagatgaagtcaaggtccctgaaagggatattccccgtggtatgtcgaatgccgtattactatctgcattttctggggttattttcctcataccaataatgctaatccttcctgataatgatttactctttacaaatcataaagttcttccaattgtgaacatttttacaaaatcaaccgattcggtggttctatcattcttcttagtgctcctgatcttaggtaatttgttgttttctggaattggttcaattaccacatcttcccgtgctgtttatagttttagtcgtgaccgtgctataccgcattatgataaatggacgtatgtggagccggattctcaatcaaaagtcccaaagaattctatcatattgagtatggtaatatcatatttccttggactgttagcattgatttctacagctgcgtttaatgccttcataggagccgcggtattgtgtctctgttccgcaactttcattcctttggttttagtactgtttaccagaagaagggccattcggagtgcacctgtgaagattagatataaattcggttggtttatcaacattatttctattgcctggctattattatctatggtttccgtttgtctgccaacgcaggttcccgtgactttcaaaacgatgaattacgctttgatggtttacatattttgtatcctggcgatcactggtctctatttcaagtgggggaagtataattttaggttgcctttagctgatgacatcaaggcaccgattccgagtgatccggaagaaacagtttttgagctagatgatagtaatgttgagcataccatgagctctgaggtcacaatgcaaagctctacatggggcaaatcagaagagagtttagggaaaccttatctacaggacaattttgaaaatccatttgaagagaatgaggaaaacgtgataactgatgatgatagtggtgagcagcacgtacaggaacagggattcgatctcgctgatgatcgcaggcacgatatatga

SEQ ID NO: 1516 - DNA, 417 bp, Saccharomyces pastorianus
atgatattccttaaatctgtcatcaaagtaattgacaattcaggagctcaattagcagagtgcattaaagtcataaaaaaaggctctccgaaaagccctgcaatagtcggagatagaatagtgtgtgttatccagaaagcaaagcccttaactcaaaacattacaggaacagccaatactaatcgtgtaaaaaaaggtgatatctgtcacgcaattgtggtaagatctaaacaacgtaatatgtgcaggaaggatggctctatggtcgcatttggagacactgcctgtgttttgattaataagaacactggcgaacctctcggaacaagaattatggctaacgatggctgtgtagatagaaccttaaaggaaaagggatacaataagatatgctcgttagccagtagagttatataa

SEQ ID NO: 1517 - DNA, 1197 bp, Saccharomyces pastorianus
atgtatgttgatcctatgaacaataatgagatcaggaaactgagcattactgctaaaacggaaaccacgccagatgacgttaggcagaacattctcgcaaacgcacattcggtgcatgaggaatgttcttctattacgcccgttacaataaatgggcaaaacatcgaaaaggtgaaagaagaaatttctcctgatgattatctggctaaaagacccatgttgcaatacagagaaacttcaggtaagtactccttaggtgattttcaaattttgagaacactgggtaccggctcattcggaagagttcatctaatccgttccaaccacaatggaagattttatgcgttaaagacattaaagaaacacactatagtgaaattaaagcaggtggagcataccaatgatgaacgccgaatgctgtcaatcgtatcacatccattcatcatcagaatgtgggggacatttcaagactctcaacaagttttcatggtgatggactacattgaaggtggagaattattttctttactacgtaaatctcaaaggtttcctaacccagtggccaaattttatgccgcagaggtctgcttagctttggaatatttgcatagtaaggatataatatatagagatttgaaacctgaaaacattctcttggataaaaacggtcatattaagataactgactttgggtttgcaaaattcgttcctgatgtcacatacacactatgtgggaccccagattacatagcgcctgaagtggtcagcaccaagccatataacaagtcagtggattggtggagtttcggaatattaatctatgaaatgctggctggttatacaccgttctacaactccaataccatgaaaacttatgaaaatatattaaatgcagaattgaagttcccgccatttttccatccggatgcacaggacttattaaagaagctgatcaccagagacttaagtgaaagactgggtaatctacagaacggaagcgaggatattaagaaccacccgtggttcagcgaagtgatatgggagaaactattagccaggtacatagaaacaccgtatgagccaccaattcaacagggtcaaggtgacacttctcaattcgatagatatccagaggaagaattcaattacgggatccaaggggaagacccatatatggaactgatgaaagaattttag

SEQ ID NO: 1518 - DNA, 1206 bp, Saccharomyces pastorianus
atgatgaaaagattctttccccttaaaattcagactcgtctgaaatgcgactacccattacttactttcgagcaattggtttctacaaatggaatagggaaagggaaaaccggcagaatttctttaagggattacgtagaatggcaaaatttcccaaatataatgaaaagagaaaacttctttacacaaagaaaacaagcgtctacgggatccatagatcccattttatttgacaacattatcaattatgatccagtcttcagcgagtgcctcgcaaaatggctacttgtcaactacaaattgaacgactacccgtattatgacctcaacatcgtcaatatttacacggatttacctcaagggattcaaatatgcaaaagtttaatgacatatctaaaatcgacattgtctgaaaacatgtttcagaggataaagtactttatgatgcctttatacaaatgtgacaatgtaccattaaaggtcttagatggaatacctggagaagtaagcttagttcaagattatccggtatctccgactttattgaaagaaaagtttctcatagaggaccccgttaatattctaatgcttaacgatgttattaaatacacgacccacgatttagtcagatactcttcataccataacgcatgggagcaatgctttgtagatgtggatgagaatggacaaaataataaaacatttgatagtgatattgactattcgtgcaaacttgcgttagatcaaatgttcagtgaacaatcaaatatagttcctgataaagaaatttatattcctactaaattaattgagatattcacaacaatcaaaaataatattccagaacatcgactcttcaccgtggacactccacaaagatcgagcccaacattattatcaatattaaaaagcttattaaacccacgcttaacagggtcgagccagatagtggaaccatactccgattcaatcttttctgatatttgcagcggaagggtgtatttcatgacggacttcttacagttacaaaaaatctacaatgatatcaatgaattctctaggagctgtgaagtcgaggatattagcgattttgttgaaaaatggatgagccctagtgagacagacacacgcacattgtcgaatggaaagaagcctcatctggaagacataagcaacagtactttggcaacacttcattccacataa

SEQ ID NO: 1519 - DNA, 441 bp, Saccharomyces pastorianus
atgggtaagagaaagaagtcaacaagaaagccaagcaagaggctagtccaaaagctggatacgaaattcaactgtttgttttgtaaccacgaaaaatctgtatcatgcactctagataaaaaaaacagtataggaactctttcatgcaagatttgtggtcagtctttccaaacgcgtataaattcgctatcgcaaccggtggatgtatatagtgattggtttgatgctgtagaagaagtcaattctgggcgcggaagcgacacggatgatggtgatgaggactccaatagtgattatgaaagtgattcagatcaagagggcataagcacgaaagttcgtggcgaagtcgattctgatgaggaggaagtagactcggacgaggagagaatagggcaagttaaaagaggtagaggcgcattggtagatagcgatgatgaataa

SEQ ID NO: 1520 - DNA, 303 bp, Saccharomyces pastorianus
atgctaaccactcagtggctgttattgagaagtacagcaaggggtgcctctcttgttagcaagatccgtccttgttttaaacctattattgcgtactcgagaaaactgtatagctcaacctcgtcacaagccaatgccattaggtcgctgagcatgagtgaaccctgtaaggagaataaacttacaaattcaaaacttgtaaatatctacagtaaacgttcactgttcacagaaactggtcatgcttgtgcgaaatgccaaaaaacgtcacaattactaaagtatgtttacacaaacgcttga

SEQ ID NO: 1521 - DNA, 1890 bp, Saccharomyces pastorianus
atgctaaggagatgcttgaatttttcactacgaaacattcgatataattcaacccttacgaacgcaagtttgcagagttcgaatttgacgaatcttatagacactaatattaaagatataaatgtcctttcaccgtacagagacgaagccggtaatttgactcaaggagctaactcaaaagaagccaggttatcgtttaaaactctccagggccaatcgtatcgtgatcagttagacttgaatcccgatgtgagcaaagcaatcaataataatattatgtccgtacatattcccaataacgtgagaagagttgcaacaaattactacagtgagctccaggagccgaattcattgcatcgcccttgcaaaacaaaaatggaggttgatgctcatatagcgtctatatttctacaaaattatggctctgtattccaaagtttaaaggaattacaaaaaagagtaggcgctgagaactttaagcctcagagggttctggatgtcgggtttggtccagctactggtatagttgcactgaacgatgttttaggtgaaagctacagaccggatgtaaaagatgcagttatattgggtagtgctgaaatgcaaaaaagagccaaaattattttaagcagacaaatcaatgaagttgttgatcctaccgaaatggaatcaactgtagaggaagggggggggattaataagcaaggcgatgagatccctcaagaagatgagcttgtcggagaagtaatgactaaaaaaattaatgtgatgaccaatttacgatcttcaattcccgggtcgaaagaatatgatctcgtaattttaacgcaccaacttcttcatgacaagaaccagtttccaattcagatagatgaaaatattgagcattatttaaacatgttggcacctgggggccatatcgttattgttgaacgaggcaatccgatgggattcgaagttatagctagagcaagacaagttatgcttagacctgaaaatttcccagaagaatttggtaagattcccaggccttggttgaggggaatgtcgaataaaaacaaaaatgacgtagggtcaatgaacataccgagtgattattttttaaaggtcattgctccttgccctcatcagaggaaatgtcctctgcaagtagggaacccaaacttttacacgcataaagaaggtaaagatttaaagttctgtaattttcagaagagcattaaaagacctaagtttagtatagagttaaaaaagggcaaacttctggccacatcatgggataattctcaaggagatgcctctagattaaaaggcactggaaggagaaatggtcgtgattatgagattctaaattactcctacttgattctccagagatcgcataaagatgagaaatctttgaaggaaattgagaaattacggaatgaaagtggcaatgtcaaatacgatgttggatcatcaggtgacgacacacaggatacttggccgcgcgttataaatgaccccgtcaagcgtaaaggtcatgtcatgatggacctatgtgcaccatcgggggaacttgaaaaatggacggtttcgaggtcattttccaaacaagcttatcatgacgcaagaaagaccaagaaaggtgatttatggactttaggggccaagacacaaattaaagggttgggagatttgaatgtaaaaaagtttaaaaaattagaaaaggaaagaatcaagcaactcaagaaggaagaacgtcaaaaatcaagagagattattgaatcctataatgaccttgaagactctcttcaatttggcaataacaagctgtcaaacattgaagtaatgaaggaaatgtcaaacgttcacggtcactatttctcacagcatgtaaataaaaaatga

SEQ ID NO: 1522 - DNA, 744 bp, Saccharomyces pastorianus
atgccaaagttaattttagtcagacacggtcaatccgaatggaacgaaaagaacttattcaccggttgggttgatgttaagttatctgccaagggtcaacaagaagccgctagagccggtgaattgttgaaggaaaagaacgtccacccagatatcttatacacttctcaattgtctagagctatccaaactgctaacattgctttggaaaaggctgacagattatggatcccagtcaagagatcttggagattgaacgaaagacattacggtgctttgcaaggtaaggacaaggccgctactttggaaaagtacggtgaagaaaagttcaacacctacagaagatctttcgatgtcccacctccaccaatcgaagcttcttctccatactcccaaaagggtgatgaaagatacagcttggttgacccaaatgtcttgccagaaaccgaatctttggctttggtcattgacagaatgttgccatactggcaagatgtcatcgccaaggacttattgagcggtaagaccgtcatggttgctgctcacggtaactccttgagaggtttagttaagcacttggaaggtatctctgatgccgacattgctaagttgaacatcccaactggtattccattggttttcgaattggacgaaaacttgaagccatctaagccatcttactacttggacccagaagctgccgctgctggtgccgctgccgttgccaaccaaggtaagaaataa

SEQ ID NO: 1523 - DNA, 909 bp, Saccharomyces pastorianus
atgttttccagattatccagatcccactcaaaggcattgccgatcgctttaggtactgcagctatcgcagcagcagcagcattctactttgctaatcgcaaccagcattcatttatcttcaacgactcgaacaaggtgttcaagggcgacgacaaatggatcgatttgcctatatctaagatagaggaagaatctcacgataccagaagattcactttcaaattaccttctgaagactcagaaatgggattagttctagcatcagctctatttgctaaatttgtcaccccaaagggttctaacgttgttagaccatatacccctgtaagcgatcttgctcagaagggtcacttccaattagtcatcaagcattatgaaggtggtaagatgagttcacatcttttcgaccttaagccaaatgacaccgtttcgttcaagggtccaataatgaagtggaaatggcaacctaactcgttcaagtcaattaccttgctaggtgctggtacaggcattaaccccttataccaattggctcacaacatagttcaaaaccctaatgacaagaccaaggttaacctgttatacgggaacaaaacacctcaagatattttgttgaagaaggagttggacgatttgcaggagagattccctgaaaaattcaccgttaattattttgtcgacgacaagcaagaagtcttagattttgacggcgaagtcggattcatttctaaggacttcattcaagagcacattccaggcccaaaggaggacacccacctgtttgtctgtggccctccaccattcatgaatgcttattccggtgaaaagaaatcgcctaaggatcaaggtgaattaatcggtattttgaacaatttgggctattcaaaggaccaagtcttcaagttttaa

SEQ ID NO: 1524 - DNA, 639 bp, Saccharomyces pastorianus
atgttcattctttcaaagatctcggatttggtacgaattccgccagatcaatttcatcgcgatacaatatcggcaatcactcaccagctaaacaataagttcgcaaacaaaattattcccaatatcggtctttgcattacaatttatgacttgttaactgtcgaagaaggccaattgaagccaggcgatggctcttcctatatcagtgtcacatttcgagccattgtgtttaagccatttttaggtgaaataataactggatggatttccaagtgtacagctgaaggtataaaggtttcgttgttgggtatatttgatgatatattcattccgcaaaatatgttatttgaagggtgttattatacgcctgaagagagcgcatggatttggcccatggatgaagaaacgaaactatatttcgatgtgaatgaaaaaatcaggtttagaatcgaaagagaagtatttgttgacgtgaaacccaaatcccccaaggaacgagaattggaggaaagagcccaattagagaaagaaatcgatggcaagggcgaagaaactccacaaactgaaaaacctccagcatatgccctactaggtagttgccaaacagatggcatggggctcgttagctggtgggaatga

SEQ ID NO: 1525 - DNA, 660 bp, Saccharomyces pastorianus
atggcgaacgaaattgaattactgcagaaacaaatcagcgaattgcaagacttggtcaagaagcaaagtttgatcatctcgaagaccggggaacgtgttctcgagttgcaagtggccaaacaaaagcatgatgtgaccgatttcgactcgaaatactccaaatccgtctcaaagaagtcagggtccgccactcagtttgactcgaccgattttgccacaaacgaggatctggtggaattggtcaaggaactacaaggtgagctgaatttcatcgaggaaaggtctatcagaagactcgtcaactccttgaaaaaagaggacgacgatgttatagcggcattgccaaacgccgacggtgacattcctgacgtttcaaacggagtgttccctaagacgttgaaagaattcgaaaatatttcagattctatgttgatcagactggctaaattctacgaaagactgccaccaaccataaaggagcaagaagatttcgaaaactttttggaaggaaaagtcgaggctttccatatcaatgagaccaccgacgaagagctttcaaaggaactggagaagttttccaaggtcgaactagacgacgcattcaatgacgttgcccgttatttaggtctctctttaagaagagggacagacatatggtga

SEQ ID NO: 1526 - DNA, 597 bp, Saccharomyces pastorianus
atgtccgtcatgttggtcaaactgggactcaacaaatctgctttgttattgaaaccatccgtcttctcaagagccgcagccttgagctcctcgaggagactgcttttcaatacagccagaacaagtctttgctccacctcatctttgaagaacgtagccaccgaaatgaacaccaaggctgctattgccgaggaacaagtgttaaacaaacagagagccaagagacctatttccccacatttgaccatttaccagccacaattgacctggtacctctcttctatacaccgtgtctcgctggtgtttatggggttgggattctacttgttgaccattctcttcggtgtttctggtctactaggtttgggtttgactactgacaaggtctctgattggtatcaccagaaattctccaaaattaccgaatggtccataaagggttccttcgcttacttatttgcgatccacttcggtgacaccattagacacctgttttgggacgcggccaaggaactgaccctcaaaggtgtatacagaaccggttacgccgttcttggcttcaccgccgtcctcggcacttatttattaactttatga

SEQ ID NO: 1527 - DNA, 210 bp, Saccharomyces pastorianus
atgaacgctaacaaactgaggcagtataaccagcttgctcacgaactcaaggagctgcaaacaaatttacaggaaacgacaagacaactagacattatgtcaaagcagagcaatgagaatttggttaaccaattaggcaaagtacacggaagctggttaattggtagttatatctactatatggagcagatgcttggaaaggcacagtag

SEQ ID NO: 1528 - DNA, 396 bp, Saccharomyces pastorianus
atgtttggtccatttaaattaacaagccctgtcgctggtggcctactatggaaaattccatggagaatgtccacgcatcaaaaatgccgtcaaagagaaaggcttagaaacgttgaccaagtaataaatcagttaacattaggcctacacgttcagagatgtcagggtaaagggctgacttaccaagaagccttggaaagtaagaagaaatacaagccaagaagtaaggtgttgagattattgaacaagccctctgtctttcccaaggagagccaaatgtcatccaaagacaaatattgggcatttgataaaaaagccaccggttacaggaagggtattcataaggtacctaagtggactaagctctccattaggaaaactccgaaattcttttga

SEQ ID NO: 1529 - DNA, 1308 bp, Saccharomyces pastorianus
atggttgacgtaatgagcgcagagcagacctttcctcgagcaattcgtctgttgaagtgcgctggaggctatatgagcagtttgaaaataatacatatagcaggaacaaatggtaaggaaacagtgtctacatttttaacatccatattacagggtacggaaccacagcggcagaaggttttggttggtagatatactacttctttcttgcttaacgatagagaagctatcagcgttaacaatgaatccatttctttgaaagagtattctgagattgcgaacagccttataaaactagacgaatctttaaatttacagtgtaacaccattgagctgctaacaagtatagcattcgtatatttcgccaagaaatgttgccagtggtgcattatagaaaccggactaggtggcaaatgggatcctgcaaacttgattcctcgccaaaacaaaatttgttgtgctattaccaacgtcgggataagcgacgagaagctcttatgtgatgctttatctctaattacgtacgaatattcaaaaaaaaaagtgcacactataccgtttgcggtattggatgggtctaatgatgaatttgtacgaaacgcaatatcgagggagtgtagcaacgttggttgcaagttacacatcacggatccctcccttgacaattgcagtgtacgtacagactcatggggcacacttgaaattcggcaggtgccatataatgaggaggatcagatatttaacctaagggtagcaattgccgtcttagatttcctgaaaaaggaaggaaaagtttgtatttcgaagggccaactatccaagggcttaatatctgtcgactggccgaaaagcttacaccaattggactactgttacgaagcaaatagaggaaagagaatagcgctactactagacaacgcaaacaatgcaaaggcagcacagaatttagctagctatttaaggacaaaatacggcgatactccactaacttttgtcgtagctataacaatgggtaagaaattaccgcccttacttgatccgttgatccgtacgcaagatcatgttatagtgactaggttcggatctgtggttggtatgccttggattcaatctttcgagccaatgcaacttttcacatttatcaaagaccgttacacgaaaaatgtagatatacaaccagatcttcatagtgtttggacttttctagaagcaaacaggcttcaaactatggcgcctgttatcgtatgcgggtcactgtatctttgtaaagagttattataccaacacaattgtcatttgagggtataa

SEQ ID NO: 1530 - DNA, 741 bp, Saccharomyces pastorianus
atgagtacagataaagagattagggtttcacctggtatctgtacaaaagttgagcaaatattagacttgatctcccgttatttgtcatcttacattcatgttctgaacaagtttatcagtcatttacgcagagtggccacgctacgattcgaaagaactactttaattaaatttgttaaaaaattaagattttacaatgattgtgtactaaactacaatgcatcagactttatcaatgaaggtacaaacgaatcgggttcagatgccgaccctctggataaggtcatcttaccaatagcttcgatgtttgtcaaatgcgtcgaaacatttgatttactgaactattatctaacacaatcgttacaaaaggaaattatatctaagactttgaatgaagatctgacgctaacgactgaatctatattagctattgacgatacttacaatcattttgtgaagttttcccaatggatgattgaatcattgcgcattggcagcaacttgctagatttggaagtggtacaatttgtcattaaatgtgctgatgaagacggtacaaacaccggagaaactgacaatatcttcttacaggaaattgttcctgtcaattcagaagaagaatttttctctttgtcagctgcatggcactctatcttagatggtaaactaaatattatggatcaagagttcgatgtcgtcgccactaaatggcacgacaaatttggtaagttgaaaaattga

SEQ ID NO: 1531 - DNA, 1875 bp, Saccharomyces pastorianus
atgatggcttttgagaatacaagtaagcgaacaccccaggagttcgtagcacctgtggatccaaagaaaagaaaggttcaattctccaatagtaccgggctagtaacactgcaatcagaggaaatgaaagatgaagtgttttcgacagctatgtatgccaggttcgtgaaatctgccttagatgatctagacaagaatgactcaacccaaatcagcataattgccaaccaagtagcacttccgacaaagaattctgaaagaatcgaggataagaatttcaatgttcttttggatatcttatctagtaacattaacaggatagaatcctccaggggaactttcctgatacaatctattataaactttgagaagtggtgggaattacctccacaaactctaagtaaatatatatatttcattaaaatcctttgctcgagtatacccaaatggtggcaagacgtttcgatgatattggtatcttgttttgttttaccagtcgaacaaacggtatgtcatcatgacatgcttaaatatttcttaaggatgatcccctcttcgatgggattcatagatacatatttggccaaatttttccccaataagaatgatactcagaaaaagttggttaattatacttcaaacttactaaaattgagaggctactgctctgaactgggattccaaatctggtccttactaatagaaagaactatttcgattgatgttgaactacaaaacgaattggatgaattggatgacgatgaactagagaatgcagagttagtggatgatgaagacacagaggacgaagacttgggagatgacgatgaaagtgacgaagataacgataatgaaggggcaaaatctggcataactgacatcaatcaaagcgatgatgaagacatggacgtcattgagggtatggacggtgctgaagagtataatgtggagctgacacaaggaatcaaagaactatctactaaattggatgccattttaactttagtaagctcacatgtagaagagcaagtaacgccagaaagcttagaaaatggtgacggtgttggcgtattcaatactttaacaacactgtttaaaactcatgtcttacccacttactataccagatcaatccaatatatcatgttccatgtctcgcaacaacaactagaactaatggactcatttttggttactcttatagacatttcgtttgccgcaaatgaagctgccgagaaaaagatcaagtcgttgcaatacttgggatcttacattgcaagagctaagaaactttccagaactcaaattatatttgttgcaagctatttgacttcgtggttgaacagatatgttatcgaaagagaagaagaagtggaccaacgtgggggaatggaaagatttaaacacttttatgctgcgttccaggcattatgttacatattttgctttagacatggtattttcagggacactgacggtaactgggagtgcgaactggacaaattctttcaaagaatggttatatcaaaattcaatcctttgaagttttgcaacgaaaatgtcatgctaatgtttgctcgtatcgcccaacaggaaagcgttgcttactgcttcagcataatagaaaataacaacaatgaaaggttgagaggtattattggcaaggctgatagtgacagaaaggaaagctcggtgcaagcaaacactgcgtcatcctcttggtcattagccaccagacaacaattcattgatttacagagttactttccttttgatcctttgtttttgaaaaattacaagatattaatgaaggagtattacatagaatggagcgaagcaagcggtgaatacgaaagtgatgggtcggatgactag

SEQ ID NO: 1532 - DNA, 510 bp, Saccharomyces pastorianus
atgtctgtgaagcccattgacaacttcatcatgaatagcgttcgcctattcgaggtgaatccatctcagacactattttctatatcgtataaaccacccacaccaaaaaaaaacactaaagtatctttcagaactcataactcgcatctgtcctcgaactacaaatttaccacgaataagagcaaagatgtttcgagattgcttagtgcattgggcccaagaggtgtatctgtaaccccaggcaaaatcgaaaaaaaagcacaattaaagaaaaagcaaaagaacgctaaggtaaaagaatctgataagaagataaaaaccaaaaatattcaaaatgttgtcggtctggtcactttaatcgtgaatactgatgttaagaaaagcgaacctacggccacgaaaacggctgcagggcagaagcaaggtgccaatactgtgcagaataataatggtggctcttcagcttcgaagaagaagaaaaacaagaacaagggcaaaaagaagcgttaa

SEQ ID NO: 1533 - DNA, 2583 bp, Saccharomyces pastorianus
atgttcaagctgaagacaagcgccccaaactacgatgaaactttaaactctaataagggtgatcaaaattcgaccgctgtaaatggtaaggaaacgagccaaatgagacatttgagtattccacataatcaataccagaatccgtccattgcagagtcaaggagaagctctactaggtatgatggaggttattctgccgatataacccctgctcaaataagaattattgataatatagacaacagagcaagactaagaaagacacttcaaagaaattcaaaggtcttgcatggatacagtagcctcagcgagaacgaccgatggtatttcgatctattcgatagaaagtattttgaaaattatctcgaagaaccctcctatatcaagatctttaaaaaaaaggaagagttgaaacagtttgaaaggatgtttttagctcaggagttgaaaattcctgatgtatatagatcacccaattatcaaggagaatcaacaggggccaattccgaactcttcaaaaattcaatatgctgttctacattcagtcacgatggtaaatatatggttgttggttgcaaagatggttctttacatctttggaaagtcatgaactcaccagttaagaggtgggaaatggctcgatcagaaaaatcggttagtttaactagagcgaactctttaaaaatccagagacatttagctagcattagttctcacaacggatccatgtcaagtaatgatttaaaaccaagcgaccagttcgatgcagcttcgaaacaattacatctatacgcaccagttttctattccgatgtgttcagagttttcatggaacataccttagatatcttagatgcgaattggtccaaaaatggatttctaataacagcttcgatggacaaaactgcaaaactatggcatcctgagaggaaatactcattgaaaactttcgttcatcctgattttgtcacttctgcaatatttttccccagtgacgatcgtttcgtaataaccggatgtttagaccacaaatgcaggttgtggtctatacttgataacgaagtctcctatacctttgattgtaaagacttgataacgtctttaactctatctccttctgatggagaatatactattgtcggcacgttcaatgggtacgtttatgttttattaacgtatggtttaaaatttgtttcttcatttcatgtgattgacaaaagcacgcaagggactaccaaaaatagcttctacccgtctttcgaatttgggaaaactcaacacggccctaggattacgggccttcaatgctttttctctgaggtagataaaaatttacgattaatagttactacaaatgattcgagaatccaaattttcgatctaaatgaaaaaagagcactggaagtattaaaaggatttcaaagtggctcttcaaggcatagagctcaactattaatgatgaaaaatgagccagtagtatttacgggtagcgatgatcattggttttacgcctggaaaatgcagacctacaacttatcagcagaaacgaatagcataattccaaatagaaaaaagaggctgagcggtaatatgagtttcaaagggcttttgaggattgtctccaataaaagtacgaatgacgaagcctcgacagaagcctcaaaccaaggtgggtctcgcacaaaccaaaactcttcaaaaactgcccctcagactcaacatgttggtagccaagctatcaaaaataatcattacatatcgttccatgcccatagtgcaccagtcacttgtgctagtattgctcccgatgttgcacttaaaaacgtttcattatcaaatgatttgattttcgagctgacttcacagtattttaaagagttgaatcaaaataataataatgcggaaaataatggcgcaaatgatagcaaacccaccttgcaggctattaaagagtcgggaggatttagcacaaatttatcaaacgtcgtaaataatgttggtacaattttaatcacgacagataatcagggttcgattcgtgttttcagaactgatatcttgccagaaatacgtaagagaatcattgagaaattccacgcttataactcgttccacagtgaagctactgacaaaagaaacagccaaaataatgacagtttattcgttagtaaaatggatgagacagagccggaagaagttgacgaatttagcactgccccaccttcaaatgtagataacaaaagagatcaagaaagtaggttgagcaatgatttttatgagcaaaatttgaacaataaccaagtggtttcaggtaagtcgccaagagccggtgctattttcaaaaactcgatattcaacaaatccaatggcagttttatgtcattaaagtcaagaagcgagagcactaattctacgttattcgggccgcatgatattccgcaaagctctacctcggatccgaagctaaagtgcgacgtttgcaatggatctaagtttgaatgcgtctcaagaaatccgattagtggaggcgaggattatttcacttgcactgactgtggtacgatactcaataatttcagataa

SEQ ID NO: 1534 - DNA, 975 bp, Saccharomyces pastorianus
atgtcatctgaaaattctaaacaggagaatcaagttgagaaaacagcagctcaaaaaatatcaaagtttggttcgtttgtagctggtggcctagcagcatgtatagcggtcactgttaccaatccgatcgaattgattaagattagaatgcaacttcaaggtgaaatgtccgcttcagctgcgaaagtttacaagaatccaattcaaggtatggcggtgatctttaaaaacgaaggtatcaaaggtctacaaaagggtttaaacgctgcttacatctatcaaattggattaaacggttctagattggggttttatgagccaattagaacatcattaaatcaagttttctttccaggtcaagaaccacacaaggtacaaagtgtcggagttaacgttgtttctggtgctacctctggtataattggtgccgtcgttggttctccattgtttttagtaaagacaagacttcaatcgtattctgagtttataaaaattggtgagcaaactcattatactggtgtttggaacgggctggtcacaattttcaagactgaaggtgttaaagggctgttcagaggtatcgatgccgctattcttagaacaggtgctggttcctctgttcaactaccaatttacaacacagcaaagggatttttggtaaagaatgatataatgaaggatggaccagccttacatttaaccgcaagtactatatctgggttaggtgttgccgtggttatgaacccttgggatgttattttgacaagaatctataaccaaaagggtaacttgtacaagggacctatcgattgtttagtaaaaacagtaaaaattgaaggtgtttctgccttgtataaaggtttcgtggctcaagtcttcagaattgcccctcatacgatcatgtgtttgacctttatggaacaaacaatgaagctggtttattcagtggagtcaagagttttaggccataattga

SEQ ID NO: 1535 - DNA, 648 bp, Saccharomyces pastorianus
atgtttgacattaagctgaataggaagacaacagagtttctgcgaaagttcaagagcagtggaagatcaaacaaaagtattgatgaggacattgaggtgtttttacaagggcacgctgtccccattaattcactgctattttatgtaaaggagtacacgaaggataatgatttgccctgctcaatgagagaactgttgacaccactcgaattcgaattcaaaccaaaagttgcgaaaggttcgcattattcagagagttttaagaagaatttagagtttttaaaatatcaggaacaagagcttgaataccaaacaatggtcaagagaaataaacctatctcgtcacttcgagaagaagacgagcttacaccttcgcaaatcaataagcaaattaaagaacaagttactactgttttcaacgttcttgtaagtgtcgtttctgttgtcgtggctatttggtactggaccgggacctctacaaatttcccagtacatgttcgtctcttattgtgtctattttttgggatattagtcttagtagcagatgtggttgtttataacagttacttaaagaagcttgaagaagcgaaagtgaaagagagagtaaaagttgaaaaaaagaaagtgctgaagaagatcacgctgtaa

SEQ ID NO: 1536 - DNA, 705 bp, Saccharomyces pastorianus
atgtccgaaaaagttatcaatcctcaagtttcatgggctcaaaggtctagcaccactgatccagagagaaattacgtcttaatgaccgtgtcaattgctgactgtgatgccccagacttaactatcaaaccaacttacattgaattgaaggctcaatcaaagcctcatgtcggtgacgagactgttcatcattatcaactgcatattgatctgtataaggaaatcatacctgaaaaaacaatgcataaagtcgctaatggtcaacactatttcttgaaactgtacaaaaaggatttggaagccgaatactggccacgtttgacaaaggaaaagatgaagtactcttacattaagactgatttcgataaatgggtcgatgtagatgaacaagatgaagtcgaagctgaaggtaacgatgccgcccaaggcatggacttaagccaaatgatgggtggtgctggcggccctggtggcgctcaaggcatggacttcagtcaaatgatgggcggtgctggcggtgctggtggagctcaaggcatggacttcagtaaaatgatgggcggtgccggaggtgccggctctccagatatggctcaattgcaacaattattggcccaaagtggtggtaatttgaacatgggcgatttccaagaaaatgacgaaggagatgaggaagatgaagaagaaccggaagtgaaagcatga

SEQ ID NO: 1537 - DNA, 1554 bp, Saccharomyces pastorianus
atggatgaatttagtaggctcttttcacagccaaagacacctcagttgaaacaagacggattttcggactccactgacaagcaacaggaaaggacatcacctattaaaaataaggagggaaaccaaaaagctcctttcattgtacccactagcgaaacttgcactacgcccttgactgtgtctattccaacgttcgagaatgttcaaactttacccacaccgatgacctatactccgttatccccaggaaatctcagtatgtcacccatagatcaatcttcattaaatattcccaaaaggcgaagtcatgcacgcttattggatgacatgctttccattgcgcagccaaaccaaagagttgtttctgagcttgttgcacctgcgaatttattgcctcaaagagtggtttctttaccaacagtcgctgaggagacattcaatagtgattctgctgctgatagtaacacttcaaaaaaatcatgtttgtcagaaagtggtgactacacggacaaatacgatgatgaaacgctccagggctttcttctggatcattgggaccagccattgttatggagaaaggtaaggccaattggttcaggaaactttagtaatgtgcttttatatgaatcgatggaccaaagtgatcctaaatcagcgcaagtggctgtaaaaaggctcaaatatcctgaagaattatcacatgtcgaacaaattaacacatcattacgatataaagaaactttatcccgtttggaaaattctttgactagagaacttcaagttttgaaatcgctaaaccatccatgtatagtcaaactacttggaattaacaatccaatttttattaccagcaagaagcctttacacgatttgattaaaaagaacccaagagctctaccgccctgtgacatgattatgtcctattgttctgcaggagatttattagctgccgtcatggcccgtaacggtggcttagagttatggctaattcaaaggatctttgcagagttggctctggcagtaaaatacttgcatgaaagtaatgttattcatcgtgacttgaagttagaaaacgtattattgaaatacacatttgatgatatcaatagttttaaggattcaccaatttactacaggcagaatgttattgaactagcggacttcggtctttgtaaaaaaattgagaatgatgaaatgtgtacagcaaggtgtggatcagaggactatgtgtctccagaaatattgatgggagttccatatgatggtcacttgagtgatacgtgggctttaggcgtcatattatatagtttatttgaggataggttaccatttgatccgcctccaaacgcttcaatgagacagcgtagcagggccacgtcacaccgtatagctagattcgattggagatggtataggttaagtgatgatgatactaatacggggaaaaaaatcgtggagaacactttaacgaggaaaaaccaacgttggtcgattgacgagatttacgattccccgttcgttaaagatatcgttgataaactagatttttcttga

SEQ ID NO: 1538 - DNA, 1149 bp, Saccharomyces pastorianus
atgggtatcaaaggtttaaatgcaattatttcagaacacgtgccctccgctatcaggaaaagcgacatcaagagcttttttggcagaaaagtggccatcgatgcctctatgtcgctatatcaattcttgattgcagtgaggcagcaggatggtgggcaattgaccaatgaagccggcgaaactacatcgcatttgatgggtatgttctacaggacgctgagaatgatcgaccacggaatcaagccttgctatgtctttgatggtaagcctccagatatgaaatctcatgagttgaccaagcggtccacgagaagacaagaaactgagaaaaaactggcggaggctaccaccgaactagagaagatgaagcaagaaagacggttggttaaggtctccaaagagcataacgaagaagctcaaaaattattaggactcatgggcattccgttcataatagcgcccacggaagcagaggcccagtgtgctgaattggccaaaaagggtaaggtttacgcggcagcaagtgaagatatggacactctttgttacagaacgccctttttgttaagacacttgacattttcagaggccaagaaggagccgattcatgaaatagacaccgagctggtcttgagaggcctcgatttgaccatagaacagttcgttgacctttgtattatgctcggttgtgactactgtgaaagcatcagaggtgttggtccagtgaccgctttgaaactcatgaaaacgcatggatccattgagaaaattatagagttcatcgagtctggcgagtcaaacaacactaagtggaaaatccctgaaaactggccctacaaacaggcaaggctgttatttctagaccctgaagttatcgatggtagcgaagtgaacttgaagtggtcgccaccaaatgaaaaggaactgatccagtatttatgcgatgagaagaaatttagtgaggaaagagttaaatccggcataacaaggttgaaaaaagggctaaggtcaggcattcagggtagactagatgggttctttcaagttgtacccaagacaaaagagcagttggctgccgcagccaagaaggctcaagaaaccaagaaatcaagtaaaaataaaaacaaagtaacgaagggtagaagatag

SEQ ID NO: 1539 - DNA, 942 bp, Saccharomyces pastorianus
atgccgctagtgctttttacaggatacccatgcagtggtaaaacaacgctcgccaaacatctagtgcagctactacaatctaaaatcgatgcaaccccatcactaagtaaatattccatagtttatcattccgatgagacgctgggaatcaagcattcagactacataacttcacaagacgaaagaaaactgagatcggagatcatctccgcggtgaaaagagacttgtccaggaacaaaatagtcatagtagattccttgaactatattaagggtttccggtatcaacttcactgtgaagtgaaaaacttgtccaccacgttctgcgtaattcaaactctttgtccaccagaaacgatatttgaatggaacaatacctcgaacgtaaatccctgggaaccagaattattgaaccagttgatccaaagatacgaagaacctaattcaaacaatcgttgggattctccgcttttcgctattctcactccacaggacaatataaccgagtgtattgatgatctctacaaagtagtcttccaaacttccaaatcggccaaaaacagcggacacaatgacccattgaataaaggcctacagaaaccaaactccgcaaccgtgctaaaacccgcatctcaatccaatttcattcaagtcctcgatgtggaaaccaccaagataataaaagtgataatgaaccacattaaaagtctgacctcgattggcggggtgagcaacggtacaagagtcattgtttctgaaggtgtcacggacatcaatgacgacggatgctttttcgtggatctgcccatcggtaatgtcgtcactttggcgcaattgcagagattaaaaagacaattcatcaactttaatagactaagagatatagatcaagatagaataggcgtccttttcgcggactatctcaataagaacttaaattga

SEQ ID NO: 1540 - DNA, 1689 bp, Saccharomyces pastorianus
atgaccgcaaagacttttttactacaggcatcttctactcgtccccgcggtaatcacttcaaatgtgagagtagtaatattcctttagcccctgtaccgatcgcgccaagcacccatcatcaagcttacaacgcgcaagagctggaaaacgataacaattccatcggcaacaagaagaagaagaaatccggtttagtggtcagaacctccaagcattgggttttgcctcctaggccaaggcctggtagaaggtcttcttcccacaataccatcgcatctagcaaccctaatagcatcaacaacctaaatattgctgccaacagtaggaacaatagcaacaacggcaccgcttcgagcaagaggcaaccttccaaggaaaagaggaaaccaagacacgttcaaacaatcgatgaaaagttaataaatgactcaaattatttggcttttctgaaattcgatgatttagataatgaaaaattccagtcttccgcctcttctatttcatctccatcctattcttccccaactttttcaagttatagaaatagaaaaaaaacagaatatatggacgatgaaagttgcaccgatgtagaaactattgccgcccacaacggcttgctgtctaaaaatcacaacatagattccacttcaaacattcatccaccaccctcaaagaaatcaaaactaaacgacttcgacttactctctttatcttccacctcttcatcggctactccagttccgcaattgacaaaagatttaaacctaaatctgaatttccacaagactcctcacaaatcttcgttccctgaatctccttcagacttttccccttcggattcagtttccctgattagaaaccattccttacccaccaatttgcaaataaaggacaaaatcaatgatttgaacgagattaaattcttcaacgattttgagaaactagaattcttcaataagtacgctaaagccaacacaaacaatggcatgaatgaaaacaatgatctttggaactcatatttgcaatcagtggaaaaccacaacagcacgaaccataccgaagggcaacaagaagacaatgacgacaatatgtccttattgaatttgcccatcccagaagaacccgtttcctctgaacaagacattaaggccaaagaaaatgatgaagacatttggaattatctaccaagttcaagcacgcagcaagattcgttacaacttttgaacaaaaactgtaattccaataaagaaaactcacaaaccgattatgaagagaatttcctgttcattcaagaccagaatgaaaacacatcaaagccacaccatgatgagttgagttcggaaatcacgttggctgatagcaagttttcttacttgccgcccactttagaagaattgatggaagaacaagacggtaataataataggtctttcaagaacttcatgttttctaatgatagcgggatgacatgttcaaacatcgacagcaataccactacaaacaacaatgatgatgactatacaaaagtactaaaatctaaaaaaattgctacctccaagtcgaacgtgaatctctatgacttaaacgagaacaacaatggtgccactgctactaacgagttcgaccaaaacagcttcattgatgacctcgatgaagacgttgattttctaaaggttcaagttttctaa

SEQ ID NO: 1541 - DNA, 1356 bp, Saccharomyces pastorianus
atgctaaggacgagacctttcaattggggtcttttgaggccctattttacatcatcactttgtaaggtgcccagagcacctccagataaagttttggggctgtctgaacatttcaagaaagacaaaaatattcataaaattgatttgaccgtagggatatataaagacgcttggggcaaagttactacttttccctctgtagcaaaagcccaaaaattaatcgattctcatttggagctgaataaaaatttatcatatctaccgataactggatctaaagagtttcaagaaaatgttatgaatttcctattcaaggaatcatgtcctcaatttggtccgttctacttggcacacgatcgaatcagctttgttcaaactctaagtggtactggtgccctagctgtagcagctaagtttttagcactgttcatatcaaaggatatttggatacctgatccgtcttgggcaaatcacaaaaacatcttccaaaacaacggttttgaaaatattcatcggtactcctactataaggacggccaaatagatattgacggatggatcaagcaactgaagactctggcacataaccagaaaaaagaaaatgataaacagttacattgcatcattctgcatgcatgctgtcataacccaactggccttgacccaacaaaggaacaatggaaagaaatcatagacacgatatatgaactaaaaatggtacctattgtcgatatggcttatcaaggtttagagtccggtgatatgctaaaggacgcgtatttgatgaggttgtgcctagatgtagatagatatccaaattggagtaatggtgtttttctttgtcaatcatttgccaagaacatggggctttatggtgaaagggttggatccttaagtgttatcacacccgccactgccgatgacgaaaacttaaatcctttacaacgggggaactcattgcagcagaacattgattcacaattaaaacagatagttagaggtatgtattcctctccaccaggttatggttcccgtgtggttaacgtggttttgtcaaataccaagttgaagcatcaatggttcaaagacgtagagtttatggctcagaggttgcattacgtcagaaaagagatgtttgaacgtcttcgctggccagatctaataaactttgcacaacagcacggtatgttttactatacaaggtttaacccaagacaagttgaagttttgaagaataaattttccgtctatttaacaggtgacggtagattgtcacttagcggagtcaatgattcaaatattgactacttgtgtgaagctctcgacgctgtttcaaaaatgagcgaaattgcataa

SEQ ID NO: 1542 - DNA, 2154 bp, Saccharomyces pastorianus
atgtgtggtatctttggttattgtaactatctggttgaaaggtccagaggtgaaatcatcgacactttggtggacggtctacaaagactggagtatagaggctatgactccaccggtattgctatcgatggtgacgaagttgactctactttgatttataagcaaatcggtaaagtcagtgctttgaaagaagaaatagctagggaaaagccaaacagggatgtcacttttgtctctcattgcggcattgcccatactagatgggccacccacggccaacctgagaaaatcaactgtcatcctcaaagatctgatccggagagccaatttgtgattgttcataatggtatcatcacaaattttagagaactgaagacccttttacttaataaagggtacaagttcgaaagtgacactgatactgaatgtatcgctaaattatatttgcacttgtataacacaaacttacaaaatggtcatgatttggatttccatgaattaaccaagttggttcttttggaactagaaggttcgtatgggttattatgcaaatcctgtcactatccaaatgaagttattgccaccagaaaagggtctcctttattaatcggtgtcaaatctgacaaaaaactaaaggttgattttgtggacgtggaatttcctgaagacaacgctggtcaaccagaaactcccttgagatcaaataacagaccatttggtttgggtccaaagaaagctcgtgaatttgaagctggttcccaaaacggcaatttactaccaattgctgccaacgaattcaatttaagacattcccaatccagagctttcctatcagaagacggctctccaactccagtggagtttttcgtgtcttcagatgcggcatctgttgtcaaacataccaagaaggtcttgttcttagaggatgatgaccttgctcatatctatgatggtgaattacatatccatagatcaagaagagaagtgggcgcatccatgacaagatccattcaaactttagaaatggaactagctcaaatcatgaaaggtccttacgaccattttatgcaaaaggaaatttatgaacaacctgaatctacattcaacactatgagaggtagaattgacttcgataacaataaggtaatattaggtggtctaaaggcctggctgccagttgttagaagagcgcgtagactaattatgattgcctgcggtacttcttatcattcatgtttggccactcgtgctatctttgaagagttgtcagatatcccagttagtgtggaattagcatcagatttcttggatagaaaatgtccagtctttagagacgatgtaggtgtctttgtttcacagagtggtgaaactgctgatactatgttggctttgaattactgtctagaaagaggggccttgactgtagggatagttaacagtgttggttcttcaatttctcgtgtcactcactgtggtgttcatatcaatgccggcccagaaattggtgttgcctctaccaaagcttacacttctcagtatattgccttggtaatgtttgctttgtcattgtcagatgaccgtgtatcaaaggtagacagaagaatcgaaattattcaaggtttgaagatgattcctggacaaatcaaacaagtgttgaatttggaaccaagaataaaagagctatgtgccactgaattgaaagatcaaaaatctttattattgttaggcagaggctaccaatttgctgccgccttagagggtgctttgaagatcaaagagatttcttatatgcattctgaaggtgtcttggctggtgaattgaaacatggtgttttggccctggtcgatgaaaacttaccaatcattgcatttggtaccagagattctttgttccccaaggtcgtttcctccatcgaacaagtcactgcaagaaagggccatccaattattatttgtaacgaaaatgatgaagtatgggctgaaaaatccaaaaccatcaaacttcaaaccttggaggttccacaaactgtcgactgtctgcaaggcctagtcaatattattcccctgcaactaatgtcatattggttggctgttaacaaaggtattgacgttgactttccaagaaacttggccaaatccgttactgtcgaatag

SEQ ID NO: 1543 - DNA, 300 bp, Saccharomyces pastorianus
atgcaattctctactgtcgtttccgtcgctttcgtcgccttggccaactttgttgccgctgaatctgctgccgccatctctcaaattactgatggtcaaatccaagctaccactgctaccaccactgctccatccaccactgccgctccatccaccactgctgctccatcttcttcccacgttgaaaccgtttctgcttccagcactgaaaccatttctcaacaaactgaaaatggtgctgctaaggccgctgtcggtatgggtgccggtgctctagctgccgctgctatgttgttgtaa

SEQ ID NO: 1544 - DNA, 747 bp, Saccharomyces pastorianus
atgagattttctactgctttatctgtcgctttgttagccttggccaagatggtcgccgccgactctgaagaattcggtttgctaagtatccgttctggttccgacttacaatacttgagtgtttacagtgacaacggcgctttgaagctaggtggtggtagcaactctttaagcgctactgtcaccgatgacggtaagttgaaatttgacgacggcaaatacgctgttgtcagtgacgatggttccctaaaggaaggttccgaaagcgacgctactacaggcttctccatcaaaaacagctacttgaactacaagacttcctctgggttctatgctgtcaaagatggttcctcttacatattctcttccaagcaatctagcgacgctactggtattgccatcagacctaccagcaaaaccggttcagtcgttccagacttttctccaagtgattctaattcctccacctccaccacagaatctgcttctacttctgcttcttcttcttccgcttctgaatccaccaaggtttctacaactgtttccaccaccgaatccaccaaggcttccacctccacatccgcttccactgctagttctggcgctgcttctgtcatctctcaaattaccgatggtcaaatccaagctccaaaaaccgtttctcaacaaactgaaaatggtgccgtcaaggctgccgtcggaatgggtgctggtgctttagctgctgccgccgctatgctgctataa

SEQ ID NO: 1545 - DNA, 942 bp, Saccharomyces pastorianus
atggttgagtatccttataaagtgcaaacgaaaacgccggaactgcagtatgagaccttcgatggtgccaagttcgggtacatgctttggcccgtccagaatggcactaacgaggtcaaaggtagaatcttgctagtccatgggtttggcgagtacacaaaaattcaattccgtcttatggaccacttgtccctcaatgggtacgagtcattcacgtttgaccaaagaggcgcaggtgttacatcgccgggcaaattgaggggtgtaacaaacgagtaccaagtgttcaatgaccttgaacattttgtggagaaaaacttgagcgagtgtaaagccaagggcatccccttattcatgtggggacactccatggggggcggtatctgcttaaactatgcgtgccaaggtaagcacaagaacgaaataagcgggtacattggttcagggccgttaataatcttacatccgcacactatgtacagcaagccaacccaaatagccgcccccttactggctaagttcctgcccaaagtgaggattgacactggtttagacttgaacggtatgacgtccgataaagcgtaccgcgatttcttgggtagcgaccctatgtctgttccaatgtacgggtcattcaggcagatccacgactttatgcaacgtggtgccaagctgtacaagaaccagaataactatgtccagaagaactttgccaaaaataaacccgtcattgtcatgcacggcgaagacgatactatcaacgaccccaaggggtccaagaaattcattcaggattgtccctctgacgacaaggaactgaagctctacccaggtgcaagacactccattttctcgctagagacagacgaaaacttcaacactgtgttcaatgacttgaagcagtggctggaccaacacaccgcatccgaggctaaaccataa

SEQ ID NO: 1546 - DNA, 1026 bp, Saccharomyces pastorianus
atgaggatggacaagccaacagatagaccacaatctgtaagagaaacgaatgctgactattctgggattccggtggacgatatggactgtttgaactttttcgaaagaggtgtccaggacccatgctgcgaggcctgtgacactgaagacgcagatgatgaactgagggcaaagcttaacagttttaatttcaagtcggattccactccttgtagtgggaaatgtcaacacacactaaaccccctgtgcaaaatcgatgaaattcaaccggccaacttggacttggctccttcgagaaacggttcggtatctgacgcaaattcagatgcgaattctattgcatcctctatccatgactctagagaccccaaatacggagctatgcccgggttgaggaaggccaaaactacttcgtactttacctcctcttcctcctcctccaataacaccacgatgagaaactcactaaaaaagtgtaatacaaacataaatggtcttttggcgaatggaagaaattccagctcttcaagacaatctataccagagctttttaatggcgcatattccaaaatgaagggcaatacattaatgaagaacgataccccccgtttggatttatcatccaattcacttgaacattccaatacaagatcgttctcgctacctaggtcaagatcgagatcctccgccatagcgataccaactcatctgtatggcctggagaagtacgtttctcctgaattggacactttaactgccgatcctgaagtcggcgctggaaattttttaagcgcaaggcagcgtgcgaattcatcctcttcttcaaacactacaggggacaccaatccaccctcaccaaattcaaataattcatcaatgctcaatttccctctaggtgcaaatacgaatcaatgtaatttattaagacagcagcagcaacaacagcagtttgcaaaatcaagctttggtgctggaagaaaaaaatctttcatcgaaatgtcattggcaaattcatttgcaggatag

SEQ ID NO: 1547 - DNA, 1323 bp, Saccharomyces pastorianus
atgaacatgaatggcaatgatgactatgattcccaaatatcgatcttgatggatatgtttccaactgtttctggatccatattacaagagcatttactcaaaaataataatgacctagaattagcaatatgcctgctactaaaggagaacgacgaagtggctactaccgataatgagctacatcaactatacgatatgtttcctcacattgattgcgatattataaaggaccaatttacagccaatgagatgtctgtggaattgactatttctgatcttttaaattatgaaatcttacaaaagcttaaagaagaccaaaccccctcccatgacagcgtacagcaggatggaacaaaaaacaactggaagctaacaaacgatcacatacagactataataaaatttactgacgctcccaaaaatattgcacagaaatactttgtcgaaaatagctttgactcaataagcgctgttatcaagattgtattagattactatgataaagatcattttacacaaactccaaccactgtcaactcaaaaataagactcactgctcctgtgaaaggcggtcgagttcagtcatcaatgggactcgcacatgtgttaaaacaaggggaaaagtcgacaaaagaaagtggagaaaatatcaaaagggtgaaaacttacgagcactcatcgagtagcccccaaatgattgaattaaatgaaatgattgaaggaaaccatgacctgaaagccataaaccatgaattcctgcaaaaatgcttgcaattttacgatggagatataatgaaagtattagacctatcctccttactgataaaagatgacaaaagtatcaccaagacttggaattttgacggaggctttactttgacatcgcaagataactgtaagcaacattcaagtaagccctcaacgccaccgaattcccacaaaaactgtgtaaaaaaatcacccttccaaaataaggaaactcatgaagaagccgtcgcaattataaacaatcttttccaaacataccgattagatttccacggctttctacctaacgaggcggtttcaatcttgaagcttgcattaaacaaatggtggtctaaggagttcacagaacgagagctaaactctcataatatcaatgcttatggctctaaagtacaattcgtgagcccgttagttgtagttactggtagaggtatccatagtgtcggcgggatctcgaaagttcgactgcaagttaaaaattttttggataagaaccactacgtcttttgggaagagtcttctttttttagagtcgagggtaagaagaggaaataa

SEQ ID NO: 1548 - DNA, 1647 bp, Saccharomyces pastorianus
atggactacatgaacctgggactgaggtcccgtaaaactggtattgatgttaaacaaaacatacccaaggatgaatacagtatggagaatattgatgattttttcaaagatgatgaaactagtcttatcagtatgaggagaaaaagcagaagaaaatcatcactgtttttaccgtcatcattaaacaacaacaccgataacgtattaccgccattcctacagtcataccgacctcaagaaaaggaagctgctcagaatccatccagtaatgacggctcaagaagatcctctttgttaagtcatcagtccagttttcaaagcccagctaatgaatttgaaccgattcaggaggatccagaggaagaagaaaaaggcagcagaagcaatgggattggaacgccaaaaaccaacaatttaagcaagcctagttttaaaagaaaatattctacccattatgaccttgatatttcggaagacccctccgtgaggttgactcccgataggataactaataaaaacttgtactcagacgttcctgacttggttgctgatgaagatgatgacgataggggaaacacttctttaaacacatctgataatgcgttattagaagatgagttagaagatgacgggtttgtacctgaaagtgaagaggacagagactatattggaagtgattcttccctggattccagctcggattccccaagtgatgttaatggtgatgatacttaccaagaagtagaagaggaggctcaagtgagtgaaaatgataatgaagatgactatataaaacgacaagcgaccgatgtggttcgaacagactcaataatcgatagaaacggactgcgaaaatccacgagggttaaagtcgcacctttgcaatattggagaaacgagaaaatagtgtacaagagaaaatccagcaaacctgttctcgatatagacaaaattgtcacatatgatgaatcggaagacgaagaggaaatcctggcagctcaaagaaagaaaagacagaaaaagaaacctacacaaactaggccatacaattatgtgcctacaggaagaccaagaggtagaccgaagaagaatccaaatacaacagaaaaccccgttccagaagatcccaatgaggagattatagaaaggatagaatccggaggtatagaaaacggagaatggctgagacacgggatactagaggctaatgtgaaaatcagtgacaatattgaggagatgaaggacgaaatcatcgcatttgcacctaacttatcacaagctgaacaagtaaaagatacaaaggatgagaatttttcccttgagataatgtttgacaaacataaagagcattttgcaagtgggatattaaagttgccagccatatctggacagaaaaaattaagtaactcatttagaacttatatcacattccatgtgatacaagggatcgttgaagttactgtatgtaagaataaattcttgagtgtcaaaggttctacttttcagataccagcattcaatgaatatgccattgtcaataagggaaacgatgaagccagaatgttcttcgtgcaggtgaccatttcgcaagacactaatgatgataatgataaagatctagaaaccactttcgacactttcgggtga

SEQ ID NO: 1549 - DNA, 672 bp, Saccharomyces pastorianus
atgaccgcttcagaccaacaggggaaatgtcctgtcgacgaggaaaccaggcagctgtggctgcgagaacacactaaagaatcagttccgggggccacggtcccgcccagtgagctggagtgttctgcaaacccgcaactgaacgataaggaccctcagtatgttaccgacgtggggttgtcgcagtccagagaggtctccaccattccaagaaccgactccgataaaaactggatatacccttcggaaaagcaattctacgaggccatgatgaagaaaaactgggacccgaactcaaacgatatgaaggtcgtcgtgccactgcacaactccatcaacgagcgggtctggaattacatcagaagctgggaggacaagcaaggtggcgaagcgtgcggcggtatcaaactgtctaatttcaaaggcgattccaaaaaacttacgccaagagcttggtttagatcgcgtatcttacatctggccaagccatttgatagacatgactggcaaattgacagatgtggcaagactatagattacgtgatcgacttttattcaaacgaccaaaatgcccccgagcagcagcagccacttatttatctggacgtcagaccgaaactgaacagttttgaaggctttaggctgaggttttggaaatatctgggcttttga

SEQ ID NO: 1550 - DNA, 1005 bp, Saccharomyces pastorianus
atgttatccagagtagccagacgtgccttctcctcgacagttgccaacccttataaagtcaccgttttgggtgcaggtggtggtattgggcagccattgtcgctgcttctaaagctgaatcacaaagtcaccgacttgagactgtacgacttgaaaggtgctaagggtgttgccacagacttgtcgcatatcccaaccaactccgtcgtcaaggggttttctccagaagagccggacggattgagcaatgctttgaaggacacagacatggtgctgatccccgccggtgtgcccagaaagccaggtatgacacgtgacgatttgttcgccatcaatgcaagcatcgtgcacgacttggcagttgccgccgcggaatccgctcccaacgccgccatcttggtcatctccaacccggttaactccaccgtacctattgtcgcccaggtcttgaagagcaagggtgtatacaaccccaaaaagctgttcggtgtgaccaccttggactccatcagagcctccagattcatctccgaagtggaacacaccgaccccactcaggaaagagtcaacgtcattggtggtcactcaggtatcaccatcatcccattgatctcccagactacccataagttgatgtccgacgacaagaagcaagagctgatccacaggatacagtttggtggggacgaagtcgtcaaggccaagaacggtgctggttccgccaccctgtccatggcgcacgctggtgctaagttcgccaacgccgtgttgtcgggcttcaagggcgaaagagacgtcatcgaaccctcatttgtagactctcctctattcaagtccgaaggcatcgacttcttcgcatctccggtcaccttgggcccagacggtatcgagaagattcatcctattggcgaactttcctctcaagaagaagaaatgctagagaaatgcaaagaaactctaaagaagaacatcgaaaagggtgtgagctttgtcgctagtaaatag

SEQ ID NO: 1551 - DNA, 345 bp, Saccharomyces pastorianus
atgcccgacgtcaccatacatggcaagacagtggatgatcaatctcggtgtgttcactggcatctgccgaacgacgtaatagccatcaaattcaagtgctgtgccacatactttgcctgtttcgagtgccaccaagaattaagttcccattccttgcagaagtacgatcttcacgacgatactgatgaaaagttgatcgtgtgtggagtttgccgtcatgagatgacattcgcggaataccataacgctcaactcgtctgccccaattgccaatctcccttcaatccaggttgcaaactacactaccacttgtacttccataatccgccttcgatgacttgttga

SEQ ID NO: 1552 - DNA, 771 bp, Saccharomyces pastorianus
atgagcagttcatcaaacacaacttacttcattatcggtggtaaccgtggaattggttttaacttagtcaaaacgttgagtgcctctacagacaatgttgttatagcttcttttcgtggattaccttcgttgcccaagaataaacagttggaagatttgaagaaaagtagagacaatattcatactgtgcagcttgacattaccgacgacgaaagtgtcaataaaattgcagatgaaattaggaaaacaccatcattccagggcattgatatttttattgcaaactctgggatctcgaattcctactatgaggtcttaaaggccccaaaaagggtttggattgaccattacacgaccaacgctttaggaccaatattgactcttcagaaggtgtaccctttgcttcttttgaaaaagactaggaaattatttttcatttccagcctcgcaggatccatcactggttatgtaccaatttctgtttctgcttacggtcagtcgaaagctgccttgaattttgccataaaggaactaagttttgaattgaaacctgagggcttcactgttgttgcgttccaccctggtatggtaaccactgatatgggtcaacagggtttaggtagttttgcgaaaaaaggcacagatatcagctctttaaaggttattacgcccgaggaaagcgcttccgcattagttaatgtttttagcaaaatatcacctgaacataatggaaagttcatggattatgatggcagtgaggatactttttga

SEQ ID NO: 1553 - DNA, 543 bp, Saccharomyces pastorianus
atgggttcatctagcgggttccatcatgccgatcacgccaactatgcgtcaatcttaagtaaggaagaaacccttgaacaactcttattatcgtacgaggcactatctgacgatcaaaccaattgggtttgtaatttgtctaatgcctcgtctttgatttggcatgcgtacaagtcgttgggtgtcaatgtgaattgggccgggttttacgttagtcatggaaatgaaaaggatacattgatactgggcccgtttcaagggaaggttgcctgtcaaacgattcaatttggtaaaggtgtttgcgggactgcagcctcaaaaaaagagacacaagttgtccatgatgttaacaaatatcccggtcatatcgcgtgcgatggagaaactaagagtgagatcgttgtcccgatcatatccaatgatggtattacattggctgttattgatattgattgtttagattacaaggggtttgatgaagtagacaaaaaatttttggaaaggctcggtaatctaataaataaatcatgcacttttaaatag

SEQ ID NO: 1554 - DNA, 462 bp, Saccharomyces pastorianus
atgtccagccaaactgaaagaacttttattgcagttaagccagatggtgttcaaagaggtttagtctctcaaattttatctcgttttgaaaaaagaggttataagttggttgctatcaaattagtccaagctgacgacaaattactagagcaacattatgctgaacacgttggtaaaccatttttcccaaaaatggcttctttcatgaaatctggcccaatcttggctactgtatgggaaggtaaagatgtggtcaagcaaggtaggtccattcttggtgccactaacccattggccagtgctccgggcaccatcagaggtgacttcggtgttgatctaggcagaaacgtttgtcatggtagtgattctgttgaaagcgctgaacgtgaaattaacttatggttcaagaaggaagatttaattagttgggaatccaaccaagcaaaatggctttatgaatga

SEQ ID NO: 1555 - DNA, 621 bp, Saccharomyces pastorianus
atgagtttatattttacagctttattcctaatgctcaccgttgagatggtgatgctcttcattttcgttttgcctctgccattccggatccgtagaggtatttttagcagctataaccaattgacggctaagcagcagataaaaaccgtaattgtcataatgggcggtcttgttgggctgttgtttatcgattcgtggaagaggtcacaaatccgcgtttcattataccataacgataacagcggttcaatggggtcatctgctgtcaccccaatacaggccttggcatcaagagcttacaaccaaaggaacatgtacatttctgggttcatattgtatttctctatttgcatcccaacggtcatgtctattgtcaagagattggtgaaatatcagggattgatcaacgagcaaaaaaagcagaagttgaccaaaacttctccaagaaccgagaaagttccaaagcaggccgactctactaaattggaagaacaactaaagaaaaagcaaatttctttggaaggcttgcaaaagcaagtcaagaacttggagaaatacttcgacgaaaaaaaccaaccaggcaacttggccgccgctgaagctgctaagaagggaaactaa

SEQ ID NO: 1556 - DNA, 528 bp, Saccharomyces pastorianus
atgcaaggtgatatcagaagaaaaaaagatctcttgcctcgttataaaacggggagcaaatacaattccagaagaaagggcgggtttttgactactccaatgaaaaagatcgtattgtatatgttacttttgtgcggtgtttattatgttatacaactcgcctattctgacctaaataaggaaactgaaatcgtgttggaaggtcacacttctgatactcctactaccggtaatgaacataataatggtgctatgatgggtgcatcggacccaaatagcaataagcaacagcagcagcagcagcagcagcagcagcaggtcaaagtacccaaggagaaattcaataatgaagttgcaaagcaacaagaagtaaaaaacttggaaaacgatcttaagcctcaggtcgactcagaaaagcagaagcaaataaacaaggacaagaaagaacaaaagcagcagctacaaaaggaaaaacaagatatcgccaaagagaagttggctaatagtaacgaaatacttgataattaa

SEQ ID NO: 1557 - DNA, 1950 bp, Saccharomyces pastorianus
  modified_base (724)..(771): a, c, g, t, unknown, or other
atgctagcttttggtcctaaaaacggtcttattccatcggagaaagattttccccgtcacactattagcaagaaacaagaagatccgtccatgttaaccgggtcgactgggttggtggatccagtgttgaacacgaccaatggctctgtttcttcttcctctaatgacacttctgctaacaatagtatatcctctccagaatacacattcggccagttctcgatggattctcctcatagaacagatgtcactaataccccattcctaacaacaactactaatactaccgctaataatagtttgatgaatctaaaggatactgccgctttgcccatgaattggaaatggaaaaactctaataacatgcaattcttgaatggaattgaaaacgaaagcggtaatgacaacggtaataaagatggcgacgataaggtgtgtctttcgatagctaccccgcatgctctcaatgaagaattgaagaatttggaacagctggagaaggtgttctcgccgatgagctcagcgaataatagcaatttcaaagaaaacattgagctatctccacaccaacatacgacatctcccaaggctaaaacccttgaggcagaaccttctatatattccaattttttcttagatgctaagttcccgaacaactccaacgtttcagcagaatcgaacgacaactactatagcttggatgacgcaaataacaacagcagcnnnnnnnnnnnnnnnnnnnnnnnnnnnnnnnnnnnnnnnnnnnnnnnncagtcgattttggaagactttgtatcttcagaagaggcgttaaagttgatgcctgacactagttccgacacaaggcgatacagcgaggtggtcacttcttcgtttccttccatgacggattccagaaattccatttctcattcaatagaattttggaatttaaaccataaaaattacaataacaggaaatccactcaacaaatcattcctgaggacactactacggaaagacgtgactcgaccatttcaccaactacgacggcaaacaatcccgatccgaccttcaaactgctagatcataacgtttctcaagttctcaatggttatagcatggatttttctaaagacgctggcgttacaaagccaaaaaacacatccttctcttcaaaccgtatctataataacggtaacaataagaaaaaccaacgggcttctttgcccttgattcatgacatcgaatcctttgcaaatgatacagtaatgaccaaccctctttcttactcagcttcattcttctcagaggaaaatgatgatgatatgtttgccaaagtaaactataacagtttagatgccgctgcaatgtcgacctacgatcgtgacgcagatccttttaacattattaagtctcctactcaagatcagcaatttatcaaaccttcgatgatgctgtccgacaacgcctcagctgctgctaaattggcaacctctggtgtagataatctcaacactgcaccagctttccaaagaaaaagctatgacatttcgatgaatccctcgttcaaactaattcctaataatcatattcatcatgctgctcatcatcaacagcaatctacgaaacaagcgtctgtaagcccaaacctaagaagaagaaagtcgtcgagcatcactttaagtccaactatctctcacaataacaacaatggtaagattccagttcaaccacgtaaaaggaaatccattgctaccattgaccaaaacaactacgataaaaacaagccctttaactgcaaagactgtgagaaggcatttagacgcagcgaacacttgaaaaggcatatcagatccgttcattcggctgaacgtccttttgcttgcatgttctgtgagaaaaaattcagtagaagtgacaacttatcacaacacttaaaaactcacaagaagcacggcgatttttag

SEQ ID NO: 1558 - DNA, 342 bp, Saccharomyces pastorianus
atgggtgaacaaaacaacttatactatcacgtcgagaaactggtgaattgtttgcaagaggatttcgatttagattgcgctcaaggtgtatctctcttcactagtaaatctagaagaaatgaagcttggcttgaagaattggacaacaagttcaaagtaaaggataacgttgagctcgatgatgtggaaaatttaaaagctgaaattgacgcaaaattggacacactggaagttaaggtagactattatgaaaaacttttcaaagagttggaagagtttcaaaatgaaatgaaaatcaaaactgttgttaataagagaagacaatcgcaggttccaaaatag

SEQ ID NO: 1559 - DNA, 1080 bp, Saccharomyces pastorianus
atgggtgttgaacaaattttaaagagaaagaccggtgtcatcgttggtgaagatgtctacaacttattcacttacgctaagcaacacaagttcgctattccagctattaacgttacctcttcttctactgccgtcgctgctttagaagctgctagagacgctaagtccccaatcattttgcaaacctctaacggtggtgccgcttacttcgctggtaaaggtgtctctaacgagggtcaaaatgcctccatcaagggttctattgctgctgcccactacatcagatccattgctccagcttacggtatcccagttgtcttacactctgaccattgtgctaagaaattgttgccatggttcgatggtatgttagaagccgatgaagcttacttcaagttgcacggtgaaccattgttctcttcccacatgttggatttgtctgaagaatccgatgaagaaaacattggtacttgtgtcaagtacttcaagaagatggccgctatgggtcaatggttagaaatggaaatcggtatcaccggtggtgaagaagatggtgtcaacaacgaaaatgctgacaaggatgacttatacaccaagccagaacaagtttacaacgtctacaaggctttgcaaccaatctctccaaacttctccattgctgctgctttcggtaactgtcacggtttgtacgctggtgacatcgctttgagaccagaaatcttagctgaccaccaaaagtacaccaaggaacaaactggttccaaggacgacaagccattattcttggtcttccacggtggttccggttctaccgtccaagaattccacactggtattgacaacggtgttgtcaaggtcaacttggacactgactgtcaatacgcttacttgatcggtatcagagactacgtcttgaacaagaaggactacataatgtccccagtcggtaacccagaaggcccagaaaagccaaacaagaagtacttcgacccaagagtctgggttagagaaggtgaaaagaccatgtccgctaagatctccaagtctttggaaactttccgtactgtcaacactttataa

SEQ ID NO: 1560 - DNA, 369 bp, Saccharomyces pastorianus
atggcagtacccgggtattacgaactatatcgtagaagtactatagggaatagtttggtggatgctctagatactctaattagtgatgggaggatagaagcttcattggctatgcgtgtcctagagaagtttgacaaggttgtggcagaaacattgaaggataacacccaatccaagctgacggtaaagggtaatcttgacacatatgggttttgtgatgatgtttggactttcattgtgaaaaattgtcaggttactgttgaggacagtaatcatgatgcttcccagaacgggtctggagacagccagagtgttatttccgtcgacaagttgaggatcgtcgcatgcaactcaaagaagagcgaatag

SEQ ID NO: 1561 - DNA, 504 bp, Saccharomyces pastorianus
atgattatttacaaggatatcttctctaacgacgaattgttgtctgatgcttacgacgccaagttggtagatgacgttatctacgaagctgactgtgctatggtcaatgtcggtaatgataacatcgatatcggtgctaacccatctgctgacggtggtgaagacgatgttgaagaaggtgctgaaatggtcaacaacgttgtccactctttccgtttacaacaaaccgccttcgacaagaagtccttcttgacctacattaagggttacatgaaggctgttaaggctaagttgcaagaatctaacccagacgaaatttccaagttcgaaaaaggtgctcaaacctacgtcaagaaggttattggttctttcaaggactgggaattcttcactggtgaatccatggacccagatgccatgatcgtcatgttgaactaccgtgaagatggtactactccatttgttgccatctggaagcacggtatcgtagaagaaaagatctaa

SEQ ID NO: 1562 - DNA, 261 bp, Saccharomyces pastorianus
atggggaatataatgtcagccagtttcgcacccgaatgtaccgatttgaaaacgaaatacgacagctgttttaatgaatggtacagcgagaagttcctgaaggggaaatctgttgagaacgaatgctccaaacagtgggatgcctacacgacctgtgtcaacgctgcactcgtcaagcaaggtatcaaaccagccctagatgaggccagagacgaagcgccatttgaaaacggcggcaaactaaaagacgttgacaaataa

SEQ ID NO: 1563 - DNA, 1350 bp, Saccharomyces pastorianus
atgctcgtgaacaaattcgtagggttactgagcgtactctttgcgacaaggtttacgaatgctgtcgaattagatttagacaactaccagcctttacaaaatgctacgtcactggtcgcttacggtttaatggattattacaccggtaatcaatatgggaaaacagtcggtatgttctctgatccatactattggtgggaagccggtggtgcatggggctgcatgttggactactggttctacatggagaacgatacttataatgacgaaattacagctgctatgatacatcaggccggtgacgacaatgactacattccactgaatcaatctactactgaaggtaatgatgatcaagccttttggggtattgctgccatgactgccgctgaaaggaatttcaccaatcctccttcagatcaaccccaatggttatatttggcacaagccgtcttcaatacaatggctttgcgttgggatgcagactcttgtggtggtggtttgagatggcagattttcgtttggaactctggttatgactacaaaaacaccgtttccaatggtgctttgttccacatcgctgcaagattggcaagatatacaggtaaccaaacttatgtcgattgggccgaaaaagtttacgaatggatggttggtgtcgacttaatttccaatggtacctataagtatgtttacgatggtgttagtattggtgacaactgtactaaagtcacctcgtaccaatggacttacaaccaagggttactattggccggttcggcttacctgtacaactacaccggatcagatctctggcacacaagaacaaaggagtttttgaacgcctcccaagtgtttttccatgacggtatagtgtacgaagctgcttgtcaaggtccaaattcttgtaatacagatcaacgttctttcaaagcttactttgcccgtttcttaggtgccactgcacaactggtgccagaaactagaaatcaaattatgtcctggttaaacacatccgcaattgctgccgctaagtcatgttctggtggtattgatggtcacacctgtgggctgaattggtttaatggtacgtgggatagtatgtacggtttaggtgaacaaatggccgctttagaagtcatggtcaacacaagggccttagatagacctgctccgtatactgcagaagatggcggttcgtctgttggtgatggggcagctggtacccaagcacagcctacaaatttgtctcctttaaatatcacgaagggttccaaggcgggtgcaggtatcattactgctgtcattggtatttcaatcgtcgcatgtgctttatggctggtcttttga

SEQ ID NO: 1564 - DNA, 1107 bp, Saccharomyces pastorianus
atgtaccatgttcctgaaatgaggctgcattaccccttggtgagcccccaatctaccgctgcaactgttcccaccagaaattacgataatattcttccttcgttcaacgaactatctcatcaaaacacgatcaatcttcctttcgtccagcgtgaagccgcggacgcatatacaaacgttgctcctgtaacggcatcatcatctcagactgaatcgggctattactgccgttactacgctttccctctgcctccctactcacagcaccctcagtctcaataccaacaggctgtgcttccttacgctaccattccaggcaataacttcccaccatcgtctttccccatgatgaccatggtgccatcagaagttcagtctgaaagatcttttttaaaccctttgcacgctcatactgatctgcccccaatcatccaaaactccaatgatatccaaatcacgccccaaaacagtgctaagtcaatgacgaccacgatggcggcaaccaaaaaaattcctggacttcgttccaccgtagttcttaaaccgcgtgtgattacaacaatgtgggaagacgaaagtaccatctgctatcaagtcgaggcgaacggcatatctgtcgtgcgcagggcggataacgatatgattaacggtacaaagttactgaacgtcacgaagatgacgaggggaagaagagacggcatactaagatcggaaaagattagagaagtcgtaaagatcggctctatgcacctcaaaggtgtttggattcctttcgaaagagcgtatatcctggctcagcgtgaacaaattctggaccatttatacccactttttgttaaggacatagaatccattgttgataccaacaaacgcaataacaaaaaatcttcttccccagaacttaaccctggaaattatcattctgttaagcaagaatcatccgaaaacaaggacaaactttatactgaagttaagcatgagggcgttagagccctctcgaatgaagtgtcttcccagaatgtgggaggaacggataactcaaagaacattgatatcgacagtgaggcccaaaacagaacaagcagagccaaaaatgaaataacctaa

SEQ ID NO: 1565 - DNA, 1101 bp, Saccharomyces pastorianus
atgaacggatctcccacacctaagcgatattcatccaaatcttcaagactctacgacgactattacaatatcccatatcaatattccaacccaattccaatgaatagagactacaacgacataggttcacgcatgaatgccgataagctcgtgccagaggagtacaaacggaacacagaatttatcaacaaagctgtgcaacaaaacaaagagctgaacttcaaactgagagaaaagcaaaacgagatatttgagctcaagaagatagctgaaactctacgctcgaaattggaaaaatacgtcgatataaccaaaaggctcgaagaccaaaacctcaatctacaaataaaggcaaacgatttggaaaagaaactttctgaggccaacgtgattatcaaagatagacgctactccaatatcaaagagccagtggttgatgaaaatgtcatttctcaggactacgatcaaataaatgtacctaaaaacagacctccagatgcaggaatcaatccccgctcaaacaacaaggcctataatggttcggaacaagataataggctaaaagcgattgaaaaaactctttcagtccttacagattacgtcatgaggacagaagagaataataatgatagagcatccttgccatctcctttgaatacgatgtcgccaataaataatcgtttgaattttcaagaagcaaaaaaatacaaccccacgctcaaatcaaatccatcggatgatgacattatgatgtatgagagcgcagaattaaagcgtgttgaagaacaaatagaagagttaaagaggaaaatactggtaagaaaaaaacatgatttaaggaaactgtctctaaataaccagcttcaagaactacaaaatattatggatggcgatgaaaacgtaaaagaagacaatccatcgaaacacaacaaggcgcaccacagtacgcatcatcatccttcacattcccatcgggattattcaccatcttctaatgcttgcttagagtgttctgccaatgagctgtacgagagaaacaaaggtaagtcagagaataatttatctgagacgtttgcaactcccactcctaacaaccgataa

SEQ ID NO: 1566 - DNA, 675 bp, Saccharomyces pastorianus
atggattatatcaagaaggcaatttgggggcctgatcctaaggaacaacagaggcggatcaagtcggtactaaggaaaaatggccgaagtatagaaaagtcgttgcgagagctagcagtcttgcagaataagacccagcagcttatcaagaaatccgcaaagaagaatgacatcaggacagttcgattgtatgccaaagaactataccaaatcaataaacagtatgatagaatgtacacctccaaagcacagttagactctgttcgaatgaagatagatgaagcgatcaggatgaatgtgttatctaatcaaatggcggatagcgcaggcttgatgagggaagtcaattccctagtgaggcttcctcagttgaggaatacaatgatcgaactagaaaaggaattgatgaaatcaggtattataagtgaaatggttgatgacaccatggagagtgttggtgacacagaggtcgaaatggacgaggccgttgatgaagaagttaataagattgttgaacaatatacaaacgagaaattcaagaatgtcgatcatgttccaacggcagacttaccaacgaatgacgaagaaaaagagataccggacgaaagagtcgatgaagaagcagatagaatggtaaatgaaatgcgtgaaaggctcaaggcgttacaaaactaa

SEQ ID NO: 1567 - DNA, 3585 bp, Saccharomyces pastorianus
atgagtgagctgaatactgtttcgacgaactccagtgattccgccaaaaacggtggtatgtcaaatagtcccgaggatatggactctgcagctgctgccagtcatgctataaagaaaagaacaaaggcttctcgcgcttgcgatcaatgtcgtaaaaagaaaatcaaatgtgactacaaggatgaaaggggactctgctcaaactgtcaaagaaatggagaccgttgcagttttgaaagggttcctttaaaaagagggccctcaaaaggttatacgaggagttctagtcattcaagacctaacgaaatacaagagtataataacgctaaatcatataatacagtggaaagtaataacagcacgaacaataataacggtcccaatagcaataccgtcccgagtaccccttcgagatcaaattcagttcttttacctcctctgacacaatatattccccaagctaacggcgtgcctcccagtttcccaaacactgcaatccaacctactatgcctgctggcaatcttggtcagcagcagttttggaaagtgccttaccacgaatttcaacatcagagaaagggttctattgactctttgcagagtgatatatcggtgagaactttgaacccgaacgagcagttgtcttataatactgtacaacagtcccccataacaaaaacgactcatgattctggcaatgcgcacggaagtatcacaggctcaggcagtgcctctggtagcggtggttactggtcctttataagaacgtctggtttattagctcctactgatgatcacaatgaggaacaaacaagaagatcaagctctataccttctttgttacgaaatacttcaaactcgcttttattgggtggccagcctcaactaccgccccctcaacagccgtcacagtcgcaatcacaatcacaaccacaatcacaatcacaatcacaatcacaatcgcaaccgcaactgcaactgcaactacaactacaaccacaaccacagccgccgcagcaacaacaacaacaaaaattgcagcaagggcagaatttgtattcatattctcaattttctcaacagcagccatacaatccatcgatatcatccttcggccaattcgctgcgaatggattccattctaggcaaggatcagtggctagcgaggcaatgtcccccagtgcgcctgctatgtttgccagcgcatctacaaacccaacgagtaacgtacagcaagcacaaagacctcaggagcaacaagggcaacaattttcgtccgagtcagatgctaatagaagacgacaatcagccccagtatcagtaacgttgtccgcggttaggctgaacgggaatgaaaacaacgatcgtaatatgaataacaatgctggtagcaacagtaataataacagtggttcttctaaagacatatctcaaaattctcaagaatctacgaccacaacgccagtagctctagaggcgacgagccctgggtctacttcccacagaggtacaaagaaacgtagaaaaagttatgtgtctaagaaaccaaagccaaagagggactcgtctatttccatatcatcgaggggctcatcacacccaatatcttcttcttctactatcgtatatggacaaatttccgatgttgatctgattgatgcttattatgaattcatacacgcaggattcccaataatacctttgaataaaacaactctgacgaatgatttgttgttggtgaacactcagccaatttctaatatccacgaagtaaactcttacgttattttgtggtttagaaactcgttagaactattggttcgtgtggctttgaaacaaaaacagggcgggagattttttgataatatagtgggtatgcccctatcgcctggaaacgataataataagcctggctttaccaccgctgtggtaagagatgatgctgagaaaacaagaaacgactcaaataatgaagtacaggagactttagaagtacaaagtgttttcattgcggctttgaacgagtgtttccaaaaaatcgtggatatccatcccaaattcagagaaaacaacgaacaaatctcgcccaagatcaaagttatctacttatctactttcattcttttgaattacatcttggcgtttgttggttacgataactcatttgtgctgggaatgtccgtgacaattttcaacgaattcaaactatataaattgatattgttccccgggacagatatcgatgagacgagggcagccgttggtggtgaggctatcacggagaatggaagcacgaacccctcagaatttgaaattggatccggaagtgctggacatataaatccatccaactcgccaaattccatggacgaagacatgaatcactactctgtgctattcaaaagactgtacattttactttcagtttttgattctttgcaaagttgcgcatttggtggacccaaactgttaaacatctccatccagggctccacggaaagatttttctccaatgaattaggttccaaatggtgcctggagcaaagccaattgagattgaaatgcgtcttgcgaagtttgaaactgggtgaattattaagtgaattggccagaaacagaatatcaatgaatgtggttagcaagcccggtttcgacatcgccaaattgtccttccttctatccgagtttgtgggaaatcaacccgtatcggtggcgcaattgttttgtaagctgttgattgggaagcacaacttcatcaattgcttattgtcgttgcatgatgccgaaacaggcgtttactcggaactaacattggaactgagttcgaaactggcagactccttatgttcattgatatcgataatcctgcaaatactaacactgattttaaggttgaaccccacaaacagcatcgacttcaattatagaccacccaacccgcccacgacggaccccaccgtgcaagagacatcgccgacaggagccggaaacactggcgctacgacgccatctgagggaaacccagatttttacaaaaagctactgggcctgaagcaagacagcgagaccatcctctccgacctgtgccggggagttatctcgccttttgcaattgccatactgcacgagatctacaacatcactgagctggttaagcagatgccaacgtcgctgattagcataatgatgaccgccaccaccacacagaacagccaggataccaagaagtctcaaggcctagtaatgaagctgtccaactccatgaacgaggtggtgcagatcaccagcgtgttgacgatgatcaagccgttcaagattttcgagcacgagctgaacaagcccgtggcgtcacacacgggggtgctttccccctcgtccagaacagacgtcctgtgggccagatcgggccaaagcatccgcgagacgcccgtgatgaaggcattgttcggcgaaggccaggcctcgagtacacagaccccagctactgctgcaccggcggagtccaggctcgagaacgtggccctcgagaacttcgtcagtatcggctggaaacttctagacgattccgagctgggctggtactga

SEQ ID NO: 1568 - DNA, 1500 bp, Saccharomyces pastorianus
atgtctactaagaagcataccaagacacattccacctatgcattcgagagcaacacaaacagtgtggccgcctcgcaaatgagaaacgcgttaaacaagttggcggactccagcaaggtccaggacgctgaccgcaccagatttgagagcgaactggattcgttttttactcttttcaggagatatctggtggaaaagtcctccagaaccactttggagtgggacaagatcaattcacccaacccagaacaggtggtcaagtacgaaatcatttctcagcagccggaaaacgtctctaacctggccaaactggccgtattaaaactgaacggtgggctgggtacctccatgggttgtgtcggacccaaatctgttattgaagtgagagagggaaacacatttttggacctgtccgttcgtcaaatcgaatatttgaacaggcaatacgacagtgacgttccattgttgttgatgaactctttcaacactgacaaggacaccgaacatttgatcaagaagtactccgccaacaggatcagaatcagatctttcaaccaatccaggttcccaagagtctacaaggactccttgttgccagtccccaccgaatacgactctcctctcgacgcctggtacccaccgggccacggtgatttgttcgagtccctgcatgcctctggtgaactagacgctttgattgctcaaggcagagaagtgcttttcgtttctaatggtgacaacttgggtgccactgtcgacttaaagatcttaaatcacatgatcgagaccggcgccgagtatataatggaattaaccgataagaccagagcagatgtcaaaggtggtactttgatctcctatgacggacaagtccgtttattggaagtcgcccaagtcccaaaggagcacattgacgaatttaaaaacataagaaaattcacgaatttcaacacgaataacctgtggattaacttgaaagccgtcaaaaagttgatcgagtcaagtaatttggaaatggaaattattccaaaccaaaaaaccataaccagagacggtcacgaaattaatgtcttacaactggaaaccgcttgtggtgccgctatcagacatttcgaaggtgctcacggtgttgtcgttccaagatcaagattcttacccgtcaagacctgttccgatttgttgttagtcaagtcagatctgttccgtttggaacatggttctttgaaactagatccatcccgtttcggtccaaacccattaatcaagttgggctctcatttcaaaaaagtatctggctttaacgcaagaatccctcacatcccgaagattgttgaactagaccacttgaccattaccggtaacgtcttcttaggtaagggcgtcaccttgaggggcactgtcattattgtttgctcagacggtcacaaaatagatattccaaacggttccatattagaaaacgtcgttgttactggtaatttgcaaatcttggagcattga

SEQ ID NO: 1569 - DNA, 2277 bp, Saccharomyces pastorianus
atggaaattgatggcaacaccttagtgttcataatagtgattcttttcctattcttctccacacccggtggtgacggagtgtcctcacagtacgagtttaaccagctacaaagattgaagcaacagttccaaacagaacataatgtgttcctcaatatgacacatacggataatttccgaaatatcactggtttcaaattaagctatcaagatacgttgaacaaccctttgcagaatgctacttatccactaccagggaaggaatatgaccgatggttgcccaaccagaactacatggtaatgcctaatgaagtcatagatactataaactctcaagtctggaatacttcgaatggtgacacctcaaatattttcccccctaatattacaagcacgctgttgggaaagatcaacgttgtgtcaaatagcaagtacgaaaggataagaatgcctatacccagattttatgaacctgcaaacgatttctcggaagatattcctcctgagggagaaacatactggtcagattggccctcttacggcgagcttcataacgtgacttttcaacatggtgagattgctattcaaatcactcatatgaacaaccttcagaatagcaacaattacttcaggagaaatttcataaataaggaaaatgatcgttggaaattattgaatctacaaatcgatttttcagataaaaccgaaaaggaaaagcactccatttcatcaaaggcggtctacgatatccaacgtggtagaattttatccatctcccaaagttctaaatttcattcattatttgcacttccccactacatgtctttacaggatgaatatgatgaagatatgttcaatgatgtcaaacagcttgtcgatgaattctggaatttcacggattacacggatgttatgaccatgaatgatgtacaggatgcatacaatagtgctaatcttaaatgtgaatacatgacttttcttcaattagaaccttggaatcaatataccaaggaccaaattaaattgatagatgatgaattgaactggccattggggcgtcctgtgaacctttctagtctacctcctataaatgtcgtttctgggatattatattctcctgattgtggtcttagattggcaattcatgatgtaaagggtaaacgatatgaactaaaaatcatgtcgattagaacgcacttaatgtttggtattgcgttattcgcagctcaaatatatttattgctgactcaaatgcatcaaacaaacacgccttccatggtcaataaaatttcgttttattgcttctcaatgatcaatttagtcgacggttccctagctacgttatattttgtggctgctagcgttgtccctgaattgtacttgcccttggtgataagtgcattttcatgttttatccttgcatccatattcgaaatacgttacttgatatcgatttatgcttcacaagttaacgaacaaaacgtcgggatagctaatttgttgcgtggtaataccggcacatatgatgagaataggccaaggcctgcatttatccctgatgaaggttccatcggcggctcactatatggtagatttttctttacgttaatcattttcacctttttgatattgagttcaacatcatggccccgtcagttgagaatgatatttgagtatatccttattttcatcttaaactcctactggattccccaaattttccgtaacgctgttaagggtatcccttctagaagagagagaacaagagctaccaacggaggaaatagaaatcaaaataagatgcctttattatggagttttgtgataggtacaacaataattagaagtttaccggtcatatatgttttcacttattcttcaaacgtctttaggcatcataaagatgttcgttttgttgtatttctatcgctgtggctactgttccaaatcagtattttgtattctcaagacatattgggatcgcgctggttcttacctcaacacacgattcccgaaggatattcgtatttcaagccactttcgaaccagtatattttagagcatggtggtgggaccgttcaaaacactgttgactgtgcgatatgtatgtcagatgttccaatctatattgaagaaattccagaaactcatatagtggaccaacatacttatatggtgacaccctgtaaccacgttttccatacttcatgtttggaaaattggatgagttataagttacaatgtcctgtgtgtaggtcaccgttgcctcccttgtag

SEQ ID NO: 1570 - DNA, 1833 bp, Saccharomyces pastorianus
atgaacaccggaatctcgcccaaacaggacgacggctccaactccaacctgctcaacatcggccaggaccattcgctgcagtaccaggccctcgaccacaacgacccgcagtatagagacgcgtcccaccagacccctcatcagtacttgaaccagtttcaagcacaaccccaacaaccccaacaacaacagcagcaacatcagcagcagcagcagcagcatcagcagcatcaacaacaacaggcgcagtaccaagcgcaatatcagcagtcgccgcaacaacagcagaatgtgtatttccctgctcctccgcaatcgctgagacagcctacttcgcagtcacaacagtcgcagcaacaacagcagcagcaacagcaacagcaacagtatgcggtttcgaactcgaactcgaactcgaattcgaactcaaacaacaacgtcaatgttaactcaatgcctcaggatttcggctacatgcagcaaaatgtttctggccaaaactaccaaacaataaatccgcagcaattctccgagttgtataactccttcttgagccatttgacccagaagcaaacaaacccacctgccgcaggctcgaattcctctgccagcaacaacaacaacaacaacattaatagcaacaacaaccccagcagcggtaacaacagcaccagcagcaatcctgcccaactggctgcttctcatttgaacccggccactgctgccgccgccgccaacaacgccaacagcgcagcttctttcttgacccagcctccccaagtgcagagatactacacgaacaacgtgaacacgctctctaatcttttggatccagcctccgcctccgcccaagacaaccccaactccgccgcccacctcggcctgttgccgcccaacttgccacctcagctgtctcaacaccaacagcagctacaacaacaacagctgcaattgcaacaacaacaacagctgcagttgcaacagcagcagcaactgcaaatgcaacagcaacagcaacatcaacaccaactccaacagcagcagcaccaacagcagcagcaccaacagcagcagcaacaacatccagtggtgaagaaactatcttccacccagagcagaatcgaaagaagaaaacagttgaagaagcaaggcccaaaaagaccctcttctgcttacttcttgttctcaatgtctataagaaacgagttgctgcaacagttccctgaagcgaaagtgcccgaactgtccaagttggcctcagccagatggaaggaactgaccgatgaccaaaagaaaccgttctacgaagagttcagaaccaactgggagaagtacagggtcgtcagagacgagtacgaaaagactctaccaccaaagagaccctccggtcctttcattcaattcacccaggaaatcagacccacagtcgtcaaggaaaacccggacaagggtctgatcgaaatcaccaagataatcggtgaaaaatggcgcgaactggatcctgccaagaaggccgaatacacggaaacctacaagaaaagattaaaggaatgggaaagttgttatcccgacgaaaacgacccgagcggcaacacaacccctcacccactaaagaccatgaacatgaatttgaatatggacactaaaataatggaaaaccatgacagcatcgttaacgaccccgtcgcgggcagcaatggcaacaccaccggctcaaacacccccgtgtcatcgtcgatgtcattgcaacagcagccactccaacagcaacaacagcaacacatgctcttggctgaccccactgcaaatggttcgatcataaaaaatgaataa

SEQ ID NO: 1571 - DNA, 2013 bp, Saccharomyces pastorianus
atgcttagaaccaaactgtccgtttcgatcgctgcgagatcccagttagcaagatctttgacagcgtcaaggacgtcgtcattgagaatatggtccgctcaacaacagccgcgtttgtattcttccaacacaagaccaaacaaggccaccacaacaagggaaaacaccttccaaaaaccatacaatgaccaagaagtgaccaagacaccagtcgggtcgcacgccagaaagatcttcgaggccccacacccaaaagccacccgtttgaccgtggagggtgccattgaatgccccctagagagcttccaactactaaactcccccttgtacaacaagggttctgcattcacacaagaggaaagggaagcgttcaacctggaggcattgctgccaccacaggtaaattctctagatgagcaactggagagaagttacaagcagttatgctacttgaaaacacccttggccaagaacgactttatgacgtcattgagggtacagaacaaagtgctgtattttgcattaatcagaaagcatatcaaggagctagtccccatcatatacacccccactgaaggtgacgccattgcggcctattcgcaccggttcagaaaaccagaaggtgtgtttttggacatcaccgaaccggactccatcgaacgcagactggccacttacggtggagacaaggacgtagactacatcgtcgtgtccgactcagagggtatcctgggaatcggtgaccaaggtatcggtggtgtgcgtattgccatctccaagctggcgttgatgacgctgtgcggtggtatccaccctggccgtgtgctgcccgtgtgtctggacgtaggcacaaacaacaaaaagctggcccgcgatgagttgtacatgggtaacaagtttgccagaatcagaggcaagcaatacgacgacttcttggaaaaattcatccaagccgtgaaaaaagtctacccaagcgcggtcctgcatttcgaagatttcggtgtcaagaacgcaagaagactactggaaaaatacagatacgaattgccatccttcaacgacgacattcaaggtacgggtgccgtggtcatggcctcgctaatcgccgctttgaagcacaccaacagagacctaaaggacatcagagtcttagtgtacggcgccggctccgcaggactcggtatcgcggaccagatcgtaaaccacatggtaacgcacggcgttgccaaggaagacgcgcgcaagaagatcttcctaatggacagacgtgggttgatcctgcaatcctacgaagcaaactcgacccctgcacaaaacgccttcgccaaaagcgacgcggaatgggcaggcgtcaacaccaagtcgctacacgacgtggtgcaaaacgtcaagcccacatgtctggtgggctgctccacccaggcgggcgccttcactcaagacgtagtggaggagatgcacaagcacaaccctagacccatcatcttcccgctatctaacccaacaagactacacgaggccgttccagcggatctaatgaaatggaccgataataacgccttggtggccacggggtcacccttcccggccgtcgatggataccgtatctcagagaacaataactgttactccttcccgggaattggtcttggtgccgtgctttcgcgcgccaccatcattacggacaagatgatttctgctgcagtggaccaactggccgaattgtcaccactgagagagggtgactccaggccggggctgttgcccggcctggacaccatcaccaacacctcggcccgtctagccaccgcagtgatcctgcaggcgctagaagagggcacagcccgcatcgaacaggagcaggtgcccggcggtgttcccggtgagacggtcaaggtgcctcgtgactttgacgagtgtttgcaatgggtcaaggcgcagatgtgggagcctatgtacaggcccatgatcaaggtgcagcacgatccctcggtgcataccaaccagttgtag

SEQ ID NO: 1572 - DNA, 1470 bp, Saccharomyces pastorianus
atggatagacctatagatgacattgtaaaaagtcttttgaagtttgtcgtcagagggttttatggcggctcctttgtactcgtactcgacgctatactgtttcactctgtactagctgaagatgacttgaagcagcttttgagcataaataagacggaattgggtccactcattgccagactaaggtccgataggctaatatccatacataagcaaagagaatacccgcccaactccaaaagtgtggaaagagtctattattatgtaaaatacccccatgctattgacgccatcaagtggaaagtccatcaagtggtacagagactgaaggatgacttagacaaaaattcagaaccaaacggttacatgtgctctatttgtgagaccaagtacacccaattagaggcggtacaattactaaattttgacaggacagaatttttatgttcgttatgtgatgaaccgttagtggaagatgattctggcaaaaaaaacaaagaaaagcaggataagctgaacaggctgatggaccaaatccaacccatcattgattctttgaaaaagattgatgactcgagaattgaagaaaacactttcgaaattgcattagctcgtttgatacctcctcaaaatcaatcccatgccgcttacacatacaatccaaaaaaaggcagcaccatgtttagacccggtgattctgccccattaccaaatcttatgggcactgctcttaacaacgatagcagtagacgtgcgggcgctaactctcaagctactctacacatcaatatcaccacagcaagtgacgaagtggctcaaagagagcttcaagaaagacaggctgaagagaaaagaaagcaaaacgccgttcccgaatggcacaaacaaagtaccatcggtaaatcagcccttggaagattggataatgaagaagaatttgatcctgcggtcactgcatctgccatggattccatgaatgcgaacaacgaatccgtgcaagaaaactcttaccaaactaataatagaattttgactgagcaagaaatggaagaaagagaaaacgaaaagactttgaatgattactatgctgcgttagcaaagaaacaagcaaagctaaacaaggaacaggaagaagaagaagaggaggaggaagaggaagaagacgtagaagaggatatggaagatgtaggagatgaagatgatgaagatgcggctgaaaacgcattcgaggatgagtttgaagatgtgactgatgcaactgatacagtcaaaacagaaccaaaagacagtaatttaaacagcgttaaacaaaaccccaatgacagcaatatcgaagaaaactcaaaaacatctgccgcttcaactgctgcagatacaaaggtggacgcagatgcagaagcaggcgcaaaatcaaatgctaatgacgatgatgacgatgatgagatggacattgaatttgaagacgtttag

SEQ ID NO: 1573 - DNA, 2046 bp, Saccharomyces pastorianus
atggaaaagatcaaccctgactgggcgaaggacatttcgtgcagaaatatcaccatatatggctattgcaaaaaggagaaagaaggttgccctttcaaacataacgataatgctaccactactactaccatcactaccgccactaacgacgtttcttctctcctagacgctagcgaagcggctaccccaaccatggcgtctgttcccaagttcaatgccaaggtttcggccagttttactccaatgacaattggcagtgattctttagccactgccagtaccaccacttccgctactacgagtactggtggtagcatcactgtagcagctacctccgccactactgttaactcaatggccagccccgtggtcgataacactttgcccagcaacaataacaacagtagcaacataagcatatcgatacctgccaccgcctcgagttccaattacgacccattcaatgcccccatttttaccccttcttccacttcttcgattcacaccagtacgaatgcaccttcgtacccattccctaccatgaccaattctggaggcataaatataaacgttaatgatgaaaacaatagcaacatgagcatgacaaacaacgtgccacctccaatgccaccgccccctatggagaataacgatctcaaatatccaagaatctatccgcctccacatagtcttttacaataccatctctatgcccctgagcaaccaccatcgttgaaatcgcttttaaaaccgaacgaaaggtctgctgaccaactattcatcccgaataatattagagaagacttgactaagaaaaacctttcgactctgcagattttcccctcatccggtaaggtcataccaagcgttgttcaagattatttcaacttagtcccactaaatttcaataataacgattttttaaataaaactacccttttcaaagtcttttccaattacgacggtaagccatacgttttaaagagactgcctaatattgataaatcgatgaatccaagcaaaatatccaaaatttatcaaatatggtcaaaggtaaactgtaccaatctaataaaatttagagatattttccaaaccaccaaattcggtgacctatctatctgtttgatatttgattattatccgaattcattatctttgtacgattaccattttgtcaatttccccaaatttcccattacaatgaactatctatggacttacttagttcaattaaccaatgtgatgaattccatccattcgcaaaacttgaacattggaaatacattaaactggacgaaagttttaattactggtgacccaggtagaatcaaattgtcacattgcgactttatggactcgttgtttaatgaagatgttgactcagtagtgtcttccggcgggagtaccaaggaaagacaacaacaactggattacaagcacttgggacaactattattcaacttatcaatcaatactgataacttcaacaacaataacacgccaagagaatatcaaatagatgaaattactttacaatcaatcgacgatatgaaacagatagatgacaaattcaaagacgtgttgaagtatttattagctgatggcgatgtaaagaagagtgtccatgacctgaccagtcatttttatgataaaatgttcatggtcttggagtcatcacaaacttacacagaatacatagaatccgtcttatcaagagaactggaaaatggcaggttattcagactggtcaataaactaaattgtatctttggtagaatcgaatctagaatagacataaattggtccgaatcaggtacgaagttccccattatactattttacgactacgtatttcatcaagtggattcaaatgggaagccaataatggatttaacccatgtactaagatgcttgaacaaattagatgcaggtattcaagaaaaattaatgttagtcacgccggatgagttgaactgtattattatatcctacaaggagttaaaagacttgatagactccacttttagatctatcacccaatag

SEQ ID NO: 1574 - DNA, 615 bp, Saccharomyces pastorianus
atgaccgctgctacgaaaacaacaccggctttctcgccagaccaagtctctgtggtcttcgttctaggaggacccggtgcaggcaagggcactcagtgtgaaaaactggttaatgattattcgtttgtccacctagcagcaggcgacttgttgcgtgctgaacagaacagggaaggctccgaattcggtgaattgatcaaaaactacatcaaggaggggctgatcgttcctcaggagatcactctggcgctattacgtaacgccatttccgaaaacgtcaagaacaacagacacaaattcttgatcgacggattcccccggaagatggaccaagctatttcatttgaaagggacatcgttgaaagcaagttcatcctgttcttcgattgtcccgaagacgtcatgctccagaggctgttggaacgtggtaagactagtggcagaagtgacgacaacatcgagtccatcaagaagagattcaagactttcaaagacaccagcatgcccgttatcgagtacttcgaaaccaaatccaatgtcgtccgtattcgttgtgacaagcctgtcgacgacgtctataaggacgttcaagccgccattcgtgatagactatag

SEQ ID NO: 1575 - DNA, 819 bp, Saccharomyces pastorianus
atgaatcaggaagagttgctgggtttcctgctgaacgatagtggtaacagccagaaaaaatgcgtcgcggatgagcacgtctactccaattggttgaagaacggtagcgacgatcaaaatgcgtcccgtgagaggtcgcaggctgcagctgcagctgcagctgctccggcgcggaaggtgccggtagatgctatgcaagaggatgtggacgagctgttgagcggcctagaaggtatcatcggaagcgcagacgctctcagttcgaagactaagtcaaagggcaaaactaaaaaggctagatcaaaacctaagaaggagaacgtgcaggtcgacaaacagtctatgctgttcgagaccgaagatgctggcgaggagagcacccaagacgccaaagagccgtctgtgtcgccagatctcgagcgctcaaagaggaaagagaaaggaaggaaaaacgccaaggagctgtcgtacgatgaactgaaagataagctagagatcaccacccgcaaatcacgtctcgagtgcaaagatttgaagaaaaaattgaataggctggaaaggagaaacgtcgaacttgagcaacgcctggaagagttggcaattgaaaatcaaaccctgatacagattaacaaaaggctctcaaaagatgcggaccatgacgaagaggcttcgaaggaccagaaaagcaaggaaaaggaccggaaaagaagggaaaaaagaacagcaagaaggaaagaggaaaggaaacgagaaaagcacataataccggaagcaattccttcatcaaccgacacggatggacaacctatagaattctga

SEQ ID NO: 1576 - DNA, 3213 bp, Saccharomyces pastorianus
atgatgagtggcactggaaacgtttcctcgctggttcacagctacaacaacaacacacagcacaacgatggggcccaagacctggatctgttagagtcagagctgttggatatcgcactgctaaatcctgggtcgtctctgcaagatcctgccctactgtccatcaatccggacgaaatgactgctgctcacacccctgtaccgataaaggaagtagatcgggaactaagggatgacgtcccttccttgcagggcttactcgatcggcacatccagtttggtagaagactaccgctgaggacgccatacgccaacccgctggatttcatcaatattaatccgcagtcgctgccattggcattggaaatcatcgggttgcccaaggtctctagagtggagacccaaatgaagctggggtttcgcatcagaaatgcacatgaaagaaagaactactttattcatctaccctccgattgtattgcaaaggacaagttttttatccactcggacgatccgaccaatttgaccatacccaacaaggacatcaacgaaaggaccctcttcttggacgctttcctcttgtctgcatccaacagcagtaacaacaacttcaaacagacctatgtttgcaacagatgcatcaacagagaaaaaagaagagcttcgagaagaaagtccgggttgaatgacaattccatctggcaaagtaacgaaaataaaagagcaatcatattcaacagtaaacagatattcatcatcaataataacggctcgagcgatgacgccagtgccgttgatttcgatttaccaacccgaatcgtctgctattgcaggcaccataaggccactaacggatttgtgattttgttcctcttgaaagatcataatggcgatatcatggccaagaccataactgagcccattatgatcatggacaaaaagaacgccggcaacgtcactaccccaataagcaccagcaatgctcaaatatcgcccatgacaaacgacaataggtcgttttcatctccccaaagcgacgtaaatttcccaccagatttccccattgcttcgaataataaggaatttatcatttccacaaattgcatgcttaataataacaataatattaataccaatacctcaacgaccaacaataacagacatttcccatctccaaagtcttctagtgaagacagcaaccattcattttcagatattcatttttcaaacaacaaagactccaattttcaccgttcattggattcctggtcttccgcaggcttcaataactcgtcaaatcccgcgcttaccacgctcaccagtgatttcagtaccacttccacaagaaatacaggcaagagacagcattcaataaaggaacccttttcgtccgctccaaactcatttgcacgtctttctcaaaattttaccgattcatctactcacatttcgaaccacggcactattcccatgggcctcaataacaacccctccattcaacgtgtcatccccgcacaagggtctattaatggaggtattgaggttactctactaggttcgaagttcaagcaaggcctaatcatcaaatttggcgaaaacatagcactttctagccaatgctggaacgaatctacaatggtaacttacttaccaccatcgtcgaaaccgggacctgtattggtaactatcctcgacccgagtgaagcatccatgagaaacaatagcaacagtagtatttctacttgtaatagcggcaacgatatattacaatcgaataaatacaccggcggtaaagctattttcacttatgttgatgacactgacagacaactaattgaattggctttgcagatcgttggattgaaaatgaacggtaaactagaagatgcaagaagtattgctaaaagaattgtcggtagtgattcgccgtcatccagcaatgacacaaaatctgatgctcaaaatatttcgccaaattcgtactcgagtatgatggtggacatcaatgatgaacaactgatcattgaagttattaagtccttcaaacaaaataacaacatttccattaatctttccatgtgtgatgttagaggtagaactttactacatttagcggcatttaataactactatagccttgtctcattattggtcaaatatggttcgcgcttaaatgatcaagatatttttggttttactccgttacatatggcttgtattaatggggatttgagaattgtaagactactattggaatgtaacgtggatatcatgaagaaaacaaaaaacggctttattgccaaacaattctttttgatgaattacactgtcaataaagtaaaatactctgattatgaaactagtttgtttgacagtatcttaaccagattgaccccgaataccacaacgaactctaagaatgaaccattcgaaaggaattcatctcagtctagtttcaattctagtttatttgatgatgatgctgatagtcatgctcaacaaaaaagggagcatccaccagtcaactctgctgtttccatttctcatctatccggtttcaataatgatgcgtcatttgcagacatggatttagattcgggatatgacgtaagtgactgcgaatcctcttcagatgaaattgccctagagtttttcaatacccataaaatcaaggacgcctcattcaaacaaaatcaacaacgacaaaccacggaaactaacacagaaaacgacgggtctttatggaacaggatgctgactcgtctaaatgacgaactacccaagtatgaagatctcttccctaaaaaatccaaaaattgggaacttggtagtaagtctgtcgaaatcgggctacacgacaacaccattcaagagagcatggatgattcccaaacctcttctgaagaagatgagttggaagctttacaaattggatttaattcaatcttctccaagaagcaaaatttccagaatgataaaatgctgctatttttttggatcccattgactttggtattattattatgttttacactgtcaaacttagggaaagatgacgacatgttccacaacctgtctaaagtcgtccaggaatacttgagaatcggattagcaaacattttattaggcaatgaaagaatgaaagcctctttcaaaatgaaattatcgaactttcaaaacaataacattctaaatgacatgcgagccagttga

SEQ ID NO: 1577 - DNA, 951 bp, Saccharomyces pastorianus
atgcaagagtacgactattcagacatcacgccgttgcccatccagacaggcctgcaggatgaactgtgccagatcatgtacacagatgagtacaagcagttgatggggctggcaagggccatgctcagcgccaacgaactgtctccaagggccctacagttgacgtctcggatcatcgatgtcgcgccagctttctacaccatgtggaactacaggttcaacatcatcaggcataacgtggccggatgcgacgacgccgtctcgtacttaaacaaagagctggactggttggacgaggtcactttgaacaacccaaagaactaccagatatggtcttatagacagtctcttctaaaattgcatccctctccctctttcaaaagagaactgccagttttaaagctcatgatcgatgacgactccaagaactaccacgtttggtcgtacaggaagtggtgctgtctgttcttcagcgatttccaacacgaacttgcgtacaccaacgatctcatcgatgcagacatctacaacaacagcgcatggactcacagaatgttctactggacgaatgccaaacgcgtggcctcagaagtggagctggctgacgagctgcaattcgtcttggacaagatacaactggtcccacagaacataagttcgtggacgtatttgcgcgggttccaagaactcgcccatgatgctggtcaatggaacgacaaattggtccagttcgccacatcgttcattgggaacgttttctcactgccggtcaattcaccacaggatctacccgaaattgagtcctcgtatgctctggagttcttggcacaccgttggagcgtggactcatcgactcgagagaacgccataagagcctacaacttgcttgcaactaagtacgatcccatcaggaagaacttgtggcaacataagctaaaaaatctgaactga

SEQ ID NO: 1578 - DNA, 300 bp, Saccharomyces pastorianus
atgttaggaatgataagatgggtgctcgaaggaacgttggtggcgatgcttctatcggcaataagaagagagaccggaatgatattcttttacaaccactatcagctgggcgggtggatacataaatatatgtcctggggggagatgtgttattcaaggacgctaaaaatggtaaaaggttctagtcttttcagaaagcagttgaacgaggacggatttggacgtatcaatgacaatggcataaaacgaaggggaagagatcagccccagtctggcagtaggttcgtggagttagattaa

SEQ ID NO: 1579 - DNA, 990 bp, Saccharomyces pastorianus
atgactaccatgccgattagcaaacccaatttgctaaaattcaaacacgtcaagagcttccaaccacaagaaaaggactacggtccggttacttcattgaatttcgatgataatggccagtttttactgacttcatcctccaacgatacaatgcagctatacagtgccacaaattgcaaattcctggatacaattgcctccaagaaatacggctgccattctgctatttttacacacgcccagaacgaatgtatctattcatccacaatgaagaattttgatattaaatatcttaatctagagacaaatcaatatttgagatatttttccggccacggtgccctagtgaatgatttgaagatgaacccaatcaacgatactttcctgtcgtcatcatatgatgaatctgtaagactttgggacttgaaaatttcgaaaccacaagtcattataccaagtctcgtaccaaattgcattgcatatgacccaagtggtctcgtctttgcattggggaacccagagaattttgagattggcctgtacaatttgaaaaaagtccaagagggaccgtttttgataatcaagatcagtgattcaacttttaatcaatggaacaaactagagttctccaacaacggaaaatatttactcgtcgggtcctcaatgggtaaacacttaatctttgatgcattcactggccaacaattattcgaactaataggaacaaaggccttccccatgagagagtttctggattccggatcagcttgctttaccccagacggtgaatttgttctcgggacagactacgaaggcaagattgccatctggaaccattctgactcgatcagtaacaaaactttaaaaccacaagggttcataccctgtgtttcccatgagacttgccccaggtcaattgcattcaaccccaaatactccatgttcgttaccgcggatgaaacagtggatttttacgtttatgacgaatga

SEQ ID NO: 1580 - DNA, 2052 bp, Saccharomyces pastorianus
atgaacaaggaattggcatccacattcttatcgagtatcaaccatgaacgcgaacaagacattcaaataacttctcgactgttgacaacgctgtctattcaacaattggtgcaaaacggcctggcaataaataatatacatctagaaaacataaggtctggccttattggtaaactgtacatggaactagggcccaacttagaaatcaatgacaaaatcagaagaggcgacatcaagataggcgacattgttctgatacgacccgccaagaccaagaccgagacaaaggccaaggccaaaaaggcaactgaagactccagtgaggaccaagcggaatgttcaggtgtcatttacaaaatgaatgacacccaaatcaccatagctttggaagagtctcaagaagtcgttgccaccacgttctactcctatagcaaactttacattttgaagaccactaatacaatcacgtataagagaatggaatctactatgcgaaagctatctgagttcagttcaccagtacaagacaaaattgtgcagtatttagtgaatgagcgtccttttattcctagctctagccaagtccaaaatgtaaaggatttcataaacccgaatttgaatgattctcagaaaactgccatcaattttgccatcgacaatgacttgaccatcatacacggtcctcccggcacgggtaaaacgtttaccttggttgaattgattcaacaactgttaatcaaatatcccgaaaagagaatcctgatctgtggaccttccaatatttccgtggatactattctggaaagattaacacctcttgtttctaataacttactactaagaattggtcatcctgcaaggttattagattccaataaaagacattctctcgatatactcagtaagcagaactctattgtaaaggatatttctcaagagattgataacttgattcaagaaaataaaaaactgaagaactataaacagcgtaaggacaattggaatgaaattaaattactacgcaaagatttgaaaaaaagagaatttaagactatcaaagatttgattatccaatctaggatagtggttaccactttacatggctcatcatcgagggagctgtgctccctttatagagatgacccaaacttcaaacttttcgatacattaatcatcgacgaagtgtcacaagccatggagccacagtgctggattccactaattgcccaccaaaaccaatttcacaagttaattcttgctggtgataataaacaattaccgcccacaatcaaaactgaagacgaccgaaaagttattcacaatttagaaaccacactgtttgatagattaatcaagctttttcctaagagggaaatggtcaaatttctaaacgttcagtacagaatgaataaaaatatcatggaattcccatcacggtcaatgtatcacggccagttattagccgatgaaaccgtggcaaaccgacttttaatagatttacccatcgttgacgctactccatccgatgatgataatgacgttgacacgaaatttcccctcatttggtatgacactcaaggtgatgagttccccgaaactgcagacgacgcgaccattctcgggtccaagtataatgaaggtgaaatttctattgtgaaggagcatattgaaaatttgagatctttaaacgtcccacaagattccatcggtgttatttcaccatacaatgcacaggtttcacatttaaaaaaacagattcatgatgaactgaaattaaccgatattgaaatatctacagtggacggattccaaggccgtgaaaaggacgttattatcctaagtttagtccgtagcaacgaaaaatttgaggttggtttcttgaaggaagaaagaagactaaacgtcgccatgacaagacccaggagacaattggttgtcgtgggcaacatggaagcgctacaaagatgtggtaacaaatatttaaagaactggtcggaatggtgtgaagaaaacgctgacgtaagataccctaacattgatgattatttataa

SEQ ID NO: 1581 - DNA, 525 bp, Saccharomyces pastorianus
atgtctttggccaaatctgctgctaacaaacttgactgggcaaaagtcatctcttctttacgtataacagggtccacagccactcaattgtccagtttcaagaagagaaacgacgaggcacgtaggcaattattagagttacaaagtcaacccaccgaggtagacttcggccattataaatccgtattgaaaaatagccaagtcatcgacaaaatagagtcctacgtgaaacagtaccagccggtcaaaatcaatgcttctaaacaattacaagtgattgagtccttcgaaaaacacgcaatgaccaacgccaaggaaaccgaatccctagtctcccaggagttgaaggatttgaagagcactttagataacattcaatcagcaagaccattcgatgaactaactgttgaagatttggtaaagatcaagcctgaaatcgatgcgaaggtcgaagaaatggtcaagaaaggtaaatgggacgttcctggttataaagagaaattcggtagtttgaatgtgatgtaa

SEQ ID NO: 1582 - DNA, 2997 bp, Saccharomyces pastorianus
atggtgacggaccaacaaaacaggcatccgatactatctaagcaagcagcctacgttcacaagcaacggcaaagaaagcaaccgagatcagctgtcgcgtgtctttcttgtaggaaacgtcatattaagtgtcccggcggtaatccatgccagaaatgcattacgagcagcgccatatgcgaatatttggagccgtcaaagaagatcgtcgtgtcgacaaagtatctgcaacaactgcagaacgacctgaacgacaagactagagagaataatcgcctaaaggatttgcttttggaaaaaacgatcagtggcaatggcgacagccacagccacagccaaagcgctgatgagcgcccgaatgaaccgccaataagcgactcgttagaagtatctagcgctccgcctgcccctatattcgaccttatgtccaatagcaacactacatcggataatgacgatgacggaaatcgcaacggcaacgataacggcaataatgccggaggtagcaacaaagcgactttttctttgttcagtaatagaaattacgatcacagtttggaaaaatattacaacaagtccatcagtatccttgcgccttcaaccaatgccaatagcggcaataacgatggaggcggtgatgacgatgacaatgacgatgaagaaatatcgacgaatttcgcccaaagaagcgggagactcatagaatctcataacgggttccattattttgttgggtcttcttcgatgaccttatttggactggagattcaatctctagtcacaaagtatgtttccgttaaaaatttcaaacctttaccaataaacgctaagaatgatattttgaactccaatttgaacccgactataaattcctttattaattcgaataattatcttttttcttccttcaattttctgaatcctatatcgaaaattgttaatttaaattcaatcaatgataatctttctccattgatgttcaaaatcgttttgaagaatgataatgacgatgatagcagtcagcaagacgaaatacattttcaattaccctcatataattatgcgaaactattaatagactgcttcataaactacaatgatggctgtttttactttttcaacgaaggcctggttaagtgtggtatcaacaaactatatttggaaaataaatggctatactacgataacgccaagagaatttttgacaatgaaaatgacccaattttacaagctatttggttttgtaaaatattactaatcttagcggtaggcgagatgtatctaggctctatcaataatgagatgttgaaaaactactctaaccagccaaaattacctggttcaaaattctttcaaatgggatccaaaattttcaattgtctgttctctagcgaaaggttagaaaatgtgactaaaaagggcggtattgaagtcttgctactatacgcgtttttcttacaagtggcagattatactttggcctcttatttttactttggtcaagctttgcgaagttgtttaatcttaggtttacatgtagactcacaaagtgatactttatctaggttcgaaattgagcatcatagaaggctttggtggaccgtttatatgttcgaaagaatgctcagttccaaagctggcttaccattaagttttactgattatacaatctccactgaattaccagcagatattgatgacgaaagtactcggtccaagaataatcattacgttttcagaaaggctgaattgatttcgaactgtgttacaatcgttaaaattaatgctcaaattttgagtaaactatatcaaaggcaacccgaaaccaacataatgataactttaaaagtcgttatcaagcaattgttacagtggagaaataatttatctgattttttacaagtcgattttactcaaaaggatgaagatttcagaatatcgagattgtcaacaaacatgttcacagaatattttcaaggtatcaacctggctatacggcctctattatttcatttcgcatctattcagttaaaaagattcaagacaagtaatacttttatcaacttgcaaaattattccaccacagtctcttctttgttaacttgttccttacatgcttcggttaatacagttagatctttatggagtctattgcaaaataatatgcttgccatgtttggctatatggacagagaatatctttttacttcttcttgcactttattattattcaatactgcctttggtgttcatgaacaaacgctatatcatttggatcattctttggaaatttttactcaaatgaggaacctagggaatatcccagcagggttaagaagagcgcaattacttaccttgatggctaatctggatttccatggtataatgaacgatttgattaccaaatacaatgacatcttgaaattcgattccttgaactgtgaaaatgataatggagcagataattacaacgaagtcaaaccacaaaacgaaaatgaaaaccacaacgaaaaaaacaataagcctagccatgatgatagttcaaatttgaactctgataaaacaaattcaagcacaagcttaatcaaaaccgaatccatgcctaatacggccagcatacttccagaaagtgctactaaatcagatacaaatgattatagtaacggaaatggacacgataatgataccaatatcaacaatgcagaaccttccactttcttcgatattataactgcaactttggaaaattcataccaaaccactttgactaaaaaagaatctcaagtaatggaaaaaaacatggatcaattagattctgtccacaacttaaatgatgacgacttacaacagttgttagaagatttggggaatatcgatcattccgatgaaaaactttggaaagaaatcaccgatcaagcaatgtggctaggtaataccatggatccaaccgcagcagcagggagtgaaattgactttacagattatttaggaccatga

SEQ ID NO: 1583 - DNA, 5298 bp, Saccharomyces pastorianus
atgagtagttatagtggagcctatgggtcccgcgatcagcgaaaagagaagtatactcaaggtaaagaattcgatgacggtactttagaaacactggaaggtataattactgcccttgaggacgaaacagtctcaaaggatttccaacccctcataatgttctttcaaaaagggtttgctgctcaatcggtacaggcttggtcatactatgctcaggtaaataaccatgggaggttttcgaaaacaactacactattaactagaactttacgggctttatcatctgacagtagtacactagctactggaagcggtcttattaaactaatactgacgggatataccaaagttctttatagagggttaactaacatgcgtgctcaattaaccaatcctattcttcgtttgctcaaacaaatagtcaacttcaacaacggccaacatctcgaggaatttgtgtcttatttcgatttttcactacctgtcttaccaagactgctaacaccaagcaagtctgagttagccgatggcaattcctctgcacccaagaacgattcaataagatttacgttcatcaaattctggttgacattgatttcaaaggcttcccccttcgtaagaaaagaacttttaacagaaaactttaagattatgagcaacttatttaagttcatgaataaggttgattctgacaagctttccgaacatatactgtcggtattcataaatgacatcttgaaagagaaatctttcaagaggactactaaaaccaaaatattaaacgagttagcagcctccaaaatccatcacttttattattcatcaaacggggacttggttaagaaaaccaatgagtttttcttaacttttggagcctcgaatgagtttagtgtggcttttcctgataattgtgtttggtttacgaattcagttactgatggggcctctcatggggcgctgataacggttaaccaagtagaatttcaagtgcacaataaacttttgtttaacactttacgtgttttcaagccatgggaggatattcagcagttgaatactctgattaaaatattggagaatgttccagaacttgtagcaccttacagcatctttttgactacaaatggtaaccacgaccctaagatgacttcctattggtttggtacaacattattactaaacaaaattattaacttaaagataccacaatttatggagagtgttgagagcaatattccaccctccacttccttagtcatagaaaatattttgccttctttactcactaaatcttcgttaacaaagtctttacagtctgaaacgccaatcataagacaattggcttgtcaattaatagtcttagcgttcaaaaaattagaaaaggtttctatactttatgataaaaagggctggaaaaatgaaaaggccattttactaaacaagtttcatactagaatacctgagttgccaatatttgtatccacattgaacaacgctttggccacaaataaagataataaaatcttaccattatccatatccgttatattcaattactatagcaaattattcccaaatttattctcaataaacttaccatcatcaaacctttatacagacatcatgcaaaagcctacaatttctggaatggaatttgctattctggacaactacttgcaatttcaagaatttaactccactcaaaccaaatggtggaactcaaattccaacggaaattctttattcactttattattaaaattagcctcttccaaaaacgcctctaatatggtagctaccagaatatctaacttgctagatgagttaacaagagcaagtgtcatcttcaatccaacactaatttcaccattaatggctttagtaaacagtctccagggtacttgtctccaggatttcgaagctgaaagcatgaagaagatttggaaatggtttgatgagactatatcccgtgtcatgaaaacaccatacaaatatgtcgattcggcaaaagaatataattacatttctcctttcatcatgggtctttcagaacaatggaaatacgttgataagaataatatttcagttctggttaacaaatggcttttactattcttaagaaatatgattttcattggagaaaatcatacaggaataattaagcttgttaaagacgctttcccggaaatcaatgagcatgatgcaaatctgtatttgaaattcgattcatttgaagaaaatatcaaagaactgaacaactcggattctttaatctctgcaatgaaggactcgtcattctttcaatatatttctttgcttccatctaaagctctgacaaatatttctagattaccagtgaacagattggacgcagctggaattctttttagggttcaactactggtaaaagacgattctatttcctatgataatcgctttgaaacgattgcttgtgaattagtaggcaaggttgccagttatatggtgactgatacagaatttccaatcatcaaagttttggaaaggtatttgaaatttgctttacccaagctaatcacagaaaaagaaaacagtttactgatggaaaagtcacggttgatctgcaacttaattggggcgatatgctttgaaacagggcaacaattagcaacattccaagagacaatacaaaagaccgtttttgatagtgaaaatattgaagaacgtgtcagctatgatggatcttatagtgaaaaatatattaatgctttactgaaaagtgtcagtgagtatttgggtacaccagtattaacttccttgctcatgtacggcattacacttgagttttcaagaaatattctgaaaaaggtacacaacgaaggaagaagtataggtatgtcccttgtgagaaatgtattgaacaaaactaagaacgaggactccactttagtcaaagaaattaatttttttctaaccaaactcttcgagacaaacaaagttgacgttgatgctatatctgcacccgaaggtgtactatcaccttcagaaactgcttccttcattgacagtgttgtttcgaatgatttgaattatccggtgttagaagctttttacaaatgtgaattcttctctttctcatcattcataccaaatattgagaaaattaaaaacttgcctttactaagcattgtaacggcaacagcactgtccgagcatatggaggataacgatttcagcgtctttgctcatgaagtacttaaaaaatatgataatgatattgggaaatatacgtctagtgccacttttaagagggacatttttgatgaggtagtagacatgatcactacttatattagaatttatgacgattcaaaaaaactgaaaattttagaatgcgttttggcgcagaatgatcacagataccatgcggccacggtaaattatattactgcaaataacgactttgcttatccaggagtgaccacatggttaaataaaacacttctttatgtcacaaaatatctttcagaaagagaaattttatccgattcgttcttcaaactattgcatgccatgactaagctattaagcaatgaaaaggcatcaaaggtgctcaattccaagattgtcaatgctcaattagaggtcattttgggtagcaaatggattgaaaaaacagatatacttgagtacgtcaacatactaattctctgcattaagcaaaaatcaatcaaatccgaaagaatggttcagttattattgaacaacgaaaagtattcatcaattatgattacagacaatgatgaaaattcttcatataagaaatttttaagcacaatgatattattcactttattcaacttcaatcccgtcataaactctacgccaactgttcaagaaaagctattgactttttactctggtactatttctagcgatgataagctaatcataaaaatgttagagattatcgaatctcaaacctctaactcatggacaaacatgattttttcgtgggaatttatccaggaggaagaagaggaagaagtcttggaaactattggggacacaaggttgattactaaagaaaaagaaggtttgataataacattgagaaagcgtttgattgagaagtctattgacggatacgtattagaaagaccacaaattcctgaattttgcatatcttctaataaagacagctttgatattactactagatggaatttgctcaagaagtactatgaacaaactgagagatgtggtactgctatgtatgatccattgttgctattgttactggtgcttcataataaagaactagtaaagatggtcaaagaagaagatggcagtttaacatacaagtatgaatttaagaaattcctagattcgaaacttttccaattcattatttgttcactaagtgacgatgaggctattaccaacataagttacgaacacttgacgaatttagcggtttcattagagaagaaaagtgtccaagcgaatcctgtcaagaaagtcactgataaagatgacgaagagaaggaagaggataacggtttgatcaaatataacagcatttaccaaattttgatcaagaggattctgtaccataggcaacaaaaccaagattcaattaggccattaatttggttttctatctctagaattgttgatttactgaaaaatccaactttaccattacacgagaaggcgtatcgctgggtattatcaagttccactatacgtggttgggatatccctatggtttccgatgtgatgatgtcctacaacaagaggcaacaagacgacgataacaagaaagagattgatatggaaatttattatggggagctgagttgggtcttggcgacaattggtaagggaatcaaaactgacgaagatttcaagatgttggataaaaaaggtgtattcgaatggttattaaacttaatcaatgtaccttacttgaaagagagattacgcaaattgatttttctggttttttacaaggtgcaaagagtagctgatgatggcggactgaatatgattagtagaaacggtattgtttcatttttggaaattttgaacaacaacatcaaatctaaattaccaaaggacaatgtgctgaacagtgctgatgtcttacaaaatgagaataaaaatacattgaataatacctttaagttggttcaagaacagaatgggattgaaaaattgttgttaggttataatgaacttgtcaaatcacagaaaagattgatattatggacggaaggtgatagcgacaatgttgtcaaaagactacgtaaatga

SEQ ID NO: 1584 - DNA, 516 bp, Saccharomyces pastorianus
atgtcacaatcactacgtccatacctaacagccgttcgttactctctggaggctgccttaactttgagcaatttctcttctcaagaagtagaaagacacaatagaccggaagttgaagtacccaatactagcgccgaattgttgctccaaccaatgcatatatctcgtaatgaaaacgaacaagtgttgattgagcccagtgtgaactctgtccgtatgagtttgatggttaaacaagcagatgagatcgaacagattttggtccataagtttaccagatttttggagcagcgtgctgaagcattctatatcctaagacgtgtcccaatacctggctatagcatttcctttctaataaccaacaagcatactgaatcgatgaaaactgggaaattagtcgactttatcattgaattcatggaggaagtagacaaagaaattagtgaaatcaagttgtttttgaatgctagagcaagatttgtggcagaggcctaccttgatgaatttgtttactaa

SEQ ID NO: 1585 - DNA, 1062 bp, Saccharomyces pastorianus
atgatgacgtccagcaaggcaaaggttttgcagctcgttgattcttattgccagaatgcaaaggctggacagttaaagtctttctcgttccttattggagcagcaaatggcactacaaaagaactcaagagaaataacattcaaaaacaatgtgaatttctagagcaattacgacaacagaaaacaaggcaagggcaaattagtatattgtccatggatgctggtgtttcaaattttgctttctctaaatttcagttgtgtgataatagtcctttacccaaactcctagactggcaaaaggttaacttagaagagaaattctttcagaaagttaagaagctcagtttaaatccggtagaaacgtcccagcttgtttttaacttaacagaatatctattcaaatctgaaccgatacctgatgtgtttacgatcgagagacaacgtacaaggaccatgtcttctaggtatatattagagcccattttaaaagtaaatattctcgaacagattctcttctccaatctggaaaataagatgaggtatacaaatagtacattgaatgcttctaagctgcagtatacggtacgctcgtctgatccacatcggatgacctcatattggtgtattcctaaagaagaaacgccagtcggttcgaaaaagtcgaaatctaataagcatagcaaagattcgaggataaaactagtcaaagaaatattgtcaagctcaattcttgagaacaattcgagaagccccaccaaatttgttgatttctctgatctttgggggaacaggatacgagatgcactttctaaaaagagaagttttaaactctgtgatattttagagatccaagatagctctggagttagaaaggatgacgatttggcagactcattccttcattctttgtcgtggatcgagtggattaaaaattatgaaaatattgctagtcttttgaattccacagcactctccaaagatcagtgcaaaaaagtcttcgactattgtgaaaataaaatacaaagcttaaaatacttacaaaatacctataattctaactaa

SEQ ID NO: 1586 - DNA, 4443 bp, Saccharomyces pastorianus
atgcctgaaaataattcgcataacttcgatgatcatgagtcccacagtgaaaacagtgattatatgatggacactcaagtagaggatggccatgtacagggcgaatactcttattatcctgatgatgatgaagatgaacatatgctctccagcgtaggaagctttgaggctgacgaggatgaggatggtgataatgattaccacaacgaagaagattccgagcttttatacggatataatagacgtcataacagtgggaacgcagacggaaacggtgaagaagaagaactggatcatcctcacgacaataatgaatttggcggtaacccctttcgcttacctgatattttggaaacttttgcacaaagactagaagaaaggagacaagcaggcagaggacaagtccagcatgcagctgggaggacacttcctgagatcttgtcaatgattggaggaaggatggaaagaagtacggagagttcagcaaggaatgaacggatttccaaattgatagagaatactggaaatgcgcctgacgacccgtatattgcaatggaaagtttaagagaactttccgagaacatattaatgatgaatcaaatggttgtcgatagagtcataccgatggaaacgttgatagggaacattactaccatcctctctgataaaatcttgaaggaagaactagaactacaaatgcaagcctgtagatgcatgtataacctttttgaagtttgcccagaatccatctcaatagctgttgatgagcatgtcatacctattctacaggagaaattagtagagattagttatattgaccttgcggaacaagttctagaaactgtggagtatatctctagagtgcatgggagggacattttaaaaacgggtcaattatcgatttacgttcagttttttgattttttaactatacatgcacaaagaaaagctgttgcaattgtttcaaacgcctgtagcagtgttcgaatggatgattttaacgcagtcgtagaagtgctcccaacattaaaacccatctttactaatacaactgatcagccaatcgtaactaggcttgtaaatgctttgtatggcatttgtggggcgttgtacaggaacgaaaagttcgaatcattgttttcgctagatctaacagaaagaattgtccagctagttgctattcaggacactccgttggagaacaaactaaaatgcctggatattcttaccgtattggcaatgagcagtaaagttctgtcaagagaactgagagagaagaccgatattatcgatatgactacccggtcgttccaacactatagtaaaacttcgaacgctgggctacacgaaacactaatatatgtcccgaacagtttgttggttagtatttctagatttatagtcgtgttgttccctccagaagacgaacggatactatctgcaaataaagaggatactgcaaacaatggacatgatattattgtcagccaggaaaaatttgatgctttagtacagtccttaattccaattctcattgaaatttatacgaacgctgctgattttgacgtaagaagatacgtgcttattgctttgctaagggttgtatcgtgtatgaacagttctacagctaaatcaataaatgatcaacttatcaagttagttgggtctatcttggctcaaaaggaaacaacttttaatgctagcggctctcattcaactgaagctggtacccttttagtcggtggtctctccctgctcgacctcatctgtaaaaaatttgcagagctgttcttgccttctattaaaagggaaggcatttttgatttggtaaaggatttatctgtggatttcaatagcatcgatatgaaagagaacggaaatgaagatatgtcactttctgatgaagaagaggatctgcatagcagtattgaagaagatggagaggctgatgacgactatgattatgagtttggtgatatggagattcctgattcagttaaaccaaaaaaaattactttacacattttcagaaccctgtctttgggttacattaagaagaaaggagtagacctagttaacagggtactttcacaagttaacgttgagcaagaggcaatgacagaggaactgcatcaaattgagagcgtcgtttctattttagaagatccttccactcctgacaaaacggaagaagactggaagaaaatttggacagttttgcgaaagtgtattttccatgaggaatttgacgtatcaggttttgaatttacttcaacagggttagcatcctccatcgcaaaaagaatttcctcttcaaccgtatcccattttattcttgtgaaatcatttttagaagtatttgaggataacgtggatcgatttttagaaattctgcaatcagctcttacaagacttgaaaatttttcaatagttgattgtggtttgcatgacggtgggggcgtatcatcattggcaaaagaaatacgaatcaagttggtttatgacggtgatgcaaccagagataatatcggtactgatttgtcatccactatcgtttcagttcattgcatagcatcgtttacttctcttaatgaatttttgaggcacaggatggtaagaatgcgcttcttgagctcgttaattccgaatattgcttctcctactactgatgctaacagggaagaagaagaggaaaattctttggacgatatgagaaaaaagaactttgatttcttttacgatgacgagaaagttgacatggagtccactgtatttggggtcatattcaataaatttgtaaagcaaaatcaggacttgaagactttatggaacgatacccagtcaattaaatttcgcaaaagtttagaaaatgatgatagcgaacacgaggcagctgaagaggctaaagaggtaaaacggttaagagatttttacaaaaagagagaatttactgaggttgatactggatcttcagcggatatcctcgcattgttggatttcctacatagttccaacatcgaaagtgattgcttcatcaattcaaagctaagtgctaagttggctaggcaattagatgaaccactggtcgttgcaagcggcgccctgccaaattggtcactgtttttaacaagaagatatccatttttgtttccctttgatacgagaatgtttttcttacaatgtacatcttttggttatggaaggttgattcaaatctggaaacacaaaactaaaagctcaaaagactctagaaatgatgaagctttacaacaacttggaagaattactagacgtaagttgcgtatttcaagaaaaaccgtatttgctactggtctcaagatcttatctaaatatggtggcagtccagatgtattagaaattgaataccaagaagaagcaggaacaggtttaggcccaactttggaattctattccttagtttcaaaatattttgcgagaaaatcactaaacatgtggcgttgtaattcctatagctatagaagcgaaatgaacatggatacaactgatgattacattaccactttattgttcccagaacctctcgaccctaccgcgaataacgagaaaattcttgaactctttggatatttggggacgttcgtcgccaggtctttgcttgataataggatccttgacttcagattcagtagagtcttttttgaattactgcacaggatgtgtacacccaatttgacaacggtaccaagtgatgtcgaaagctgtctatcgatgatcgagttggtagatccgttactggctaaatccctaaaatacatagtcgcaaataagaacaacaataatacgctggaagaactgttcttaacattcaccgtacctggtaacgatgacatcgaattgattccagatggtagcaataaattcctgaattcttctaatgttgaagaatatatttgtgcaattattgatcagattttgggtaaaggcatcgaaaggcaattgaaagcattttccgaaggtttctcgaaagttttcctctacgaaagaatgctgatactctttccagaagaattagtggacatgttcggacgggttgaggaagattggtctgtgggaaccttatacacaaatttaaacgccgaacatggctacacaatggactcttcaatcattcatgatttcatatcaataatatccacatttaataagcaagaaaggagattatttttgcagtttttaactgggtctcccaaacttccaatcggaggctttaaaagtttgaatcctaaatttacagttgttctaaaacatgctgaagatggcctgacagcaaatgaatacttaccaagtgtaatgacgtgtgctaactacttgaaactacctaaatattctaacaaagacataatgcggtctcgtctttgccaagccattgaagaaggtgccggagctttcttactctcttga

SEQ ID NO: 1587 - DNA, 711 bp, Saccharomyces pastorianus
atgccaagatcaaaacgttccaagctagttactttagcacaaaccgataagaaaggtagagaaaacaaagaaagaatttttgatgaggtgagggaagcattagacacttacagatacgcttgggtcttgcatctggacgacgtaagaactccagttttgcaagaaattagaacatcttgggcaggttctaagttgatcatgggtaagagaaaggttttgcaaaaggcattgggtgaaaagagagaagaagaatacaaagagaacttatatcaattgactaaactttgtggtggtgttactggtttattgttcactaatgaagacgtaaatactgtcaaggaatattttgaatcatacgctcgttcagactattcaagaccgaactccaaggctccattaacattcaccattcctgaaggcatcatttactcacgtggtggtcaaatcccagttgaagaagatgtcccaatgatccattctttggagccaactatgagaaacaaattcgaaattccaactaaaatcaaagccggtaagattaccattgacagcccatatctggtttgtacaaaagacgaaaaattggatgttcgtcaagctttaatattgaagcaattcggtatcgctgcttctgaattcaaagtcaaagtttctgcttactatgacaatgattcttctactgttgaaaacactaacatcaacatggaataa

SEQ ID NO: 1588 - DNA, 1257 bp, Saccharomyces pastorianus
atgtcgactttaatgcaaaaatcctcgaacaataacctgaaagtaaggtccagaccaagacgtaagtcttccatagggaagatcgatctgggggacaccgtgcctagtttgggtacgatgttcgagaccaaggaatcgaaaaccgctgcaaaaaaacgtatgcaaaggctgtccgaagtcagcaaaaatgatagcgacctggtcaagaagatctggttttcatttagagaaataagttatcgtcatgcctggatagctcccttgctgattttaattgcggtgtacagcgcctatttcacctccggcaatactacaaagacaaacgtacttcataggtttgttgccgtatcatatcaagtcggcgacactgacgtatacggcaaaggtgtcaaggatctgtgctttgtattctactacatgatctttttcacattcttacgcgaatttttaatggacgtagttattaagcccttcgcagtcagcctgcatgtcacttccagacatagaatcaagagaatgatggaacaaatttacgccatcttttacaccggcttttccggacccttcggattgtattgcatgtaccattccaatgtatggttcttcgacacaaaggcaatgtacagaacttatccagactttacaaatccctttttattcaaggtcttttatttgggccaagctgcattttgggctcaacaagcttgtatccttgtgttgcaactggaaaaaccaagaaaagaccataatgaattgactttccatcatattgttactttgctattgatttggtcttcttacgtcttccacttcactaaaatggggttgccaatctatattacaatggacctttccgattttcttttgtccttgtccaaaactttaaactatttggattctgtttttgctcctttctctttttgcatttttgtcgtttcatggatttacttgcgtcattacatcaatttaaagatcctgtggtccgttttaacgcaattccgtacagaaggtaattacgtccttaattttgctactcagcagtacaaatgttggatttctttaccaattgtgtttgtattgataggcgctttacaattagtcaatctttattggttgttcttaattttcagagttctatacaggattctttggagaggtgttctaatagatgatagaagtgatagtgagtcagaagaagaaagtgatgaaagtgccactacaccaactgactctaccccaacgaaaaaagttatttaa

SEQ ID NO: 1589 - DNA, 807 bp, Saccharomyces pastorianus
atgtctagtagtaagttcgaagaggttgttaacaagatcataagcgacagccccccaggggagctgagagagatctatgacgatctgatcaagatcactagtgaaagctcgaagaatactatcttggatgccattgaaaactacaacgtgcagaactgcatccccatagatgtcgacgggaactccataatcatatctaaatacaacaaggaaggttcgaagtttttcgaccctgtacactccgtcattttttcagtcgaccatttagggcacagaggtctcgacatcgagccgtacgaatttacgcacccaaagctggacaaagagcaactgaaacggttgcacgatcaattgcgcgagtatcttgctcaaaacttcccaggcgacgtcagttttgccgtttatccagttcccgaggaacccagtaaaatatctatcattatagttagtaccaagtataacccgaataatttttggaatggccattggaaatcgagctatatttacgatttggacactaaggaactgaccggccacatttctactcaagtccattactacgaagatggtgacgttagtttccagtccgggaaggcgattggccagaataacgtagtcgacgttgtcagcacaataagagatgtagagacaagttttgagaatgaactggacttttctttctctgacctgaacgaaaagcagttcaaaactttaagaagaagactacctgtcacaagatcaaaaatcaactggggtaaggccattggtagctatagattaggtaaaaatgccgccgaagggaaataa

SEQ ID NO: 1590 - DNA, 1800 bp, Saccharomyces pastorianus
atgtctgttcgtacttctgcgagatctaacaagggtcagaataaatatatcgaatctctgttacaggaagaaagcgaaacacctaagaagaaacaaactaagaagagaacagatccgactactaaggagaatgagcagactgacgcttcacagagctcaaccaaagataatgagaaaaacggatcagatgaagcagacgaaggttatgttagatgcgtgtgtggggcaagcgatgagaactatgacgcacctgaatactcgcatggagacatggttcagtgtgatggctgcgattcttggcaacacatcaagtgtatgaccggtggtaaggaaaccatcgatgggctaatgaatgaagattccaaatactattgtgaattatgtgacccatcgctgtatgcacatttggagaagtctaaagaggctgaggtttcagaagaggatgattacgatgacgatatttataaacctgtcattgaccataatgacaacgatacagatttctttttagaagaggaaagtcccagaaaacgtaaaagaagtacttctagtagttcaataaaaatgccttcccaaaccagggaggttaagaaaaacaatgggccaaaaaaaaagaagaaaagtgctggtactattacagccaataccgaccaagacaaaacacctgttaagagagacttcgaatctgagaaagaacacaaattaaggttaaacgcaaggaatatgttttctgtcttgttcagtaaattcattatcccagaaacagtagaggcgaagctttatgatcttcctcacgggaaagacataacatcggtttcaaatggttttgcacaaaacttggaggatgaactttataaggcgtgccttaacgttgaatttggcaccttagacaagatatacactgaaaaagtgagatctttgtactccaacttgaaggacaagaagaatttaaaactaaaggcacacgtaatcgagggcaaattgccgttgaataaactagtgagtatgaatgcgtctgaactagcaaatcctgatttacaagagttcaaggagaaaagggagaaagccacttcagaaaattttatcgtagaaataccggacaaacccatatatgtcaagactcacaagggcgatgagctaatcgagaattccaccgagccccaagaggatgtattatactcgatggatagcataaggttacataatggagctgataatagtagtgacaataaagctgaaatggatcagacactagacatactgaaagcacctgctcaagaacacaggagtttggatcccaaccaaaatgcaacagcacagggagagtccttaaagtgcgcgtttctatatccggggttaggatttgaatttacaggttatttgagttatatcggaacttcaaaaaggttgaagagggatatatctaaagaggctatcggtgatgggaacctgtttgtagagggacgcttacctacaacaaccgctgcaccttatctgaaagaagtctcttcttctagagcgattttaatttaccaactgtttgcttctgatgatgaagaaagtcagaaaacttttgccgaagttgtagactccttggaaaccaaaggtcgcattgccggtataaagccaaagagcagatacgagaaagatttttatattattccgtcaaggaatggtgaagttcctgaaattttggacaacattttaggcaatcccaacggtgaaagatctttgtctgtgaaagctgatgaaagaacactgttcgcatttgtagtaataaagcaggaacttattcattaa

SEQ ID NO: 1591 - DNA, 1206 bp, Saccharomyces pastorianus
atggcaaaccccttctcgagatggtttctatcagagagacctccaaactgtcatgtagccgatctagaaacaagcttagacccccaccaaactctgttgaaggtacaaaagttcagaccgactttgagtgactgggtacattacctcttcttggggtccatcatgctcttcgtctttatcgctaatcctgcatcttggattttgaagattctctgttattgcctcttgggtgcgttaatcgtcattccggctacatcgcagtttttcttcaacgcattacctatcctaacatggctggcgctttatttcacttcgtcctatttcccggctgaccgcagacctcctattactgttaaggtgttaccggcagttgaaacaattctatatggtgataatctaagtgatatccttgcaacgtcgacaaattcctttttagatatcttagcatggttgccgtatggtctatttcattttggggccccatttgtcgttgccattattctgtttatattcgggccaccaaccgttttacagggttatgctttcgcatttggttatatgaatctgtttggtgttatcatgcaaaatgttttcccagccgccccaccttggtataaaataatatatggtttgcaatcggctaactatggaatgcacggctcgccaggtgggctagctagaattgataagctattgggaattagcatgtatacaacagcattttctaactcttcagttatttttggtgctttcccttcattgcattccggttgttctactatggaagccttgtttttttgctattgctttccaaaattgaagcctttgtttattacttatgtttgctggttatggtggtcaacaatgtatttaacacatcattattttgtggacctgatggcaggctcagtattgtcgtacgttatatttcagtacacaaagtatacacatttgccgatagtcgatacaagtcttttctgcaggtggtcgtacacttctattgaaaaatatgatgtatctaaaaacgatccattagccgcagattctaacgatatcgagagcgtccctttgtccaacttggaactcgactttgatctcaatatgactgacgaaccgagcgtaagcccttcgatatttgatggatctacttccgtctctcgttcgtcagaaacgtctataacatccctaggtgtgaagagggcttaa

SEQ ID NO: 1592 - DNA, 396 bp, Saccharomyces pastorianus
atgttgtatgaacttatcggactcgttcgtatagccaactcaaatgcgccgaagttagaagcgaaggaattatctaccacgattgggaaattgattattcaaaatagaggtgtcgtaagggatattatacccatgggtataaggtaccttcctaaaataatgaagaaagaccaagaaaaacattttcgagcataccattttttaatgctgtttgattcttcagctgcagtacaatcggaaattttaagaactttgaagaaagaccctcgtgtcataagatcgtctatcgttaaagctagtacagacaaacaacttgatgtggcttcatcgctacatcgctctttagggaagaagtctattttggagcgagtaaacgaagattatcaatccatctga

SEQ ID NO: 1593 - DNA, 609 bp, Saccharomyces pastorianus; identical to SEQ ID NO: 2

SEQ ID NO: 1594 - DNA, 2106 bp, Saccharomyces pastorianus
atggatgaacatttaatttctactattaacaagcttcaggacgctttagcccctttaggaggcggatctcaatctcctatcgatttacctcaaatcactgttgtaggctctcaatcttcaggaaaatcctccgttttggaaaatattgttggtagagatttcttgccaagaggtactggtatcgtcactagaaggcctttggtgttacaattgattaacaggagacccaaaaaggcggatcatgccaaagtcaatcaagccgcaaatgagttgatagacctaaatatcaacgaaaatgaaaagaaaaaagaggatccacatcaaaatgggcaatctgaggacaacacggaagaatggggtgagtttttacatttgcccggtaggaaattctataatttcgatgaaataagacaagaaatcgtcaaagaaactgacaaagttacaggtgctaattcaggtatctcttctgtaccaatcaatttgagaatttattctcctcatgttctaaccttgacattagtcgatttacctgggttgacaaaagttcctgtaggtgatcaacctcctgatattgaaagacaaattaaagacatgcttttgaaatatatatctaaaccaaatgctatcatattgtcagtcaatgccgccaacacagatttggccaacagtgatggtttgaaattggccagggaagtcgacccagaaggaacaagaacgatcggtgtgttgacaaaagttgatttaatggatcaaggtactgatgtcattgatattttagctggaagagtcattcctttgagatacggctatatcccagtcatcaacagaggccaaaaggatatcgaacacaagaaaacgatcagggaagcgctagaaaatgaaaagagattctttgaaaatcattcctcgtacagttctaaagctcattactgcggtacaccatatttggctaaaaaactaaactcgattttgttgcaccatattagacaaactttgcctgaaatcaaagcaaagattgaagccaccttaaagaaatatcaaaatgaacttataaacttgggtccagagactatggattccgctagttctgttgttttgagtatgattactgatttctctaatgaatatgctggtattttagatggtgaggcgaaggaactttccagccaggaactttctggtggtgccagaatttcttatgttttccatgaaactttcaagaatggtgtagactctttggatccgtttgaccagattaaagattctgacattagaaccatcatgtacaacagttcaggctcggcaccatccttgtttgtcggtactgaagcctttgaggttttggtaaaacagcaaatcagaagatttgaagagccatcgctgcgtttagttactttggtgtttgatgaacttgttcgcatgttgaaacagatcatctcacaaccaaaatattcaaggtatcccgctcttagagaagcgatctctaatcaatttgttcaattcttaaaagacgctactctccctacaaatgactttgttgttgatataatcaaggctgaacaaacttacatcaacacagcccatcctgatcttttgaagggttctcaagcaatggttatggtagaagaaaaattgcatcctcgccaagttactgttgatcctaagactggtaaacctttaccggctcaaccgccatccagtaaagctccagctatggaagaaaaatcaggcttttttggcggttttttctccactaaaaataagaagaaactggctgctttagaatcaccacctcctgttttaaaggccacgggccaaatgactgaaagggaaacaatggaaacagaagtgatcaagctgttaatcagcagttatttttctattgttaaaagaactatcgctgacattattccaaaagctttgatgcttaaactaattgtgaaaagtaaaaccgatattcaaaaggttttactcgaaaaactatacggaaagcaagatatcgaagaattaaccaaagaaaacgatatcacaatccaaagaaggaaagaatgtaacaaaatggttgagatattaagaaacgccagccagattgtttcatctgtataa

SEQ ID NO: 1595 - DNA, 1710 bp, Saccharomyces pastorianus
atgagctctcagaaagtttttggtattacgggacccgtatccactgtgggtcccacggcagctgaaaataaattgaatgatagtttaattcaagagttgaaaaaggaagggtctttcgagacagaacaagaaactgcaaatagggtacaggtactgaaaatattacaggaattggcccaaagatttgtttatgaagtatcgaagaaaaaaaatatgtctgatgggatggcaagggatgccggtgggaagatttttacctatggttcctacaggctgggcgtccatggacccggtagtgatatcgatactttagtggttgttccaaagcacgtaactcgggaagatttctttactgtatttgatgggctattaagagaaagaaaagaactggatgaaattgcccctgttcctgatgcatttgtccctattatcaagattaaatttagtggtatttctatcgatttgatttgcgcacgtctggaccagcctcaagtacctttatccctgactctatcagataaaaacttactgcgaaatctagatgagaaggatttgagagctttgaacggtaccagagtaacggacgagatattagaattagttccgaaacctaatgtttttagaattgctttgagagctatcaagctttgggcgcaaagaagagctgtttatgctaatatttttggttttcccggtggtgtggcctgggctatgctagttgctagaatctgtcaactatacccaaacgcttgcagtgcagttatattaaacagatttttcattattttgtcagaatggaattggccacagccggttattttaaggccaattgaggatggtccattacaggtccgtgtatggaatccaaagatttatgctcaagacaggtctcatagaatgcctgttattacaccggcctatccttcgatgtgtgctactcacaatattacagaatctactaaaaaagtgattttgaaagaattcgagaggggagtgcaaatcactaatgacattttttccaataaaaagccttgggctaatttatttgaaaaacatgattttttcttcagatacaagttctacttagagatcacagcgtatacaagaggcaacgatgagcaacatttgaaatggagcggccttgttgaaagtaaggtgaggcttctaattatgaaactagaagtgttggcaggaatcaaaattgcacatcccttcactaagccatttgaaagcagttattgctgtccaacagaagatgactatgaaatgattcaggacaaatacggtagccataaaactgagccagcattaaacgtgctcgaaaaggtcacagatgaaaataaagaggatgagagcatcaaagatgaacctaaggcatatctaaccaccatgtatataggccttgatttcaacattgagaacaaaaaggaaaaagttgatattcacattccatgtacagaattcgtaaacctgtgtcgaagtttcaatgaggattatggcgaccataaagtttttaacctagctctacgctttgttaaaggctatgatttaccggatgaggtttttgatgaagatgaaacaaggccatcaaaaaagagcaaaaggaggaatttagatgccactcgtgagaccgtaaaaagatctaagtctgatgctgcctcatcgagcgataatgtcaacggtgcgaccgccgcagttgacgtaaattaa

SEQ ID NO: 1596 - DNA, 1347 bp, Saccharomyces pastorianus
atgggatccaaaaaactaggcgtagggtctgattcccatcggttgagcagatccagttttacaagtagtaaatcgtcacagtcagcaagaaacagtcagccggttgatacagatgatatagatgaggatgatgaatcaggtcaaagtatcattttgaatattatctcacaattgagaccgggttgtgacttgaccaggattaccttgcccacgtttattcttgaaaagaaatcaatgcttgaacgtgtcacaaatcagctacagtttcctgagtttttattggaggcgcattctgaaaagaattccttggaaagatttctatatgtcatgaaatggtatttggcaggttggcatattgcgccaaaggccgtcaagaaaccgttgaacccagtccttggtgagtattttacagcttactgggatttgcccaacaagcagcaagcgtattacatagctgaacagacaagccaccaccctccagaatgtgcttatttttacatgattcctgaatcatcgatcagagtagatggggtggtaattcctaagtcaaaatttttgggaaattcgagtgctgccatgatggatggatcaacggttttgcaatttctggacattaaggatagaaacggaaaaccagaaaagtatgttcttacgcaaccaaatgtatatgttagaggaattttgtttgggaaaatgagaattgaactcggagaccacatgataatcaaatctcctgattatcaggttgatatagagttcaagacaaaggggtacatctctgggacttacgatgcaattgagggaactgttaaggactacgatggtaattcgtattatgagatatccggcaaatggaatgacgttatgtacataaaggatgcaaagcaatcacgctcttcaaaaaaagtcttcctcgacacacataaggaatctcctttgagaccgaaggtccgtccattgaatgagcaaggcgagtacgaatccaggaaattgtggaaaaaagttacagatgcattggctgttcgtgaccacactgtcgcaactgaagaaaaattccaaattgaagaccaacaaagaaagatagctaaaaagcgcatcgaagatggtgtggaattccatccaaagctatttagaagatcaaaacctggcgaggaccttcattattgtatatataaaaatattcctatcagcgaaaattcagagaaacagatacgaagcatattgcatatagcacctattttaccaggtcaacacttcactgacaaattttctatacctgcttttgaaaaaataaggttacaaaaaaagagaagtgagagcaaaaacgagcacgcagtagaacagtag

SEQ ID NO: 1597 - DNA, 861 bp, Saccharomyces pastorianus
atgaccattggacttttatttacaacacctgaaaacaaaacaatacacaacttgcatgaacagttattaaggggatatttccaagacagtagtatcttaaacataccgcattttctcattaaggaagtaaggctagttcaacggctactttgttcatcaagcaatcgcatcaataagtcgtcatctctttggatattataccgaaagttatatattctgtcccttcaagcaaagacaccaatttctacagatttttgctttatattcaactcttctggatctcagcacttttccaactattactgctggaacactgctagatggttctatgataatttgacgttcgataaaaggacggagctcttttgtttaactcgattattttgctttcagcatgttaaagactgttcatcatggagtactttagcatatatgatatgccagcaaaaacagaaaaaccagtacaatatttgtgattttcaaaggctaagaaactcctttgatgtatttagtacaccaaatacagaagacctaaattttcaactacccgatgctgatacttttatccaagaattagcggaatggattgagaaaacatataccgccgattggcccccatatctgtgtcttttggaaattaccaaactcattggaattgacataaattctatgctttcaatttggaaaagtgaagttcgaaatttcgagaaaaaacacggttctatcaaattggaaaataataatccagttgtgcctaaacagtttacaaatgatttactaatttccaagaattttatacactttggttacaaaaaactcttcctatacgtagctatagaaaaggaacgcccacgtagttag

SEQ ID NO: 1598 - DNA, 825 bp, Saccharomyces pastorianus
atgggcattcgacaggcagaaaggggacgtagcacaggtatgtcgtcactgctgagagtacattgtgttgggccgttcctaaaaggcttgccaccgcttactgctgctgctaagcagacggtcaggcctattcacacttcttctccaaacggggatttcatgtcgtggttcaagaggaagaagcaagaagaacacaaggagcccgttaaggacacgaaacagttgataaaggatatcgaagagggtagggctggagcgtcttccaagaacaagaatagattggaactaatacctgataactttattggtgacggtcccagacggtataaaaggaagaaggagttaaagcatgccatttctgctgccccattcaatcaatggttgactaggggcaaggtcacttccgagaatgaattagacgacgtaatatcgcaggcaatgcaaaaaacgctgggcaacgatgaccagaacgtccagtttccggatttagtggccaagttcgaattcaccaagtttttgcaagcgaaatcaggctatctaatctcagattataaactgactactctaaccactcccctacagttcaaaaagtattttatggagaaaattctaccatcggttaacgatcctgcacttattttcaaagaagctgagcctaatgccatccatccactttccgacaattatgcttcgccaaacgtttatgtcgttaacgatatcactcccaaagagcaaaaaattaaatatgatactattatgagagaagttcagaaactggaagatgatgcaacgaagaaagccttggaaacagcaagatctgcctag

SEQ ID NO: 1599 - DNA, 549 bp, Saccharomyces pastorianus
atggggatcgtcttaagttgttgcagagaccatggaagagaagagaacgaggccctgctgagggaacagcaggcaggttacggcacacaagggaacgccaacgatgaatacgatgccgagcaaattcgattgaaggagcaagagcagaaactgctggctagggagcatgagttgagggacattgttgctaacactaacgacaaactcatagacatatcgatgataaacaacagcggaatcgttattcagggaacagacctgcaagaagcccttgataaaaaagaacaggagcagggtgcaggcccgcgggaagacgatgccagtgcagaggaagacgacgccagtggacaatcagcgtcctcgagccgatctacagacgcagccagtcgccgcgccgctccgaagtcgaatacattcactgtacttacatctccggatttggccaaaatatcaaaggagcagctaaaaaaactccactcgaggataacgagcgagattttcagccagtcgcaagtagacaaaccgggcccattgactgtccccttctaa

SEQ ID NO: 1600 - DNA, 1890 bp, Saccharomyces pastorianus
atggtggttaagaagcggaagctaacaacggaatccggtggtagcgaagaaaggcgcaagtacttaccggggaaacatcctataaaccaagagaaaaccccgcatgtggattataacgcgccaataaaccctaaatctgaactgtttctagatgactggcatatacccaaatttaataggtttatcagctttactttggatgttctccttgacaaatacagggacattttcaaagatttcattaagttaccaagtaggaagtttcatcctcaatattattacaaaattcagcagccaatgtctatcaatgaaatcaaatcaagagactatgagtacgaagacggccccagcaattttcttttggatgtcgagctattgacaaagaattgtcaggcctataatgagtacgatagtttgattgtgaaaaactccatgcaagtagttatgtttattgaatttgaagtattgaaggccaaaaacttaaagagaaactatttgattaatagcgaggtcaaatcaaaattgctccactatttcaataagctggtggacggtactgaaaggaggatcaaccaagctctactaggctcttcttcgtcttctaaaagtttagatgacaagatcaaactaagtgaaccatttatggaattggtcgacaaagacgaactacccgaatattatgaaatagtacataatccaatggctttatcgattgttaagcaaaatctagaaattggtcactactccaaaatatacgacttcgttatcgatatgctattggttttccagaatgctcatatctttaatgatccaagcgctttgatttataatgacgcaacaactttatcgaattattttaaccatttaatgcaaaaagagtttttcccagaattacaagacttaagtgaacgtggtgaaattaatttagaatttgacaagttcgaattcgagaattacctagctattggtggtggtccaaccgcaacgagcgcattggctatatcagctctcgataacgatatcgaaccagagtcaatacgtgaagatctcattgaccaagcagattatgacttcaatcatttcgaaggtctgggtaacggctacaatcgttctttattgacagatgattacctactaaatccaaataatttcaagagatcaatgtctaaaccagttaccattataggagcaatgccatccgaagtcaaaaatgaacaattaatgactcctgaaatcgaaaaaacaaatcctttagaaagtgagcaactaaaaatccccaaatataatatagtgaagtctattcaaagagaaaagcaattactttcggagcagcatactatggaacgtaagccttatagactaatacaacaaatttacatcttctcgtcaaaaaatttgtattcacaagcaacaaaacctttgccaggttcaagaccatcgtgcaatcagaattgggtagagtacattttcaacggtaatgaattgagtcaaaatgaaaacgctttttccttcattctacaacccatgcaaacttttttaaccttgcaatcccatttgagcctatcatcaaaggattcagaaatccaattaacgattaataaggagcctgttagatcaagaaattcaaatgcaaataacagcttaacacaacctcagcaacaagaaaacaatgttactgataatgatacaaagcaaggtattgaaaatttggcaaatattagcagtaataatgaagttgttgacgataataatgacaaaccaaacaacaacataccagaaatttttgatgttcgcttatcagaaggattaaatcacttggtttttaagtgcgaagataaaaattcaaacgaagcagaatctatgagtttttggataaatgttttaccataa

SEQ ID NO: 1601 - DNA, 2703 bp, Saccharomyces pastorianus
atgtctgaaaagttatcctttaaagacagggttgtcgtaattactggtgctggaggaggactaggtaaagtttatgcgctagcttacgcagcaagaggcgctaaagtggttgttaatgatttaggcggcactttgggtggttcaggacacaattcgcgagctgcagatttggtagtggacgaaattaaaaaatctggcggtgttgcagtagcaaattatgattccgttaatgaaaacggagaaggaatcattcaaactgccgttaaagaatttggaagagttgatgtcttgattaacaatgctgggatactaagagatgtgtcttttgcaaagatgacagaaagtgaattcgcatcagtggtggatgtacatctgactggcggctataagctttcaaaggccgcttggcctcatatgcgttctcaaaagttcggcaggattatcaacactgcttccccagcaggactatttgggaattttggtcaagccaattattctgcagctaaattggggctcgttggtttgggcgagaccctcgcgaaagagggggctaaatataacatcaatgttaattcaatcgcaccattggcaagatcaagaatgacagaaaatgtcttaccgccacatatcctaaagcaattgggaccagaaaaaattgtcccattagtactctacttaacgcatgaatccacaaaagtatcaaactctatttttgaacttgctgctggattctacggacagattagatgggaaagatcttcaggacaaattttcaatcctgatcctaaaacgtatacgccggaagctattttgaataaatgggaagaaataactgattttaaggataaaccatttaacaaaactcaacatccgttccaactctcagactataacgaccttattactaaagctaaagaattgcccaaaaatgatcaaggctctgtcaaaatcaattcgcttcgcaataaagttgtaattattaccggcgcaggaggtggtctcggaaggtcacatgctcattggtttgcccgctacggtgcaaaagtgattgtgaatgacattaaaaatccattcacagttgttgaagaaatcaacaaattgtatggcgaaggaacagccattccagattctcatgatgtagttactgaagcttcgctgattattcaaactgcaactaataaatttcagaaagtggatattttagttaataatgctggtattttgcgcgataaatcctttttgaaaatgagagatgaagattggttttccgttttgaaggttcatctattctctacatttgcgttatcaaaggcagtgtggccaatattcaccaaacaaaagtcaggatttattatcaacactacctctacctcgggaatttatggaaattttgggcaagctaactatgctgctgcaaaagccgctatcttaggtttcagtagaacaattgctttggaaggtgccaaaaggggaatcatagtcaacgttattgctccccatgctgaaaccgccatgaccaaaactatcttctcagaaaaggaactatcgaatcatttcaacgcatcccaggtctctccattagttgttttattggcatctgaggaactacagaaaagtttaaaaaaatcaatcaatggtcaattgtttgaggttggcggtggttggtgtggacaaactagatggcaaagaagctctggttacgtctctataaatgaaatcattgaaccggaggaaattaagggaaattggcagcagataaccaattttagcagtaacaccattaatccgagctctacggagaattcctcaatggcaattttacaggctgtacaaaaggcacacacttcaaaggattccagtgacggagtgttcaaatttactagcaaagactgtatcctatataacttaggactcggctgtacgagtaaagagctgaagtacacctatgaaaatgatccaagctttcaggttttgccttcgtttgctgttattccgtttatgcaagctactgctacattatccatggataatttggtcgaaaactttaattatgcaatgttattgcatggggagcaatatttcaagctttgcgccccaaggtttccaactagtggatcattgaaaacagttgctaaacctttacaagttctcgataagaatggtaaagcagctgtagtagtcggtggtttcgaaacttatgacgtcaaaaccaaaaaactgatagcgtataatgaagggacattcttcatcagaggtgcacatgtatccccaaaaaagcaaataacgaatggaaacagagcaaggtttgccattcaaccatttaaagcaccacatggaaaagcaccagattttgaggtagaaatttctacgaataaggatcaagcggcactgtataggttatctggggatttgaatccgttacacattgacccagcattagccaaggcagtaaagtttccggcaccaatcctacatggtctttgtaccttaggtgttagttcaaaggcattatttgaacattatggtccatacgaggagatgaaagtaagatttaccaacgttgttttcccaggtgataccttaaaagtcaaggcttggaaagaaggtgcaatcgttatattccaaactattgatacgaccagaaatgttgttgtcttggataacgctgccattaaactatcacaagcaaaatctaaactataa

SEQ ID NO: 1602 - DNA, 1074 bp, Saccharomyces pastorianus
atgcccaacctagaaaccgtttacctgtacgccggtgaagaacagccacgtgtgaaattgacctgtatcaaggaaggtctcgcgctaccgcaggttatcaagtttgtacattccatccaggaaatgtacggcatagaactgcaaacgtccgagaccataacggaaaacctcaaaatagcctgtgctcctccgtatctgaagccgaactgtatccctcatttctatatcctggagtatgaggaggccgatgatacttttttcatttggaagtcggacggtcgctggcaactgaacaaagtttcggccctattgtatccagacagtgatgtcaatctagtcaagaacacttcatggagggacgtttttcagaatgaccacagatttaagaactacgacaaacaatcctggttgcgacaatgcctggaaaggatgaacgaggacctgtcaaagttgaacgttgaccaattctggtctcaattcgacaagatatgccacaacattgccaaacaacaaaagaacaatgaccggttcaacatggaccttttcaataccttcaagaacgtggtctccatggctatcctaaaaacgaaagtactttcgaataaacggcttttaacagctactttgagggattaccacgactcgctgaaacagaaacacgacgttcgtggccgcaacagcaacagcaacgtaaaggaaagtagttcggaatctttaaatatcaacggcccttccacctcaatggaaagcggctcaagaaacttttctccaataaattctctatccccgtcttccttgagtaccgacgacgacacggcccctacagactacgtatacaaggaccttgcatccaagccaagtatggagttcatgcattcaagtgctaccaacgatctgatcaagtcgaatttcgagagttatttcaagttgatggctgaagattacgaaaccttcgatttgaaagcgtggtcgagacaaagacctcgtaagttccagattgtagaaagaaaaaaaatcgccaaaaccccctccagcaatcgtcgtctgcctaaagacggtaagatatccttctag

SEQ ID NO: 1603 - DNA, 927 bp, Saccharomyces pastorianus
atgaaattctctaaagtctcgctattggctgcatctgcatccgtcgctttatctgtcccagtggctgtgaccgtcactcagcacgtccatgaagctgccaccgtgatggtgcaagggatcgtgtacgtggaaaatggccacactctaacctcgttggttaccgagggtgttcccaccgcaccaggcgctcctgccaccgccactgccactgctcctattgtagttgccaatgctcaggtggacaacgtagctccctccgctacccaggagggcacaccggttgtagaatcttctgtttccacacaaattcaagtctttaccaccgtttccaccattaaatcggtacaagccacccagcaggccgcccaggatgatgtgacttcgtcttcgtcctcgacaccatcaactccatccaccacctctgccactccatccaccacctctgccactccatcctccaccagcactcaatctaccgcctcagccgcccaatcttcttcaggctccgatttcgccacgtcaatggttaacgaacacaacacgaagagagctttgcacaaggacacaggctcgttgacttggtccgacaccttggctacatatgcgcaaaattacgccgactcctacgactgttcaggaaacttggtccattccggcggcgcttatggtgaaaatttggcactaggctatggcacaaccgcttctgtcgatgcttggtacaacgagatttcaagctacgactattccaacccaggtttcactgaagatgctggtcatttcacccaggtcgtctggaaggggacttcccaagtcggttgcggtttgaaatcttgtggtggccaatggggcgattacgtcatttgctcttaccagaaccctggtaattacattggcgaattcgctgaaaacgttatgccattggcttaa

SEQ ID NO: 1604 - DNA, 1656 bp, Saccharomyces pastorianus
atgagtagtggtggcgaagaagatcatttatatacttttgatgaaaatgactccgactctattgaactttacgaatctcaaaacacgtctgagttcaccatacatggactggccactccgaagttaattactgtaataagccaaggatccgagttcgacatcaatgaagatgaagatggggtcgataccatatacgaggggatgcttgacattcctattacgaaaagcagtaaaagagtactttgtgaaggaagcgtaccgaacctcaattatgagtgcttgaccactaagggtattttcgaaaggatactccaaagagtcgaccatttgcaacccatctttgcgatcccgtctgcagatatattgatattactacaacattacgattggaacgaagagcgtttattagaggtatggaccgaaaaaatggacgatttgcttgtagagcttggtttaagcactgcggcaaatgccaaggaagataaagattttagcttacactccagaaaagtggaatttaaagacgatttcgcttgtgttatctgttgtgatagtaaaaacacggaaacttttgcattagaatgtggtcatgaatattgcatcaactgttatcgccattatatccaagataagttgcatgagggaaacattattacatgtatggactgttctctggcgttgaaaaatgttgatatagataaagtgatgggacacgcttctagtagtaaactgatggattcctcaatcaaaagtttcgttcaaaaacataatcgtaattacaaatggtgcccatttgccgattgtaaatctatcatacatttacgagatacttcttcgttaccagaatacacccgtttgcattattcgccctttgtcaaatgtaattcgtctcatagattttgttttaactgtgggtttgaagtacatgccccagcagactgtaaaattaccagcgcttgggttaagaaggccagaaaagaatctgaaaatttgaattgggttttgtctcatactaaagaatgccccaaatgttccgtcaatattgaaaaaaatggtggttgtaaccacatgatttgctcgagctgtaaatacgagttttgttggatttgtgaaggcccatgggccccccatggtaagaatttcttccaatgtacgatgtacaaaaatattgaggatagcaaaagtaagaattctgaagacgtcaacaaaacattgaagaagtacacatttttttatagactatttaatgagcatgaggtttcagccaaattggattggaacttggggcaaacggtgggtacaaaagttcatgcattacaagaaagaataggcatttcgtggatcgatggacagtttttgtcagaaagtttgaaagtactaaatgagggacgaacagcattgaagtggtcgtttgctgtggcattttattcggatgcatctcaaaacttaactaagatctttgttgataatcaaatgcttttggcaaatgcagtagagtttctatcagagttattacaaataaaaaatcctgaagtcattatgaaacgaaaacctgagttctataataaggcgggatacgtggaaaatagaactactgcattgatggaatgtggtagagaactattatgcaaagggatttgcaaagttatggaatga

SEQ ID NO: 1605 - DNA, 2181 bp, Saccharomyces pastorianus
atgttcaaagtatttggttttggtgcaaaggaagaggctccggagctttcccaggaggaaaaaacgaaggctattttaaaacaggctcatgatttcgaacaggcgttacgtgccatggattatgttttggacgataatgctggtgagggtttggcgctgctagatgcaagtgacgctaaggaagcatccgaccaaacaatcaatgcgttggctcgtggagttattgaatttttggaagccactctagggtttgaagctgaggagatgaagaaggcctctgccactttagctaaggctgaaactctgtctctaaaaagtagagagaaggcgcagaaaagtggactgaagagcagttcgttgtatcccccagggacggtttatgcagtgacttatactgagtcctgtcttttgcatgccttattgatgattttcagtgaaagtatgatggaggcagccaaggcaatcctaaagctcaggaaatcatattacatgttgcaggaaatcttggaaactatcaaagccgccaacaagaccaagaagatgaggttattggccggcgatgaagacaaagactccacaccagcaacttttataaccggtggtgatgcgttcaattctgttgatattccttatgaactgacccctgaagaacaaaaggataaagatcttttgcagtttgccgaacaaattcatagcatgagggctgaaagactatcaggcgcccatatcggtaactcgcctgcgattaacaggctaaggggtgaattgggtttacaagcgatggaagatttgcccaaaaaggaaatcactgatcatcaagttctttcaggtgatctcgatttaagccaagccaccatcgacgaatttatccactctggtgtcaacttatgttttggtatcctacaagtcgtcatatcattgttgccacctgcaattggtgcggttctttctgtagttgggttcagaggttcccgagaagagggtctgagacttgtttggagagctacgaagcaaagaaacgttcatggatgtatcggattgttaggtttaatgttttactacgacggtccttttcaattcactgacgacgactttgatattcctgcagcagttaaggattccgacaaagatggtgaagattcggatgctgaagatatggacggccctacattgctgcatcccgggaagatcttagaagacgcgttgctgcaatcaagagcgttattccccaacagtgctctatggttgctgaacgaagcgaggatgttatcaggtaagggccgtttagaggaagcggtcacgttgatggactcgattgatgttagcaagattcgtatgagacaggttaaatctttgatgattttcgatcgtgctatcactttgatccatttgcatcaatacgatagagctgcagatgatatcttgtcgctgttggaaattagtgattggtcacatgccttttacacgtattttgccggttgctgttatttagaaaactggaggatgtgtgaaatgggaataatggagtcagataaaaaggatgaataccaagagaaggctagtgagcttattttcagttcggtcgacttgttgggcaagaagacgtttaaatcaaagaacctgccattagatagatttatactgagaaaagttgagcagttcaaggcaaaaaaggccgacctcggggtggacaatccactggacgccattgctacttcaccagtgcatgaaatcgcatacttctataacggttacaatagaatgtctgaagagcacttaaaattatcaaagaaaatgctaacggagtacaagaaccctgcgattgacgccttggactcagaccaagaactaatcaaggaccttttggtgtcactgacattaagaagactaggtcatatccaagaaggttgcgacttattggatgaaaaggttttgccagaatttttttcagttcaaggtggtagggcgaagtatatcaagaagaccgaagatccatgggcttacccaaccgccctttatgaacgtgctttatttacgtggaagctgaaaggtattgaaggcctttcggaaagcagagaatggttattaagagcccaaggctatgcagatgactatgagttaagcacgcgtataggcatgaagatcaaggctgccattgatcgtgttgaccattcattgtaa

SEQ ID NO: 1606 - DNA, 1842 bp, Saccharomyces pastorianus
atgaggctttcattcaacaaacaacgccatcacggcggaacaacagtagctttgactgaacaaggagcttccgattctctgcatgctgcgcaggctatcttccagaaccactccactgagggaaccaggccatgccctccatttacggtgaacacaaatgctcaaacaaggacgtctggaccatcgctaccgaggcaaagacaacaagaacaaaagaaggcacgcatacgaacgaaacaggtaccgtccatcaaaacaacaacgcccaacggtgttgagctgccaagagcgcacacaccagaaaccataaatagagacaatgccattaacgctgctcaaatggctgcggctttagcacactcacaatcgaaactaaactcagacaataatcacctcaattcttctccggtagacacgataagagtattggggactcctaaatcgagtgttccgctgggtcttcattcacgctcatattcaagaaatgcctctaatgattcattaacgcttggccaaaggactcccgagaatgactctcatgaaaacttgatcagcccacctagttctagcagaaggctatcctcatgttctggggaccctaccattaataaggaaagcgctaagtttgtacttaaatatagaccattaccacctttgcagccatcgttgaccgataacagtcttcagaacgaaaacgaaaatatgtcatcagttagcattgactccaagtatagtctcaatgtggacacttcagacgtcgcttcaaacaggtcgcaaacaagtctgtctcaaacaatcaaccagctctcgctttatgagtcagaaccttccattgcgagctcaagtactactactactaccgctaataaccaaggaggtggattgcaaaatctggtcccaaattactcatctgatatgaggaagaagaaactggtcagcaagttcaaacggaaagtatttggcgctaaacccaaaaattcgtcatcgcaatacgaaatggacgcacacgacgacgagcaccagcaacagcagtcctctatgaaatttagaacaacgctacgcaaaagttctgtgagcacaaatactgaaaatgatcaggtgaaaaaactgggggctggaaacgtgaagtacaagtacaaccctgacagcgacacgtatgatttctacgctgacaccgattctgactcgggatcggatccaaatcaggacactttatcgaagcctcgtaaaagagatagaattaaaaggaagatcaagaagtctgccaataaaacaacacatcataggcccattcatcgcactaggaaacagaaatttaatgaggacaaaccttggaaatcccatacagatataacctttgtcactgacagtgaaagaaagcgctatgaaagcatgtgggtgagcaatagacaccgccatctagatttgttaagctggtggcccgtctctgaggacgatcccactgtaatgaactctctaccggaagacgggttgatcctgaacattatcgtccacgatatttggaagcgctccaatgttcccagtagtttactggcggagatttacgcaaaggtggactcaagaaaggatggtacgctggacagaaaatcattcatcgtggggatgtggctcgtcgatcagtgcctgtacggtagaaaactgcccaacgttgtcgagcaatgtgtttgggacagtgtggatagatatgcatcaaccacggtggtaccagtaagcacactcaaggcaatggccaagcaaaaaaagaaacaaatgaaggaagaaatcaagaacatcaaaaaagaaaatagagtcgttcttgtagaccataatagcacatcgtga

SEQ ID NO: 1607 - DNA, 495 bp, Saccharomyces pastorianus
atggcagaacagatcagccacaagaagtccctgaggattaacaacttaaacaaggatagaaggttactgttgagagagttctacaacttgaaaaatgacccaaacgagggtaaacaagacgcgagcacagagggtgatactagcggacgccactcccgggatgagcacggtacagatgtaaatgaaagtgcagaagaaaatgctgacgagctggtgcagaatgacggtttgggagtagctgttgaggaccgaaacgaggggaaacaacaaataagcgaagagatacagaagctgcccttcaagagtcttgtccagatccacaacaagcttctgggcaaggagacggagactaataactccataaagaacactatttacgaaaactattacgatctgataaaagttaacgatcttctcaaagagattactgacgccaacaaagatcaagtgagcaagctaaaacaaacggtagagacgttgattaaggagctgtga

SEQ ID NO: 1608 - DNA, 1596 bp, Saccharomyces pastorianus
atgacaagacaacaggctattgactatgcgacaaagcagattccgcagatattgcccctagaagaatccgatgttagagcattgtgcgagcaagtgctgagcacgtcatctgataatccagagcagattgcttcaaaatttctagagtttctggggcacgaagatttgtccttcgagtttgtaatgagatttaacgaaatgttggcccagtctaataaaaaagtggtaaagaatacaaaaaacgcacaggtcgaacagactagagaagcaccctctgcatctaatattaagccaaagcagcacattagtcctgactctataaacatacctagagttgaacaaccaaaaaaaaagcaggaggaaaagaaatattcagcgaatcagcctaccatgcagccgtcgagtcaagctgttaaggctcaaccaaagaaggagaaaaaagagcataaaactaagcaaaaattgcaatcgctgcaagaaattgacgacgctataaaaatactagagctccgaggtagcggtttatctgatcaaacttgtcattgccaaggtgcaagacatccagtttttgaaatagcaccaaactgtcttcattgtggtaaagtgatctgtgttaaagagggattgaatagaggtaaatgcggtcactgtggtgaaccactcatatctgaggaagagaaagtacaaatgacgaagattttgaataatgagaaagacgaactgaacgatccttcatcattatccaacgcttcaaatggtgctaatgtcacaaaaaaaaaaagtaaaagttataagataacttccggtatgggtaaaaatttatttgctgaacaagacaaattatttgatttcattgaaaggaaaagggaaagagaaagaaagcgcaatgaagtgttaaaattgcaggaaaagcaagaaaataatagctcaaaagaagaaaaacttggcgagcaggagaatccagcggaggaaaatccagagttgttagctgcacaagaacggttggatagactgttacatttccaggacacttccgcagagagaacaaaaattatagataatgctagtgacttcagtatgaaccaggaggttgggttatggggcagtacaagagaaagagctcttgctctaaaaaagcaacagcgtaatttgagaaaatgggagaaagtggaaaaggaacgtaatggtaagggtgacaaatacgttgtcagcatgaacataggccccaatggcaaagtaaccatgacagaggttcccaaggacacaaaaaacgtggttgcagattcagatgataatttcagtggtctaagcgacgaagaagacatcaacgacctgaaacacatacacgctttgaaggatgaaataagtaccacaaaaaccatggagaattcgcatttgcagtctaaaatgtgggattctgaacgtgataagaagcaattcgataggcctacgtatgtgagcagaaatgcgaatggcgtgcaaagtggaaagaaagaacaatctcatgatgttaaagatcatgatttgaaatcaagagttcaagtcgatcaaaatgtagaagcttctttagaacaaaacattctcgcggtactttga

SEQ ID NO: 1609 - DNA, 2226 bp, Saccharomyces pastorianus
atgagtgacgatgattctatgctgttaaatttttccacgaatgacgatgctgccggaaattcgtacaagcaagctgccaaggtgacaggtggtagatggaaggatagacggagaatgaaaatgaagctagagggcaagacaggttcgagaaagagaagagcggatgttgctggagaccaaataccagggtcagaaagaggcggcgattccggtaaaaaagtgcatagagataatgctgacggtcctgctgagcaggaaggacctaaacgtagaaatgcccacaacacccaaggaaggatactaccagccgattctcagtttgtctcgtccttgtttacgtccaatagagagataacgactgccgtgaacaccaacatacatgacgaaagtgttgccatcaatccatccaacgcgccattgaaaactgacctgtttgcgtccctaggtgtttctgatgtcctggtttctcacctggagcaaaaaatgcgtattcaaaagcctactagtattcagaagctggccatccctcaagtgatagccaatgcggggaagaacgattttttcattcacgctcaaactggttcaggtaagactctatcttacctattacccataatatccactattttgaacatggaaacccgtgtcgatcgttcctccggtgcgtttgctctgattgtggctcctacacgtgaattggcttcgcaaatataccaggtctgttccactttgatttcatgttgccattatttggttccatgcctattgattggtggtgaacgtaaaaagtcggaaaaggctagattgcgtaagggctgtaatttcatcatcggtactccgggtcgtattttagatcatttgcaaaatacaaaggtcatcaaggagcaattgagccaatctttgaggtatattgtactggatgaaggtgataagttgatggaattggggttcgatgaaacaattagcgaaatcatcaagatcgtccatgatattcctatcaactccgacaagttccccaagttaccccataagttggtccacatgctatgtagtgccacactaaccgacggtgttaataagttaagaaacgtggccttgaaggactacaaattgattagtaatggtacgaagaaggacgccgacgctgtaacggtggcacccgaccaacttttacaaaggattactattgttccacccaagttacgtcttgtcacattggctgctaccttaaacaacattaccaaggattttgtcgccactgacccacaatccaaaacattgcgtacaatcgtattcgtgacgtgttcggacagtgtagaatttcattatgatgcattttccgggagtaatggtcatcacaaaaacctaataggtgattctgtaagagtgctcacaaaggggaacaccatatttccttgtttttcaaattctgaggatcccaacatggtgatttataaactgcatggttccttgtctcaacaaataagaagttccactttacaacattttgctcgtgataatgaggtcactaaaggaaagcatttgatcatgttttgtacagatgtggcaagtagaggtttggatcttcctcaagtcgggtctgttattgaattggaccctccgtttgctgttgaggaccatttgcatagagtgggtcgtaccgcgcgtgctggtgagaagggtgaaagtttgttgtttttacttcctggtgaagaagaaaaatacatggactacattcaaccataccatcccatgggttgggaattattgcaattcgataaagaactattgactccggctttcaaagatgtgaatgtcaacagaaatgacaaatatattagaaaagatgataaatcgtctaagaataagaacggagctgataaagagtatgagtgggacactaatgccaccacatggcacttgaatatagaaagacgtgtagtgggggattcaacatttaagaatctagcagttaaagggttcataagtcatgtgagagcttacgctacacatatatcgcaagaaaagaaattcttcaacgttaaatttttgcatctgggtcatttggctaagagttttgggctgcgtgaaagacctaaggctatggggctgcagagtagtaaggatggtgagaccgataagccaactaaggaaaattcaaagaataaaatgttccgcatggctcgtatggcagagaagcaaatagcaagtgagttcaattattaa

SEQ ID NO: 1610 - DNA, 918 bp, Saccharomyces pastorianus
atggcggagtttaatatcacagagacctatctaaggtttcttgcagaagataccgagatgacaatgccgattgctgccattgaagcattggtcacattgctaagaataaaaacgcccgaaacagcggctgaaatgattaataccataaagggctccacggaagaacttattggatccatccccaactcagtgtctttgagagccggttgtgatatcttcatgagatttgtcttgagaaatcttcatttatatggtgattgggagagctgtaaacaacatttgattgagaacggtcaacttttcgtgtccagagccaagaagtcccgtaataagattgcagaaataggggtggatttcatatccgatgatgatattattttggtacatggttattcaagagcagtgttttcattgttgaaccacgcagccaataagttcattagatttagatgtgtggtgacagaatcaagaccaagcatgcaggggaaccagctatactctttgcttgagcaaaagggtatacctgtgaccctgattgtcgatagtgcagttggtgcggtgatcgacaaagtcgataaagtatttgttggtgcagaaggtgtggcggaatccggtggtattataaatctcgtgggtacttactctgtaggtgtactagcacagaatgcaagaaaaccattttacgtggtcaccgaaagtcacaagttcgttcgtatgtttccgttgtcctctgatgacttgcccatggccggcccaccattagacttcacacgtcgtacagacgaatcagaaaatgcattgcgtggacccaccatcgactacaccgctcaagaatacatcactgcattgatcacggatttgggggtcttgaccccaagtgccgtttcagaggaattgatcaagatgtggtatgactga

SEQ ID NO: 1611 - DNA, 2298 bp, Saccharomyces pastorianus
atgagttttctatgggggtctacgaagtccaaaaaaaataaacacagaaaggctgccggatctcattccccaggtgctattccactgcaacgtgtcaagacggctcgtaaaggtgttcctatagactacccaaggactctggagaaaatgcatggtgaaagcttgttattcagaacgtccctcttgagtgaattggtaggcgctgggaagtccggcattgggccaccagacctggttcattgtacagagtgggataaatttcatgacgagaaaatcggtgagttcttccatattaccggaaccgatgtttccagcatatctatgccaattgcatttttgaagttgataaagtggaatgacggcaagaagctgaaatcagcatccctgaaaaatgataacatctctacatattgttcattcaacctctttcagaaattagacatcagattaagatacgaatctgaggacgtttatcaggtgaacgttacgaactgttcaaacggaaacaatgacataccattaagtgatctaatttgggaagaaacgtttgtgagctgttgcataagaagtatgattacaaatctagactgtgaaaggaaaatacctggactggtggaattaccatttgtttttgaaaacagaagtgcgactgactataaaagggtaattgatgtattatgtaggtttttacctagatttttggagtgtggttggaattccacgaaaagcgtatatgcaacaatactgaataactatctaactgaaacgctactgatatttttatcgataactccagcattcattaccgattatgcaatccaagtgttggacaatctgataacgaatgacccgttgaactttaaatattatgctattgtcgttatttccattatggagcaaagcaatgaccgggatatggaaatgattaagaaaatacatgcaatattagacatattgctaccagagctgtatgggctaccttcggacaaacctgacaattctgatataataaattgcatcactgacgtgttaaacatccaggcaagatttcttttgaatagcggtgactatgaactatccctatccgtcgctacaatggccaccaatttatcctcagatagttttgaatcttggtttctgttgtctagatgttatactttttcacaagaatacggtaaggccctgctttcgatcaactcgatgccctgtttgccagaatacgatatcatcaaacaatctttgactacagcattcaacttgactatgaactattataaagctccgttttttcacaccagagaacattgtactatgacatcgcacgagttgaatcatctgatgaatactatgcattatgagaatgaattggaattgaaaacgataatatttgggcgcactataatgcccaacgaatcaaagtacggttgtatcgacgatatctggaaaaagtcttgtcttgagttagggcccatttctgggcctcaaagtgataatttgataaactttgtctctcaacaagaggtagattctataggagatttgacgttactgaaaagaagtaaagaaacaagacaaagaagctggtttaatgagcaagttaaccttttgttgatggaactggttgcgagaatcggttggaatgctgtccttcaattaaggtctgacgtattcgttatggaaagcaagttcaaaatgatagactcttcggatgaactttccacagaacttcgcaaaaagagactgtgccaaagatggtttgatacgatctttctggatatttacgaagatttaagcatcagcacttcatcacaagaaaataaggccacagcgaaatacagtggattagaatgggaattacttggcctgactttgcttcgagtcggtgatttatccgatgcagtggcatgtctacgaaccagtattttggcgaggttcgaccctatcagttgccaccagctcttaagtctctatttatccttggatttcaacgatgtgtatatgaaaagattcgacgttgacattgttttggacctactcgtgaaactgatctccttccgtatacgattttacgataagttccagatatttgctcttcaggtactgaggaaattaaaagggcaattgagccctgagatcatcaaaaataaaataatcaactcacctcatggtcaagagggaatcgcagtgataatagattacatgctcgaatgcctttcagaagatggcaacgaaacagacttagcttctgaacgtccacacgaaaatgcctctttcaccactggagagcttgcaaattag

SEQ ID NO: 1612 - DNA, 2268 bp, Saccharomyces pastorianus
atgtcattacctacttccaaggaacagtcgctcctagatgatgcatccacgttattgctgttttccaagggaaagaagcctgaagaggtttcaacagcggattcaaaagctggaatcgctggatgtgacgatgactacgaaagggaaaaaaaaggagcagtagccatggccgcagcagcgctagctacagctgcatcggtccctttgcctctgaaaacgtctacccagcatatgatgccaaaagcaaccgcagctattaccacagaggaggaggaggaggaggaggaggaggaggagaaggagaaggaggtcgaaaaacgcacccaatggccagtccctgacacgtacatagtcgaccctgatgctgggataattacatgtatatgtgatatgaacgacgatgatggtttcactattcaatgcgaccactgcaataggtggcagcatgctatttgttatggtattaaagatgttgaaatggcacctgatgattacctttgtaactcctgtgatccgagaaaagtagatattgagttggctaggcgaatacagcatagccgattgggtgtgaaaacaacggtctctgcccctagtgacattaacagtaataggaacaacagccgtgacagagccctgagtacgactggcaatgatagtggcgaaactttgtcaacagaccaagagaatagcagccacaaagacaaaaaaaggaaaagaaacccatcaaataatagtttagaatccaagactgaaagtacttcagcaaccccttctgaggtatcagctaatatacaaaagaaaaaagaacattttttaagtgctaaagacgcatacggcgcaatatacttgcctttgaagaagtatgtgtttaagagcgacttaattgaattgtttttgaaaatgcatatggacgatgagtgggtagtacaatactctcataggacattcaaagctatacccattgaagtcagaccatatgctgatattgcgtattcaaggacatatccaggctttacgaaactgggagtttatctaaaaaggaactgttttaaaggcgattttgtccaagaattcctgggagagctggattttcaaaaaaactatttaacagatccacgaaatcattacagaatatggggcactactaagaggagggttatttttcatcctcactggccaatatacatagacgcacgttcatcagggaacctgacgaggtatttaagaagaagttgccagccgaatgttgaattagtaaccataagactacaagagctggatcacacaaatgataataataatagaatgaacgtaaacaagataaagtttgctttacgagcgttgagggacatatcagaggaagaggagttatatatcaagtggcagtgggatttgaaacaccctatatcaaaactaatcaacggctcagcgacaatagaatctttaactgatctggaaaaatatggcttgatagactccatagaaaccattctaagtaacggtgaatgcggctgtggaagtaattccaaagactgctatttactaaaagtgaagagattctcccagagtctctataaatctgttaagcttaggatgaaaataagcaacagatataagctaaatgaaattctcaacaaatatgaaaacaaaaagagacgtgaaccaccgattttgaattggctagaggagaaggcacaaaccgcgattgaaagagctccgatacttttagaaaagtatcatcaacaaaagtttctaaatcgaaatgatggcatcaccattactcaaagtactatggttaatacagacgaagtttgtaatattgcgaagccctttaaaatcaatctactctcacgatactcttcgaatgtcaatacccctgaagaaaatgacactgaggggaagtataatacaatcaagaaaagctcggattatgatgaatctcatatcacgaatatcaaagaattaccaatcccaatacatttacctgtagcaaaggcaccagggcaaattacatgtgagctcaacaacggacaattaaagaatgaacatatattgacaagaagcccttccctatcaagtttcaacaatgacttatcagaggaaaaggaacatcacgttgccaaggaacctatgacagacgcttcaatgagttctaggcacgaactatcaccagagagtataaggcatttggcggatttctcgtcatcacagttacattcaaagaaaaagttaagctttgcagattatagaaaaaagctgctgaaatga

SEQ ID NO: 1613 - DNA, 825 bp, Saccharomyces pastorianus
atgtcatatttgccgacttattctgatgactttccgactggacagcccggtcgtaggcagcggagcaatggtaatgataatgctcaacagcaagaatatagccaacaatcagtgccgatggtaattaagagacttttcaagacgccaaagaatttggacctcgagacagccagttgggaaatgtttcatctgattttacacccaagaaaggcttatagatcgatatattatcaacgacaaacgaaaaatcaatgggcaagagatgatccttctttcttcatctttcagatagttctgatttccataagctccgtcatttggtcgatttataattcagggttcaacaatgagaacggcaatatggggttttttggcattataggtcatttttttaaaagtttgataatgatggtttttttggattttttcatatttgggttcgttatggcaactattttctactttttgttgaacagatcatatttcaaattcaaatcgagtcaaaatactgtggttgagtgggcttattgttttgatgttcattgcaattcatttttgatcatcttactatgcttgtatttcattcagtttttattgttaccgataattaatttgcaaaattggatctctctgctcattgggaattctctgtattgtttcgccattggccattactttattttgactttttatgggtataaccagctccctttcctaaaaaatttgaacttcatacttttaccaacattaggattatcaataatatatctaatcagtttatttggtatcgacctttccaaaaggttgagtttctacaattattga

SEQ ID NO: 1614 - DNA, 615 bp, Saccharomyces pastorianus
atgtcacgtaattccgccgcaggcttggagaatacgcttttccaactaaagtttacctcaaaacaactgcaaaagcaagcaaataaggcgtcgaaggaggagaaacaagaaaccaacaaacttaaacgtgctctcaacgaaaatgaggagatctcccgtatatacgcgtccaatgctataaggaagaaaaacgagcggttacagctactgaaactggcatccagagtggattctgtcgcatcaagagtgcaaaccgccgtcacaatgagacaggtgtccgcatccatggggcaagtttgcaaaggcatggacaaggcgttgcagaatatgaacctacaacaaatcaccatgataatggacaagttcgaacagcagttcgaagacctggatacgagtatcaatgtgtatgaggatatgggcgtcaattcggatgctatgctagtagataatgataaggtggatgaactgatgggcaaagtggctgatgagaacggcatggaattgaaacagagcgcaaagttggataacgttccagagatcaaaccgaacgagatcaacgtcgatgaagaaaaggaagataaactggctcaaaggttaagagcattgagaggttga

SEQ ID NO: 1615 - DNA, 1806 bp, Saccharomyces pastorianus
atgagtaatacgtcttcgtacgagaagaacaatcccgaaaatctcaagcataatggaatcacgatagattccgaatacctgactcaggaaccaataaccattccttcgaatgggtccgttgcttccacggagaagggttcagggtccaaatggaaggactttaaggactctttcaagagagtagagccaatcgaagccgaccccaatctaacagaagctgagagggtcgctttcatcaccgctcaaaccccattgaaacatcaattgaaaaatagacatttgcaaatgattgccatcggtggtgctattggtactggtctgctggttgggtcaggcaaagcattaagaacaggtggtcctgcttcgcttttgatcgggtggggatccacaggtaccatgatttatgctatggtcatggctctgggtgagttggccgtggtctttcccatttccggtgggttcaccacgtacgccaccagatttattgacgaatcttttggttttgctgccaacttcaattatatgttacaatggttggttgtgctgcccttagagatcgtctctgcatccattacagttaactactggggaacagacccaaaatacagagacgggttcgtcgcgctgttttggctagtaattgtgtgtattaatatgttcggtgtcaaaggttatggtgaagcagaattcgtcttttcaatcatcaaggtaattacaattattgggtttatcatcttaggtatcatcttgaactgtggtggtggcccggaaaagggatacattggtggtaagtacttttctgatcctggcgcatttgccggtgacactcccggtgctaaattcaagggtgtttgttccgtttttgttacttccgccttctcctttgctggttctgaactggttggtcttgctgctagtgagtctgtggatccaagaaaatctgttcccaaggctgccaagcaagtgttctggagaattactttgttttacatcttatcgctactgatgattggtcttttggtcccatacaacgatccgcgtttgattggtgcctcctccgtggatgccgctgcttctccctttgtcattgccattgtgacacacggtattaaagggttaccaagtgttgttaacgtggtcattttaattgcagtcttgtctgtcggtaactctgccattttcgcatgttccagaacatttgttgccctagctgaacaaggtttcctaccacaagtgtttgcctacgtggatcgtaaaggtagaccattggtcgggatcattatcacttccatagggggtcttatcgcatttgtggccgcttccaaaaaggaaggcgaagtatttgattggttactggccttgtctgggttatcatcacttttcacatggggtggtatttgtatttgtcatattcgtttcagaaaggcattaactgcccaaggtagaagtgttgaagagctatcattcaaatcccctaccggtgtttggggctcatactgggggctgtttatgatcattatcatgttcattgcccaattttacgtcgccttgttcccagtgggcggttctccaagtgccgaagggtttttcgaggcttatttgtcattcccacttgttttcgctatgtacatcggtcacaagctttacaagagaaactggaagttactcatcccagccgaagaaatggatatcgacagtggtagaagaaaagtggatttggaattgctgaaacaagaaattgcagaagaaaaggcaattttggccacaaagccagcatggttcaggttctggagtttctggtgttga

SEQ ID NO: 1616 - DNA, 816 bp, Saccharomyces pastorianus
atgcctactctaactcccagatgtattattgtgagacacggtcaaaccgaatggtccaagtcgggccagtacaccgggttgaccgatttgccattaacagcctacggtgagggccagatgttgagaactggtgagagcgttttccgcaacaaccagtttctgaacccggaccacatcacttacatcttcacctccccccgtttacgtgccaggcaaaccgtggacttggtgttgaaacctttgagcgacgagcaaagagcaaagatccgcgtggtggtggacgaggacttgagagagtgggagtacggtgactacgagggaatgctaacccgcgagatcatcgagttgagaaagtcgtgtggattggatcaaagcagaccgtggaacatctggagagacggttgtgagaacggtgagaccacccagcagatcgggttgaggctatcccgtgccatcggcagaatccagaacttgcatcgtaagcaccagagtgagggcagagcatctgatatcatggtctttgctcatggccacgcgttgcgttattttgctgctatctggtttgggttgggtgtgcagaagaaatgtgaaaccgtggaagaaatccaagctgtaaagtcgtacgatgacgagacagtcccatacgttaagctggactcttacagacacttggtcgacaatccgtgcttcttgctggatgccggtgggatcggtgtgttgtcgtacgcgcatcacaacattgacgagcctgcattggaactagcgggcccatttgtctcacctcctgaggaagaatcccagcatggagaggtatga

SEQ ID NO: 1617 - DNA, 1323 bp, Saccharomyces pastorianus
atggcaagagatgtaaggcctgggaagcttaccatatcgctattgattttatcactgtttttgatattccagatactgaccaaaccccaccgcaatgagagcagcatggaaactcgacttttcacgagaaggaggtcgcgtgtaacacgggtgcctaataatgacgccagtttatctataccgtatttggataaagtcaaccggttttggcatgtaggcggtgccacacagattagaaatagccaatctatcaaattgacgcaggaccgagaccaggacaaacacgggctggtgttgtccaatgggattggcgacaacaccatcaacgactttgaaatcgtttacaaattcaggatttctcatagttcgaatgcaaaactcctgggcgatgggatgagctttgccatcacacctgaaaatgggtttctcacgcaggatttgaagtcttcgtatgcaagaagacaatacatgatgaactcacgcggtgtcattggcgataatacagatttaatggggttcccgaagaacctaccgggtctgtttgttgtcttggacacgtatcgcaaccaaggccaccaccatgaggacgtacccttcatggacgtattcctcaatgtggctccagagagtgactcgtacgatatcaagagtgacggcgaactaagcacctcgttgcgactaaacacaaagggccacattgagctaaaaaagaatatcctgtggaatgaagtaacgaaactgagaataatatacctggaaagcataagcttcctgaagatcgacatccagtatgccaaagagggcaattactggatcgagttgttccaaactaacgaaaacctgtatttgcccaaaaacatactcacaggacaaagatacatcggctgcggtgcattgaatggccaattgatcgagaccgtggaacttctggacgtgtctacaagcgagttccattggaacaacaaggacgagtccatcgaggacacctatgattacgtgaaggaggctgaactgttcttggaacaggaatttggcgaggtcctagacatggaacccgataaattcatgaaatggaagatggtcaaggcgcaaccaaacatcaacgctgctccatcatcgcctggacagcctttggccggccgttctcattcgaggctgttcagcgcgatcctggttgtctggcattacagcgaactcctgctcttgatcatcggcatataccttgtttctgtatacgttagggttttccaaaagagattcaagaagatcaggttcagaaggcaaagaagaaagtcgcattccgtggggctgctgcccatgtag

SEQ ID NO: 1618 - DNA, 852 bp, Saccharomyces pastorianus
atgtccgaatcatctgcaccatcgtctaaatcttctgtggaactgccacaagccacctggtcgcatctgcaaagatacccagcgctatccaagtttatcaagtatgcggaatcgctaccccctgtggagagactgatctctttcaaccttgttgtgttggggtccgtgaaccagtgggtttcggagtcgtccaactcccctcgtctggtcaagcagctggtcgctgctgggaaggacggggtcttcaagctggacgagttggtcaaccttttggtgttcaaagagggtgttgatggcttgctgtacgattggaagtcgcattctggcaccccgggcatctggctggtgtggttcttcgtcgactacatcgccaacatctctaacacgctgttgagggagttccttatcaagcctctgcacttgcaaggctccgctcccgcaaaggagatcggctctaccggagacgacaacaaggtcagcgactcttcgtctctaccccacgtggcagagctctcttctaccaccagaaacgcctcccaggagatccagtccaaggtcaagtccaactacatcgacccaaccagagacctagctaaggagaagtacgacgccatcgtgaagcccaccaccgacaagttgcagtccgtgtacatcgacccaaccaagaccaagctgaacgagacgtaccaacgtttcaccaccgtgtacgaaaacaacctgagcaagtccgaaagcgtccccaaagccatcgtgtccaccggattggacctgggcaatgctactatcgagaagctaaaggccgctagagaagaccaggccaactccaagccagctgttatcccaactaattag

SEQ ID NO: 1619 - DNA, 402 bp, Saccharomyces pastorianus
atgtcgttctggaagacattgcagagacaaccacgcaccatttcgttgtttaccaacgacatcgcgtccaatctcaagtcgcagaagtgcctccagtcgctgaagagcgacgtatcgcaccggttcgacgtcgagatcgccaaccggttccccacgtgggaccaactgcagtacatgaagacgtcgtgcccgcagggcacgacgtcattgcagaggcagatccccaagcttgccgcagtgctcaagtacaagcacacagaccccacgttcgggatggacctggagaagtgtgtccagaagggtctgtggaatccgcaggaggcgctgtgggtcgactgggagaacaagctggtgggcaatgagcccgccgacatcgacaagcacgttctccagcgcaagtaa

SEQ ID NO: 1620 - DNA, 1257 bp, Saccharomyces pastorianus
atggatagtcatctgcttccctggtggtggtattggccatgtgtgtactcgtctatcctagctacactcatatctctccataccatagtgagacatctactaaactaccgtaaaccatacgaacaacggttatcaattcgaatcttacttctagtacccatatttagtttgtcctgcgctagcggtataatcaaaccagacatagctcaattctacgtggaccctattagagagttttatgaagcatttgttatttatacattcttcacctttttgacgttgttgttagggggtgagagaaacattataacggttttgagcttaaaccatgcccccacaagacacccgataccattgataggtcgaatctgcaaaccaatagacttatcagatccatttgactttctattcgtcaagaagggcatactacagtacgtttggtttaaaccgttttattgctttggctcattggtatgtagtgcatgggaactacccaaatttgaaatttttttaaacgtgttctacaatatttcagtgacttggtcactctacagtttagcgttgttttggaagtgcctttatccggagttggctccattcaaaccatgggtgaagtttttatgcgttaaattgataattttcgcctcttactggcaaagcattataatccaggttcttgttgttaccggcaggttgggtactggaaaccaagatcggatatctggctatatatacaaaaatgggcttctgtgcattgaaatggtcccatttgccatcttgcatgcagtagctttcccctggacaaaatacactccaattaacataccttgtggtgctaggatgaaattcctatacgcactaagagattgccttggttgtggtgatctgatatgggatttcaagcaaacattgtttgctggtcctttatattataattataagaattttgatcctgaagccatggatctactaaatggtagacagcagtcagatgcgactatggaaagacaaaaacgtggtttgagatttaccaataatggccgaaacagttattgggttgaatatggaagcatccaaaacgagactgtttcaaaatctatggacgaaccatgggaagatgatattgctggccagagatctttccctgatgatccaaactacccagtcgttcacgattatacgatgggccatcgatatagtagaacaatgaacgatttgagaagagatattgaaagtagatcgtcaatggcttgttaa

SEQ ID NO: 1621 - DNA, 915 bp, Saccharomyces pastorianus
atgaacacttcagaactgtcgattgctgaagaaatagactacgaagctctcccatcacatgcacctttgtactctcagttactggcaggcgcatttgctggcataatggagcattctttgatgttccccatagatgctctaaagactcgagtacaagctgcaggtttgaataagaccgtctcttctgggatgatatctcagatatccaagatatctaccatggaaggatcgatggccctatggaaaggtgttcaatcggtcatgctgggggcaggaccggctcatgctgtatatttcgctacatacgaattctgcaaagctcgcttgattagccctgaagatatgcagacacatcagccaatgaagactgcattaagtggtactgttgctactattgctgctgatgcgctcatgaacccttttgataccgttaagcaaagattacagttggatactaatctaagagtttggggcatcacgaagcaaatatatcagcatgaaggttttgcggcgttttattattcctatccaacaacattggccatgaacatcccatttgctgctttcaactttatgatatatgagtctgctagcaagtacttcaacccacaaaactcgtacaatccattaatccattgtctttgtggtggattgagtggtgccacttgtgccgcattaaccacgcctttggactgtataaagactgttctacaagttagaggtagcgagactgtttctatcggaataatgaaggacgccaatactttcggcagagcttcgagagctatactggaggttcatggctggaaaggtttctggcgcggtttgaaaccaagaatagtggccaatatcccagccactgccatttcttggactgcatatgaatgtgctaagcacttcttaatgagtaactaa

SEQ ID NO: 1622 - DNA, 873 bp, Saccharomyces pastorianus
atgaatattctgttatttaagcgcgagcatggtcatggtggacagtcaagcgacacaacttcgcaagggtccctttctagtaccgcgcttcctgaatctccaggacttttagaagggaagattctccccaaattgcctactccttttgcaagaagtctctccaccattcctagttatgagcaaatgaagcgtactaagaaattgcccgattaccatttaaaaatagtcgttgtgggggacggtgccgttgggaagacgtgccttttaatatcttatgtgcaggggactttcccgacagattatatcccaactatttttgaaaattatgtgacaaacatagagggccctaagggccaggttatagaactagcgctgtgggacactgctggtcaagaggagtatagtagactcagaccgctctcatacacaaacgccgatgtcctaatgatttgttactctgtaggcagcaagacatcattcaggaacgtggaagatctttggtttccggaggtcaagcatttttgtccttctgcgcctatcatgctgattggcctgaagtcagacctatacgaagctgatgacctctcagatttggtggatcctgaggaggccgaatctttggccaggcggctaggggcgtttacccatgtccaatgctcagctcggttgaaagacaacgtcaatgaagttttcgaaactgccatacacacattgctatttgattccctgtattctaaggagccttcatatacaatcaaaaatccgtttaagaaatcttcagccaagtcaagtacagattactctgctagggatactagcatttccatttctaaaacaaaagggataagaaaagttaaatgtattctgatgtaa

SEQ ID NO: 1623 - DNA, 1191 bp, Saccharomyces pastorianus
atgtctgaaggtattactgaaattgaagaatcccaaattagtctaaccaactatgacaaggttgtctacaagttcgatgatatggaattggacgaaaacttgttgagaggtgttttcggttacggtttcgaagaaccatctgccattcaacaacgtgctattatgcctattattgaaggtcacgatgttttggctcaagctcaatctggtactggtaagaccggtactttctccgtcgctgctttgcaaagaatcgacacctctgttaaggctcctcaagctttgatgttggctccaaccagagaattggctttacaaatccaaaaagttgtcatggctttggctttccacatggacatcaaggtccatgcttgtatcggtggtacttcttttgttgaagatgctgaaggtttgaaagatgctcaaatcgttgttggtaccccaggtcgtgttttcgacaacatgcaaagacgtagattcagaactgacaagatcaagatgttcatcttagatgaagccgatgaaatgttgtcttctggtttcaaggaacaaatctaccaaattttcacattgctaccaccaactactcaagttgttcttttgtccgctaccatgccaaatgatgtcttggaagttaccaccaagttcatgagaaacccagttagaattttggttaagaaggatgaattgactttggaaggtatcaagcaattctacgttaacgttgaagaagaagacttcaagtatgaatgtttgaccgatttgtacgattctatctccgttactcaagccgttatcttctgtaacaccagaagaaaggtcgaagaattgaccaccaagttgagagacgacaaattcactgtttccgccatctactctgatttgccccaacaagaaagagacaccattatgaaggaattcagaagtggttcttccagaatcttgatctccactgatttattggccagaggtatcgatgtccaacaagtttctttggttatcaactacgatttgccatccaacaaggaaaactatattcacagaatcggtagaggtggtcgtttcggtagaaagggtgttgccatcaactttgttaccaacgaagacgttggtgctatgagagaaatcgaaaagttctactccactcaaatcgaagaattgccatctgacattgctactttattgaactaa

SEQ ID NO: 1624 - DNA, 825 bp, Saccharomyces pastorianus
atggttgatcaagtagatgtcataaaaagcgaactagcggaaaaagccctaaatgctttaattttacagtgtggagaaaacgcatctttacaaaatgataaaagcattcaaataatcatcaatatggggaagaaaatgggtataaaaaaggacaacattccccggattataccattgaccaaatgcaagttgttcaaaccaagagatttaaacatactgctaattaccaaagatccatccaccctgtatagagaaactttgactaaagacgagcatacatcggaattattcaaggagattataagtgtcaagaacttgagacgtagattcaaaggtagcaaattgacccaattgtataaagactttgatttgattgttgctgattatagagtccaccatttacttcctgatgtgctcggcaacagattttatcatggtagcaagaaattaccatatatgattcgaatgtccaaagaagtaaagttgaaacgccagcaaatggccgagaaatgcgacccaatttatgtgagagcgcaactgagaagtatatgtaagaacacttcatatatccccaatgatgacaattgtttaagtgtcagagtcgggcacatccaaaagcatactctaccagagattttacaaaacattcaggacgtggtgaatttcctgactgacaggagtaagagaccgcaaggcggcgtcatcaaaggcggaataatatccatatttgtcaagactagcaacagtaccagtttacctatataccgattctcagagacaaagaaaattcacgacagtgaggatctgagtgatataagattatag

SEQ ID NO: 1625 - DNA, 1278 bp, Saccharomyces pastorianus
atgcaaatttacaaggtatttctcacacagtctaataaactatttttggggtgtcttctactctgctttgtagctcagacatgttggcttgtgcttgtgtatcatcaacgtcagctagggttggattcatattttcgagaaagatcacgagaagcctcttcgagatatgactcttcgagaaaaaggtcattgaatcggatgttaaagctatccagcaacacgtatagtgataggttactggacgagcctgtggtaaagacgtcacagagagaaaatgccacattacttatgcttgtacgtaattgggaattaccgggagcactgcattctatgagatcgctggaagaccgcttcaataaagacttccactacgactggacttttcttaacgatgttccatttgatccagagtttattgaggccaccactgccatggcaagtggtaagacacagtacgcattgattccagcggaggactggaatcggccttcttggattaacgagactttgtttgaagaggctttacaattaatggaggagaagaatatcttgtatggtgggtccaagtcatatagaaacatgtgccgattcaactccggctttttctttagacagaaaatactgaaccagtacgattattatttcagagtggagccagatgtagactatttttgtgatttcccttacgatccatttaaggtgatgaggctgaataataagaaatatggctttgctattactatgtatgaatacgaagatacaattccgagtttatgggacgctgtcgaagagtatttagaggacacggagtatcgagacgtagacattgaaagtaatgcctttggttttgtctccaatttcgattttttcggcaaatcatttgctgtaatggacagtagtagcgattacaatctatgccatttttggactaactttgagatcggtgatttgaactttttcagaagtgagagatatatcaaatttttcgagcatttagattctaaaggtggcttttactacgaaagatggggggacgcaccagtgcattcgattgccgtgtcactcttattaaagaaagatgagattattcattttgatgaattgggatacaaacatatgccttttggtacatgcccgtctgcatactacatgaaactccaagaaagatgcctctgtgatagcaatcatcctgacaacatcgacctcaacgtcattagctgtttgagaagatggtggaaggatggaagtggtaaatacttcctcaagcatgattcatag

SEQ ID NO: 1626 - DNA, 1002 bp, Saccharomyces pastorianus
atgagtaaaaacagggaccctctattagccaacttgaatgcgtttaaaaacaaagtcaagtcagccccagtgatagcacccgctaaagtagggcaaaaaaagaccaatgacactgtcactactatagatgggacaactaggaagagaacagcttttgagcgtgcacaagagagcgctttgctttctgccaagaatccagcgttggcggaaatcaagaaggaagccggaagtaatagttccaacgccatttcgttggacgatgacgatgacgatgaagacgacaacgacgaagattttggtggttctccatcaaagaaagtaaggccaggttccattgcagcagctgctttacaggccaatcaaacggatatatccaagagtcacgattcatccaagttattatgggcaactgaatatattcaaaagaaaggtaagcctgtgttggtcaatgagttattggattacttatcgatgaagaaagacgataaagttattgaacttctgaaaaagctagataggatcgagtttgatcctaaaaagggatctttcaagtatctttccacctatgatgttcattccccatcagaattactcaagttgttacgttcacaagtgacttttaaaggtatatcgtgcaaggatttaaaggacggctggccacaatgcgatgaagtcatcaattcgttggaggaagacagtaagatcttggtattaagaaccaagaaagataagactccaagatatgtttggtacaatagcggcggtaacttgaaatgtatcgacgaagagtttgttaaaatgtgggagaatgtccagctgccacaatttgcagaattaccgagaaagctgcaagatttaggtctaaagcctgctagtgttgatccggcaactattaaaagacaaacaaagagggttgaagtcaaaaagaagaggcaaagaaagggtaagatcactaatactcatatgactggtatcttgaaagattattcccatagagtatga

SEQ ID NO: 1627 - DNA, 1506 bp, Saccharomyces pastorianus
atgataccgccacgcatagtcccatggagaaatcttgctgagttagaggaactaaaaggttggttttacccaaggaccaaagatatcatcgaagataaaagacatcgtgctgtgcaaagggtgcagagctaccagctcaaaggctcacaatatttgcctcatgtagtggactctacggcacaaataacatgtgctgtgttgctggatgaaaaagaaaccggttcggaaccgcatcgagactctgttcctatacgattgtcatacgtgatggctttgatccggttcgtcaatggtttgttggatccaactcagcaatctcagttcgccattcctttgcatacgctagctgctaagattggactgccgtcttggtttgttgacttgaggcactggggtacgcatgaaagagatttacctggcttagaaatgctccgttgggccgccaatgaagctttgtcttggctgtatgaccactattggaatgatcaagaattagaagatgatagagaggatttggatgatgacgaaaatggttatggatacgggaggaacaataaagagcagaaatataaggatagtttggctaaaacacttgacaagtggagacgactcaaaaacgagtttctagagcacagatgggtgtgggaaaatgcaaaggatagtctaattactagcagtaacttctctggagacaatttggttaattacgatgcccaaagagggaaaggtacacatgatagttcatctgaaattatgataagagaaaacttacgtcaatggcaagaactttggaaaatgtccatttaccatgaggaagtaattggggaatgtttcagcaattatgacccaattttgtttaaagtattagtactgaatttgaatgattttgactggaagttaatcgaatgggttgccaagaattacaaaacccaacaagatgacactaatacagttacagtgttgaaaaagaagttcgacgtttggaaagatttacaaacaagactattggacgtcataataggcaatcttaataacaagaatatcaagaataaatggcaaaactgggagaaagtcattgatgaaaatgcgtcatatttaatactgtatctttgccggtccatgctaactaaattagaagctgagaaggtctgtggaaattcctggagaagcaaaaaacgcaaaagacaatttgacagcacggtggaggtcgagacaaaactaaaagagtacatagacagcttatcgtcaaggtttaacgaaggcgaaataaaagtttacgatctcatccccagggaaaaaggagcccacatattgaagaaggagtctagtcccgctttgaagactgttaccaataatattttaggcgatttggcatctttaaagcagagactgtccaatggggaagcggttaataaaagacagaaacacgagggtgagacggctacatcgatgaagaattggtcaatgatacaaagttgggaacccaaaccctttggtgtcctgtag

SEQ ID NO: 1628 - DNA, 2595 bp, Saccharomyces pastorianus
atggactacgaatcgcaaataagaacaaagaagcggcatagaatcactttggtatgtaccaattgcaaaaaaaggaaaagtaaatgcgatcgaacaaaaccttgtgggacatgtatacggctgggagacacggaaagttgtgtttatttgaccgaaagcttaggaaatctggagagcagtaccgctttggatggggttgagcaagtaaggaaccagacaagctttgcagaaggatccaatctaggattgattaagaaaaaaaggctctcgctgtccaggcaagataatgattattggcaaagaatacgggaggaaacactgacacctggatactatgtgccgatgaatgaagaaacgccattatttattgacttgatccccaatggattctatttagaaactaagagatctgctggcaatctgtttgctctgtttacggatagagcaattgagaaccgtgatccatatttgaaagcaatggtgacttttaggagtattgcgatcaagaaaatgatgcaaaaattaggaaaaaatggtaataatgtgaaaaatggaagattacctcgatcttttgaggctttatccacatttgatgccgatgatgaacttcacaatagaagtgatattgttgaccaggacaataattttcgaacgcatcaaacaatacacaagtcgttgtttaacaaatttgcccagtacagagaaaataatgctacaaaatttaatgaagattctgaaaatatatcagctaaagattatttaccttctttaaaggtactggaagatgaaattctaacttattttgaacgaaaaatctataatatgatcccgattttcgatatgaatattttacgccatgaaattacagtcttttatcaaaatgtagtggacaaagggaatccaatatctgtaaaacattacgaccatatgatattttgcataattctactaattatcaagatatgccagctttctgttaaattttgtaaactgacgccatatatatatccggttcttttcgatatcgatacatctaagtttttggctctagtaaatcactacttatttgagatgaaaatcttaagaaaatgtaacttattacagctgcagtgtctcatattattaaggtttctacattggtgtgcacctgaggatggtgatggtcctgaaacccaatattgccaaatactaatggggaccataatatcttcatgtaaagaaatgggcattaactggtactgcttttcccaaccagaaaagtatttctttaaaataaaccgacagacaagaccttcatattcggtgatgaaaactaatgactatgtttcaatctttagaaaaatatggagttacgttttattttgggatagaaaaatgtgttttattagtggtgaagaatgtcaggttgggaaatccttacagtgtcattttgaagaagaagcgaatatcacaacatggtacattcgaatgttaccgcttgataccgtaatgaaaaaaattaacgatacgctgaatgatgatccgggaaaagtggatttaaattcaatacgtcgatctctaaatgatttgaaaaggaagtttcatattttgaaaagtatacccaatgatgaaaaagaagcgacaggtcatctgaactttgaattagaatggattatcgatttattctcatttaatttattacacggagaaatgatatctcatgaatacgattgtaatgttgtagaattttacagaagttttcaagatttatgggacatgaccgttcatttgtcagagaaatgctacaattattttttcgatagcgagtcgttagaagtggactcattggctaagttttacaccaatagaattgtggaaatcgttgcgaataagatcttggttatgattcctgcctttatcctcagagcagaccgattcaaggcaatacaacataatgacaagaaaaaaatgattgagtttctttacggaatctcgtccgtatactttaacgaatttggctttgaatactatcgctgttttaaaaagatgttcacagccaaaataagttacaagatcttgaatcgatcgtgtgaaaaagatgtatggagaatcattttgcaatttttactcaatgaattggtactggaagagcgtagcgataactcgaaggattccggggacatgagactaaaagatgtttgtccagtcatgtcgcaatttcagaagatggtacggaagtacaacgggtatggatcggatatcttaagtatatggaataatgagtttcaccccataggcagatacgacgataatatgaccactttcaagtttcatcttcgagcaaagaatatggagagttttttaaagatggagaaatattctgacaagttcaatattttctcatccttttacgaccatgccagttcacaattagccaaacatatagaagcaaatacaaactcgaacacaacaaacggaccgcacaccaaaacattgcacgaagaaacgttgtcaggccctgtcatgaccgctatacccgtcaatgatcttgttatttctgagtttgacatgattcaagacatttttgatccgttggactttgtgtcgtttttttga

SEQ ID NO: 1629 - DNA, 588 bp, Saccharomyces pastorianus
atgtttatcagctccattagattgtcctcacaaagactcttggtcaagaaaccgtttactgccgtcacgttgcgcgccgcaacggcactacccttaagatcatattctcaacctgcatcccttcaaaactccactggcttgacatggtctgacttcttcaagttgaggaaacaacaacggagaatcaacgtgggctcttcgctctttaccgggcttttggggtgtaatatttcgtgggcttacctctccacgatggaaatagatccaactcaactggtatttgggtttgacccattgaccgtcatctctgcggggataatggccgccggtgccctaggctacctgttgggccctatagttggttcgcaaatcttcaaactttctcatcagaagcaattggaatacttcaatgacaaaaataaagactttttgaaacacatcatcaataatagggtcgatgcatcgtctcaaagtttcagtaaccctgttccagactactacggcgagaagattggctctctaaaggaatacaaacaatggttaagggattgccatgcttacgccaagaaatccaaggaattcttgtag

SEQ ID NO: 1630 - DNA, 1086 bp, Saccharomyces pastorianus
atggctactgctgttaagttcatgcccacgctgggcagaaccatccacaggaggtcgctctatctcttctccgctgctgctgctgctgctgccacggctaccttcgcttactcacagtcccgtaagagatcatcgtctcatgggagcaacggcaatggtagcggcaactggggccgctccactgctgctgcgatggcctccgctgctccgctggtccatgtggccacgccagagaaagacaggtcgtacgaggacttccagaaggtctacaacgccattgcgctcaagttgagggacgatgacgagtacgataactatattggctacggtcccgtgctagtgcgtctcgcctggcacacgtccgggacttgggacaagcacgacaacacaggtggctcgttcggcgggacgtaccggttcaagaaggagtttaacgacccgtccaatgccggcctgcagaacggcttcaacttcctggagcccatccataaggagttcccatggatctcgtcaggtgacttgttcagtctgggcggtgtcaccgcggtgcaggagctgcagggccccaaggtcccctggaggtgcggcagggtcgacagcccagagaataccactccggataacggcagactgcccgatgctgaccagggcgctgactacgtcaggacgttcttccagagattgaacctcaatgatagagaggtcgtggccctcatgggggcgcacgctctgggaaagactcacctgaagaactccgggtacgaaggaccctggggggcggctaacaacgttttcaccaacgagttctacttaaacttgctgaacgaggactggaagctggaaaagaatgaggcgaacaacaaacaatgggactccaagagtggatacatgatgctgcccaccgattacgcgctggtccaggacccaaagtaccggaagatcgtgaaggagtatgctgatgaccaggacaagttcttcaaggacttctctaaggttttcgagaagctgctggaaaacggtattgatttccccaaggacgcacctgggccctttgtcttcaaaactctagacgaacaaggattatag

SEQ ID NO: 1631 - DNA, 582 bp, Saccharomyces pastorianus
atggcgtctaccacacaatcgaggtccttgaaggccacgggagaagagatctggaaaaacaagacagagaagataaatacagaactctttacactaacatatggctccatagtggcgcaattgtgtcaagattatgagcgggactttaacaaagtgaacgaacatctatacagcatggggtataacattgggtgcaggctcattgaggattttttagctaggacagcgttgccacgttgcgaaactctaataaagacgagtgaggtgctaagtaaatgtgcgttcaagatttttctaaacatcacgcccagtataacgaattggtcgcacaataaggactcattttcgttgatcttggacgagaatcccttggcagactttgtggagttgcccatggacgcgatgaagtcactctggtattccaatatcttgtgcggtgttctgaaagggtcgctggaaatggtgcagttggattgtgacgtttggtttgtatcggatatcctaaggggcgactcacagactgagatcagagttaaattgaacaaaatattgaaggatgaaataccaatcggcgaagattga

SEQ ID NO: 1632 - DNA, 1059 bp, Saccharomyces pastorianus
atgataagcaaacggttctttcaaaccagtgctaaaaaaattgcctttgcttttgatatagatggcgttttacttaggggcaagaaatctattccgggcgctagtgacacattgaaactactgaaccagaacaagatcccatatatactattaacaaatggtggtgggcattctgaaaaagcacgtacagagtttatctcaaaccaactggacgttgatatatcacctttgcaaattatccaaagtcatactccatacaagacccttgttaataaatactcaaggattttagctgttggtacaccttccgtaagaaaggtcgcagaaggctatgggttccaagatactgttcatcagactgatattgtcagatataatagggacatagcgccgtttagcggactttctgacgaacaattgctggagtattcacgagagattccggatttgactactaagaaattcgatgccgtgttagtgtttaatgaccctcatgattgggcagctgatctacagattattttagacgcaatcaacagtaaaaatgggatgttgaatactttgagaagtgagaaaagtggcaaaccttccatccctatctacttctcaaatcaggatttactatgggccaatccttataaattgaatagatttggtcaaggtgccttccgtttgttggttagaaaactatactccgagttaaacggtgaacccttgcaagatttcactttgggtaaacctacaaaactgacttatgattttgcgcatcatgtccttattgactgggaaaagagactgagtggaacgatagctcaatctattgaacagaaattaccactattaggcaccaagccttcagtttctccatttcactcagtgttcatggtcggtgataaccctgcaagtgatattattggtgctcaaaattacggctggaacagttgtttggtgaagacaggtgtttacaaggagggcgatgatttaaaggaatgtaaacctacaatgattgtagacaacgtattcgatgcagtgaccagaacactggaaaagtacgcatga

SEQ ID NO: 1633 - DNA, 1032 bp, Saccharomyces pastorianus
atgtcggaattcaaaacaggcctacttctaatacatccagccgtcaccacagcaccggagctggtggagaatatcaagactcaaactgcgtccaaaggaatcaaatttgaagaccagtttttaattaataaactaaatgatggatctgtaaagttggagaataacaaatatgaaactattcaatatttgacgtccgaagctcccaacggcatcattttccccaagaaactcatctctgttctagctgactcattgaaattaaatggctcactgatgggcttaagtgacgcttataaagtggatgcactaattaatggctttgaaatagttaccaagccagattaccgttgggttaagaaggacgtttccaatctgaaccaaacagtctccataccgttgaaggatagaaagcaagctggtaataccaaattgccaactttcaagaaagctgaatcttcaagtcataagttaccttcattcaaaaaggcaggggataccaagctacccgcattcaagaaagcagacgacgctaaagtgccctttttcaaaatagctgatgaaccaaaagtctttaaggtcgaagatgacctaattgaggatagcgatggcgatgaaatatctagtgactcttctaaagctcaatattttgaccaagttgatatcgataatgactccatcgaagaagaagacttaattgatgaggatgactctagcaaacccatgattaccatgattacatgcggcaaatccaagactaaaaagaagaaagcttgtaaggattgtacttgcggtatgaaggaacaagaagaacaagaaataaatgacataagatctcaacaggataaagttgtcaagttcactgaagatgagttgactgagatcgatttcactatcgatgggaagaaggttggtggctgtggctcttgctctctaggcgacgcctttagatgcagcgggtgtccttatttaggtctgcctgctttcaagcctggccaacctatcaacttggacagcatctccgatgatttgtaa

SEQ ID NO: 1634 - DNA, 468 bp, Saccharomyces pastorianus
atggaaccgaataagcgtttgaaaatgacaacaacctataaagactacgacatggaggagccattaacctcaaatgccaggccgctaaagaattctgtgattacaattagaataataaaatcgttcccatatagaaatgttaaaaacatagtgctgcatgattacgatcttgcagagaaaaccgcgagggatctgttcaatgatgttttaaacaaaatccagaatgaaggttcattaagacccttccgtaatgttgcatatgacactctaaaaatatatactcatgcacacggttccaagacggttaatcttgttattaacttcgaccacgacgacgactggattttagacttggaagacgacaagaagaaactattccaatatgggattgagaatgaaaccgagctgtcattgttcaacaaggatgattacctcaggtttaaggaaaatccagaagaaaaatggtga

SEQ ID NO: 1635 - DNA, 921 bp, Saccharomyces pastorianus
atgactagtttagacgatacaataatatcgcaccagaatttaatgttactggataacatgaccaattacaaaaagccagctattgactacttccatcatgagttcagtgatgcgagtttggaaatgccggcctcttggacactactgttgaaaatgcgtaagcacaaattacttcgacttccgagctgttcctccgaagactcgctggattacaatatgtacctcgtcagactacaccactgtctatggaggcgttggtctataaaccattacggtttgcagaactccaagtcagacccgctctctatcaactggaacaaggaaaccgacgtaaccgtgctgtatggtccggatttgactaacataaataacgttgaagacaaaatgtggcctacacagcaaccgagtggacagaagcaaccaaagaatttaaaatccgcattgaaaaaaaatccagaaattatattcgaggaggaaatcaaccagttcaacacaccagacaacaacgatgttctaggacagttcgaagatatctcatgcgcatcatctgtggactctcacacatcatctattttcgatcaacattctacatgtactaaggcctcttcaataaatgaagatgtagaagactttgaaatagaagaaaaagaacgcctccctaggaaattgaagttcaacgaagctgtgatgagaagagacattgattctaaaggcgcaattcacgagtcccttgtcaatataaacgatgtacaacgtcctcgtcatcatcgccgtcaccatcatcgtcaccaccgccaccaccaccaacaaaccccccgcaccgatgaaagaataaagaaaacatattctgaattcgacaactattcattcggcgccatggaagatgatgacattttctataaaaaccaagttgttttctaa

SEQ ID NO: 1636 - DNA, 1104 bp, Saccharomyces pastorianus
atgtcgaaacagtgggcgagtagtaacaacggagctttcaagagacaagtgtcgtcttttagagagacaatctccaagcagcatccgatttataagcctgcaaagggcagatactggctgtatgtctcattggcctgcccatgggcgcacagaacgctgatcacaagagctttgaaggggttgacttctgttataggatgtagtgtggtccactggcatctggacgagaaggggtggaggttccttgacatgggaaagcaattgggagatgagaatgatttcctagagcattggcacgatgccgctggcggaatcaagactgctaaagacgacactagcacgagtttcgccagcatcaagaacgatagtcaaagattcatggtcgacgccaccaatgaacctcactacggttaccaaagaatcagtgatctatattacaagagcgaccctcaatactcggcaagattcaccgttcctgtcctgtgggacctggagactcaaaccatcgtcaacaatgaaagtagtgatatcatccggatattgaactctagtgcgtttgacgaattcgttggtgaaaagtacaagaaggtggatcttgttcctgaacatctcaaacccgaaatcgatgcgtttaattcctgggtctacgacaacatcaacaatggtgtatacaagactgggttcgcagaaaaggccaaagtttacgaaagtgaagccactaacgtgtttgaacatctggacaaagtggagaagattttgagtgagaagtacgtggatttgaaggctaaaaatggcggtgtagatggcaagcaaaatatcttcgccgtgggagaccaattgacagaagccgacatcaggctgtatactactatcataagattcgaccctgtttatgttcagcatttcaaatgcaatttcactacaatcagagatggatacccgttcactcatctatggttgagaaacttgtactggaacaacgatgcctttaggtacactacggatttcgatcatatcaagctgcattatacgcgttcccacacaagaatcaaccccttaggaatcacacctttgggccccaagccagacattctacctttatag

SEQ ID NO: 1637 - DNA, 1080 bp, Saccharomyces pastorianus
atggtatttacaacaccacaaccacaacagagattcaactccactcctcaatctaagcatagtcttatcttctcaccagctagagctccctccatgcaaacaccttcttcgttgaaccaccattcaccttctgttgcgggttcatcatcttcaatgaagggtcacgatcgctcttcaagctttggtaagttttctttatctatcggacaaaacggtaaagcagcaatcctgggacctataaatatcgtatccactgataagtcacatatagaaaaaactgtgacaaaaagcacttccaatccttccgatcgtgtcgaaaagactcgcattctgtgtctattaaaaaaaatgagaaacaagagtggtaacgtcaataagaaatatagcaaaataccatttaaaaccatgacaagtctacagccagtgcccaccacgtattcgccaaccgcttcaaacattacaaaaatatctcctaaaaaatctagctctccaagaactccaaacgctaactcaaatctgaacttaaacttcacctcttttcaaatcaaaacagggtttacccccaacattgatggtattttacttgaaaacttcacatctcctaatgcagcatcagattcacacaacagtacatccaacaacaacttgaacaacaatactagtaataataacaatagccaattgcttttcagtttaccacttcaatcctcaccaagacaatttagatctcctgcaagattgatagaccctcttcccatatcggactggaataccaatctcttgatgtcgccacctaggacaaccaacttcgaatctacgaatggtcattttaatacaactttctctcaagcgtcgatgttgagaagaccttcactaccgcacatagatgaagtaatccctcaggactcgaactacccagatagatctgattatctatccgtggatcaaaacacaagcgatcacaatggcacattctcagaacattcttataataatatgatgaaatcttcaataatttcactgcctatggagaaagacgatgctaccatggctttgaggaaactcgtcaccagagagtga

SEQ ID NO: 1638 - DNA, 2517 bp, Saccharomyces pastorianus
atgttcacatttttacctgttactcatcccacttcggatacgaagcatcccttgctgctattgcagtctgcacatggtgacaagtacttctttggtaaaatcagcgaaggttcgcagagaagtttaaccgaaaacaagatcagaatttcaaaattaaaggacattttcctcactggcgaactaaactggtcggatatcggtggattgcctggaatgatcttgaccattgccgaccagggcaaaagcgatctggttttgcactacgggaatgacattctgaactacatagtttccacttggaggtactttgtatttagatttggtatagatttgagcgatcatattatgaaggataaggaagtcttcaaagacaacataataagggtcaaatcctttaacgttttgaaaaacggggggaacggcacggatgaatttttcaacagtttccaaaaaggcgttttaagttctatagtctccaagatgttccctaagcatgcgcccaccgacagatatgatccttcgagtgatccgcatttaaacgtggaattgcctgatctggacgcaaaagtggaagtcgctacaaattacgaaatcagtttcaatcctgttagaggtaaattcaaactcgatgaggctgttaaattaggtgttccgagagggcctttatttgcaaagttgaccaaaggtcaagcgattactttagatgatggtacagtggtgactcctgaacaagttttggagaaagaacgtcactttgccaaagtgttgatcttggatattccagatgaccaatatttaagcgcgtttgtagaaaaatttaaagaatatgattgtgctgagcttggtgttgtttactacttccttggtgactcagtcactatcaatgacgatctattcaaattcatcgatcttttcgagaaaagcaattatggtaaagttaatcatatgatttctcataataagatttccccaaatacaatatcattttttggctctgctttaaccacattaaagttgaaggcgttacaagtcaacaactacaatttaccaagaacagaccgtgtgttttccaaggatttttacgaaacttttaacaagccactcgctaagggaacttccctgtgcgaatcccaagaaacacccttgagaacggtcatagaaaaggataatattcatatttttgcacaaaataaaacagtgactttagaaccatttcatagaagcgaagaatccatgaaatgcgaaataaacggtagcgtaccagctttatcgtggaagcagatttttgaggaccatatacaacccttaggtttccccctagctgatatcgacacagttatcaacgatcaactgcatgtgaataacttcaataacacaacagaaaagaaaaagcatgttgagattattacattaggaactggaagcgcactaccatccaaatatagaaatgtcgtatccacattggttaaactaccatatacatattccaatggcgatatcgtaaataggaatattttgttggacgcgggtgagaacaccttgggaaccatgcatagaatgttttcgcaactggcggttaaatcaatcttccaggatttgaagatgatttatttaagtcatttgcatgcagaccatcatctggggataatcagtattttaaatgagtggtacaagtataacaaggatgatgaaatgagttttatatatgtggtaactccatggcaatacaacaaatttgttaatgagtggctggttttggaaaataaagatattttggataaaatcaaatatatcagctgtgaacattttattaatgattcgtttgttagaatgcaaacacagtctgttccgttgaaagacttcaacgagcttatacaagaaaacagtggtcaggaagagagaaaaaaactagacttggacacaaattcttcgtacagggatatcaacctaattaaccaaatgtatgaggatttatcgatatcatatttccagacatgcagagcaattcattgcgattgggcatattcgaattcaataacatttcagatgaacgaatcaaataaacacgatacattcaaagtttcgtattcaggcgatacaagaccgaatattaaggaattttcttctgcaattggttataattctgatttattgattcacgaagccacactagaaaatcaattgatggaagatgctataaaaaagagacattgtaccatcaatgaggccattggtgtttctaacgaaatgaatgctaggaagttgattttgacgcatttttcccaaagatatcccaagttgccccaactagacaataatattgacgtaaaggcaaaagaattttgttttgcctttgatagtatgattgttgattatgaaaaaattggtgaacagcagaccgtttttccgttgttaaacaaagcatttgctgaagaaaaggagcaagaagatgaatctgcaggatctgaagacgttgaagatgtagacattacaccaaagaaacaaaagaaaagctaa

SEQ ID NO: 1639 - DNA, 963 bp, Saccharomyces pastorianus
atgtcgaaacctggtcgtactattttagcaagcaaaattgctgaaacgtttaatactgagattgtcaataacgtggtggaatacaagaaaacacacaatgacgagggcccactgcttgtagggttccttgccaataacgatcccgcagctagaatgtatgctacatggacgcaaaagaccagcgaatcgatggggttccgctacgatctaagggtgatcgaggacaaggatttcttggaagaagctataatacaagcgaatggtgacgattctgtcaacggtatcatggtgtatttccctgttttcggtaatgctcaagaccaatatttgcagcaggtggtctgcaaggaaaaggacgtagaggggctaaatcatgtttactatcaaaatctgtatcacaacgtcagatatctggacaaagaaaaccgcttaaaatccattctgccttgcaccccactagccattgtcaagatattggaatttttaaagatttacaacaatttgctgcctgaggggaacaggttgtacgggaagaaatgcatagtaataaatagatctgaaattgtcggcagaccattggcggctcttttggctaacgatggtgccacagtgtactcggtggacgtcaacaacattcaaaaattcacccgtggtgaacgtttgaaactaaacaaacatcatgtggaggacctgggagaattctctcaagatctattaaaggaatgcgctcttgacgccgacgttgtcatcacaggtgtccctagcgagaactacaaattccccaccgaatacatcaaagatggcgccgtatgcatcaacttcgcatccaccaagaactttagtgacgacgtcaaggaaaaggcttctctttacgttcccatgaccggtaaggtcaccatcgctatgttgctgagaaacatgttgcgtttggtaaaaaacgtagagttgtcaaacgaaaaataa

SEQ ID NO: 1640 - DNA, 1041 bp, Saccharomyces pastorianus
atgattagaaccgtgaagcctaagaacgccagagccaagagagctctggtaaagagagaagccaagttggtagagaatgtcaagcaggcgcttttcgttccaggccaaacttgcaataagaacctgcatgatatcatggtagatttgagtgccttgaagaagccagatatgaagagattcacccgtaagaatgatgttcatccatttgaagacatgacgccgttggagtttttcagtgaaaagaatgactgttcattgatggttttgatgacaagttccaaaaaacgtaagaacaatatgacatttgtacgtatgttcggctacaaagtatacgacatgattgaattgatggtcgtagataacttcaagttgctctctgattttaagaagttgacatatactgtagggttaaagccaatgtttacattccaaggtgctgcatttgatacacatcccgtttataagcaggttaaatctttgtttatggatttctttagaggcgaaactactgacttgcaagatgttgcgggtttacaacatgtcatttccatgaccattcaaggtgacttccaagacggtgagccattaccaaacgttctattccgtgtttacaaattaaaaagttataagagcgaccaaggtggtaagagattgccacgtattgaattggtggagattggacctcgtttggacttcaaaatcggcagaatccatactccaactcaagacatggtcattgaagctcacaagaaagctagacaattagagatgagagccaagaagaacgtggacatggatatcatgggtgacaagctgggtagaatccacatgggtaaacaagacttgggtcaactacaaacaaggaagatgaagggtttaaaacccaaattcgatcaaagcgcaaaagcagaagaacgcgacggcgacgtggacgaggactacgaagatgaagcgtcgtattccgaggagggacaagaatacgaagaggaattcgtcagtgccactgacattgaaccatctactaaaagacagaagaaatag

SEQ ID NO: 1641 - DNA, 3474 bp, Saccharomyces pastorianus
atgaaccaagagagagtacacctacgtttgaggaaagaactcagcgcacccattgcggtcgttgagaatgaatccctagtgcaattatcatacgaggaagaaagccaggcttctcttatggatatttccatggagcagcaacaattgagactacactcgcattttgataattccaaggtctttaccgaaaataacagatatgtcgtcaaaactcttcagtcgcaatacaacagcgggtttagcgaggatgacgaattgaatggatatatcgatatgcaaattgggtacgggctagtcaacgacaacaagaaagtctacatctggaacattcattctactcaaaaggacacaccgtacattaccgtgccatttctttcgggtgataatgatgaaacagcaattgtgccaaggtgcatattaacatgcccagcaacgatggacgaatctccgttagcactgaaacctaatgaccaggacgaaaccggtgggatcattattattaagggcaataaggcgatttattatgaagatatcaattctataaacaacttgagcttcaagctatctcaaaaattctctcacgaattagaacttcctatcaactcctcggatggggagaaatgtgacttgatcttaaactgcgaacctgccggtatagtccttaccacaaacatgggcaggatttttttcataaccattagaaattcagttgggaaacctcaattgaaattgactaagcaattgaataaacctttcaatttaggaatttggtctaaaattttcaacacgaacagttcagttgtttcattacacaatggtcccatcttaggtaagggaacaagattggtctatgttactactagcaacggaagcttccaatcatggcaactatctgccaccaattctcacccgaccaaattgattgatgttagtattttcgatgctattttggagtccctacaagacttgtacccatttgctcacggcacgctgaaaatatggagttcccacccattacaagatgaaaattcacatctattcctgtcatccatttacgacggttctaataatgaaacatactatattctctctacgattatcttcgattctacctcaaacagttttactatcttttctacttataggcttaactcgtttatggactcgatcaacgacacaaactttaaacccaaaatattcataccgcaaacggaaaataccgatgattctaatgaagttacatccattttggtaatgtttcccaacgctgttgttattactcaggttaattcaaaattggattctagttactctttaagaagaaaatgggaagacattgttagtcttagaagcgacatcgagattattggctctggctatgactcgagttctttatacattttgaccaagcaaatgggtgtgttacagatcttggtgaaggaaaatgagaaaaaagattcaaaaccagagattggatttgtcaaatcccatgttgaccaagccgtctatttctccaaaatcaatctgaatccaattgattttaatttgccctccgaaatttcattggatcaagaatccattgaacacgatttaaaactaacaagtgacgaaattttccattccaatgggaagtacattccaccaatgttaaacactttagagcagcacctttctgttcgcaaagaatttttccaaaatttcttaacttttgttactaaaaactttaactataagatatccccagaacttaaattggatttgattgagaaattcgagattttaaattgttgtatcaaattcaattccatcgtaagacaatctgatgaattaaacgaaatttgggaaaaagttatatcaaagtataatctaactcacaacgaaagtttaacaactgaaataatcgtcataaatcgccccgataaatttcccgtaattctaaaactctttttgaatcacgttatctttgttttgtttccatcacataatctaaatttcaaattaagcatcaacgaattaatcaattcctgcttttacagtggcatactcgaagaaggtgaaaaagctttaagatatgatcttctagaactagatccaatggaagttgatacatcaaagctaccatggttcgtaaacttcgattatttgaattgtatcaaccaatccttttttgactttacattttcatgtgaagaagcaggaaacttggccgtttatagtgaaaatttgttagagacagccaaaatcttatactaccaatttgaccaatttaaaatttggatgaatacgcaacctattggatctgtaagcgcaaatgcaaacttcacaaaaatcaacaatctttacgatgaaaatcatttggattggaatcatgtgctttgtaaagcaaacctaaaagaacagtctattcaaataacagaattctaccaagatttgcctggattagtccagacattacaaactttaaaccaggatgatccggcgattatgtctctatatgaaacgtttttcaatgaatttccagaggcctttagttttactctatttgaaaatttaattaaacacaaaaaattgaacgacttgatgtttagattcccacaacaacacgatgatttggtgaagttttttcatcaatcaggtccgaagtacggtcatgtggcgtggatccaacaagttttagatggatcatatgatgatgcattgaatactttgaaaaatatcactgtcgatgattcgcaaaagggagagaatttgaatgaatgtgaattacatttgaacgttgcaaaattaagttcgttattggtcgaagaaagtaacctggatatcaacagcttgagaaatattcaatataacctagatgcaattgatgccgaaaaaaaactttcaagcctattgaagaagggcgaagttcagatatataagaagttcgaaactagcgttttcaatgacgttttcaacatactagtggaagaacttaaatcaacaagaatagttagtctatcggaacttattgaactatattctatgttcgatgatgaagatagtttatttattccattaagactactttctgtcgacggagacttattaaactttgaaatcagaaagtttctaaattccttggtttggagaagaatcatcttgctggataattataaaggagagaataaactgcttcagcacatagtcatgcgtgtgtttgatgaagaattgttcaaaggcaatgaattccccttgcccagtgtggatctcctgtgcgataaatcgttagtgaccccagagtatataaacgaaacgtacggtaaattttccgttaatctagactccatacgcgaaggaatatatgaagagatatctgaactagaatcgttgaattcggataactcactggagatcaaactacgctcaactattgggtctgtagcaaaggaaaaaaagtacacaatcaattacgaatctaacaccgtagaatactaa

SEQ ID NO: 1642 - DNA, 402 bp, Saccharomyces pastorianus
atggactcaatagatgaacaaataatcacgaagcgaaaagaactgcagtcgttgcagaagataacgagcctgaccgatggactgaaacttcaactagtcaagctgaatgagcaagtcaaagaaatgggtacaaatgcggaagcagttgcgcagttgatgaacaattgggactctataataaacaatatatcacaggctagtttgggcttgctacaatacgcggaaggtgattatgagataggtccatgggaagattctaagaaacgtgagtctgaacagcaaagggagaaagatctaggatcccacgagaaaaacgagaatgatgacgataatgacgaagaggaagatctggtacccttgcctgaaactatggtcaggatcagggtagatggtaacgaataa

SEQ ID NO: 1643 - DNA, 1836 bp, Saccharomyces pastorianus
atgagttacagcgactacagcgatggtgcagacgatattcctgacttccacgatgaaggtgagttcgatgattatttgaatgacgaggactacgatttgatgaatgaggtgtttccccctttgaaggaggagttgcgagactaccatggctgcgataatctcactctgaaactagccttactggacaatgatttcgatctcgaaagcacggtagtggagctgaagaaaaccttgaagaagaaaaaggcacctaagaagccaacgaatactgctaacggtactgccaacgtagcccaaaaactggctgacgtatcgatctcgaaaccaaagtccaacgggcttccagattggctcgacgaagaagaagaagaggatgaacgcaaggattctgatgcaggcgatgacgggaggctcgtgcagagatactacaagaccacggtacccacaaaacccaaaaagcctcaagatatctctgcgttcgttcaatcacaattaccccatttaagttttgtggttcttggccatgttgatgcgggaaagtccacgctaatgggtagacttctttatgatttgaagattgttaatcaagcacaactaagaaaattacagaaagagagcgaaaccttgggtaagtcatcgtttaagtttgcgtggatcatggatcaaacgaatgaagaacgggaacgtggtgtaacagtctccatttgcacgtcccatttctccaccgaaagggcaaactttaccatcgtggatgcacccggtcacagagactttgttccgaacgccatcatggggatatctcaagcagaaatggccattctgtgtgtagactgtagcaccaacgctttcgaatcagggtttaatctagatgggcaaacaaaggagcatatgctgttggcatccagtctgggaatccagaatttgatcattgctatgaacaagatggataatgtaaattggtctcaacaaaggtttgaagaaattaaatcgaagctgttgccatatctagtggatatcgggttttgtgaggataacatcagttgggtacctatcagcggattttctggtgaaggtgttcataaaatagattacccaaacgaagtaaaacaatggtacaatggtcctactttaatggccactttggaaaataccgcgtctgaaatctcaaaggagagtaaaaaaactactgaagaggatccatttttattttctatattggagatcattccactaaagaaaacaaataacgaattagctttagtttcaggtaaattggaatcaggctcaattcagcctggtgaatctttgacgatatatccgtcggagcaaagttgcatcgtggataagattcaagtaggttctcaacagggacaatcaacaaaccacgaagagacagacgttgctatcaaaggtgattttgtcactttgagattacgcaaagcttacccagaagacattcaagacggcgacttggctgcatcagtcgattatttatctgtccattcggcacaagttttcatcttggagttaaccacatttgagatgaatagacccttgctaccaggaacaccatttattcttttcattggcgtcaaggagcaacctgctaagatcaagaggttaatatcgttgattgacgaggataacaacgttactaagaagaaagttagacatttgggttcaaaacaaagggctctggtggaggtagagctaattgaagtcaaaagatggattcctctactaactgttagtgaaaatgaccgtttgagtagagttgtacttagaaaagacggcaggaccattgcagccggtaagatctccgagatatctgaataa

SEQ ID NO: 1644 - DNA, 588 bp, Saccharomyces pastorianus
atgattagtagaactgtgtgccgcagatcatttagtaccagtgtttccattgggaaacagtttgggtttccgcagacacaagtgacgtctatctacaacaagaccaagagcgcatccaactataaagggtatttaaaacagaaagatgctccaggaatgcattatcagccatcagaatccatcgccacgggttccatcaatagtgaaaccgttcctcgtagcttcatggcaactaatgaccctcggaaggagttcgatatgcctgctcaggtcgttcaagcgacgcactctcccaacgttctcgtaagtaaaagcacagtgaacggcaagacgtatcatttggggccacaagaggtcgagaagatccagagattgcgtcaagagaaccctcagaagtacacacgtaaggttttggccgccaagtatggcgtatcgccgttatttgtatcattgatttcgaagccaaatggccaacgggcgcaagaaatggagggcaggctgcaagaaattaaatcacgctggaaggacaagaggtttgtggccagagaggaccgtaaacgcagaaagctgttgtggtaccaggcgtga

SEQ ID NO: 1645 - DNA, 3231 bp, Saccharomyces pastorianus
atgcgtgattcagagtgccagggaaggataagggagatattaaaagagtatacatcgaaagaagtaacgcccgggctgctcttgacactgcgaaaactggcgcaaagaacaaatactagtttagagcaattcattgccggttgtcaagcattgacaaagttcagcagtagcgatgtggttctctttaacgagctcagggagttgctcagagataattccgagcaaaatctggcagactcgaagaaagctgtaccttctatcaacaagagaaagaagtttaatattcaattggatttcgacgataatgaagatgaactggctcctcctgttcagaagaaacccatgaatccaagcacaatgttcaagaggattgataaatccagagcgaaacaattaaagcaatactctcccgccgcaaaggaccttcttttaactgacaaattcgaaatgcagacgcaacaagatcatatcggagtagtggaacacgaaccgtctcgaagtgaactggtagaggaggacagagaatggtacgatagtaatgaagaatatgggagttcggtgttggaatccctatcccggccacttgaagaaggtaaagaaataccttccgtcatcaagagccgtgataatgaagatgccttacgaaacaacgttcaactatacccgatcccactaaaacaaaggacggaatggattcctcccttcttatcaaagtttgcatctcaaaacaaagtatccaattccataattattggttctatttccgaaacctctaaccaatcagcttcagtaacaatggtgaacccattcaggaatcctgaaagtgaattttctctgaatgccagaagaggcagtaaattggtagccctaaggaggataaacatggaacatgtccaacaatcacgagacaatactgatgtcttgaacactgccatgggagaagtgctaggcttggaaaataacactaatgcaaaagacaagagccgctttcaagaaaacagcaatgatgattcagcggtgtacactccatcaagggaagaaattaaacgcacgagagaagaattacctgtattccgctgcaggtctcagctgttgtcactcatcagagaaaatcaagtagtggtaataattggtgaaaccggttcaggtaaaaccactcagttagctcaatatcttcatgaagatgggtattcggacagcagaggaaaatctatcgtcgtcacccaaccaagaagagtggctgcaatgtccgtcgctaaaagagtcgcaatggaaatgcaagtcccattgggtaaagaagtcggttactctattaggttcgaagatatgaccgatcctgaatatacaaagcttaagtttgtcacagacggtattttgcttagggaaactttaatggatgacatgctagataagtatagctgcatcattattgatgaagctcacgaaagatcattgaatacagacatcctacttgggttcttcaaagttttattggcacgaagaagagatttgaaactcataattacttcagccacaatgaatgctaagaaattctcaacattctttggaaacgctccccaattcactattccgggaagaactttccctgtacaaacaatatatacttccaacccggttcaagattatgtggaagctgcggtttctcaggcggtgaaaatacatttggccaatgattgttcaagtggtgatattctaatcttcatgacaggtcaagaagatattgaaacaacctatgatactttaagggaaaagttcctacaggtatactctaaaaaatttggtacagcaaaaattgaagaaatcaaggatatcgaaatcctaccaatttactcagcattacctgcagatttgcagttcaaaattttccaggatttgcatggcactaaaagaaagattatcattgcaactaatattgctgagacttcgttaaccattaaaggcatcaggtatgtcattgactgtgggtattctaagttaaaagtttacaacccaaagattggtcttgatagcttggcaataacgcctgtctcaaaggccaacgcagatcaaagatctgggagagctggtagaaccggaccgggcatggcgtatcgattgtacactgaagatactttccaagaggatatgtacatacagacaatacccgagattcaaagaacgaatttatcgaatacacttttactattgaaatctttgaatgtcactgatgaattaagtaagttcccgttcattgacaaaccacctttacaaacatttttgtcttcattgtatgaactgtggttcatcggggccatggacaacaagggtcaattaacgtctttagggctgaaaatggcaaaactccccttgcaaccttccctttccaaaatcttattaattgcagtacaaaacggttgtagtgatgaaatgctaaccattgtatccatgctttctgttccacaagttttttatagacctaaggaaagacaaaaggaagcagacgttgcaagaaataaatttttcatcgccaagtcagaccatttaacactgctaaatgtatttgttcagtggagagcaaataaatttagtccacattggtgtaataaacattttgttcaatacaaatcacttgtcagagcacgggacatccgagaccaactattaagaatcctggtatctcaaaacattcccgtagtctcttctggtaaagattgggatatcattaaaaaatgtatctgttcaggatttgctcatcaggcagctaaaatatcagggttgagaaactatgttcatttgaagactggcgttggtgttcaactgcatcccactagcgcattgcatggattgggtgatttgccaccctacgttatatatcacgaactattaatgaccagtaaagaatacatttgttgtgttacatccgtagatccattctggttaatggaatacggcgggttgctctacgacattaagcgcgtaaaggacaatcaagaatctgaaaccaaaggtttatttggtgaacactatggagatgttgttgacgtggctgaagatgaaatagatgtgaatatcaaaaaatatagagctctaagggatggcgtggtacaaaatctaataaagtcaaacaacacaaatgaaggaaagagtgagcagaaactccaaaaggaaaatattacaatcaataaaagagagccaacgaagcctttcaagagaagaaggacatttttttaa

SEQ ID NO: 1646 - DNA, 1014 bp, Saccharomyces pastorianus
atgaatcagtcttacgaagcagaaaatgtcaacatgggtccagaagacgatgatgaatttgatggttattttgaagatctaaataacgacaacttggcaaataccaatagtggtcaaagggtcggtaccaatactggtttaacgtttaacgatgaaatggacaccaacgatgatgacttcttggacatttacaatatgtctcctagagaaagattgatgcatacttttagaaaaaacgctcagaaagtacaattatatttctattcattaagggtatggcaacagattttaattatcctttttggcataatggttatgattatgggtgttctattgcttgtgttccataacacaattctacataaagtcgttgttacgtcaaacgatctgagagaaaagatgtctacacatttcattttgatagtgctgctattctttgtcgcatttccccctatgatcggatactccttactgtccactactactgggctgatttatggcgtcagttttgaaggatggataacgttagctttcgggtctgtgacaggctccattgtctccttcatagtatttaagacaattctacattcaagggctgaaaagctagtgcacctgaataaaagatttgaagcattggcttctattctacaagaaaataacagttattggatcttggcattactgagattatgcccattcccttactccttaactaacggcgccattgctggtgtttacggtatttcggtacgcaattttactattgccaatatattaaccactccaaaacttttcatctacctgtttattggttctcgtattaagagtctcgcggaatccgagtctactgggtccagagtatttgatttgctcagtattctagtcactttaattattttaactttgacagcatggctactgtacttcaaaactaagaaaaggtacttggaattgcaaaaccaagagcgccacgtatctcccgaccaaatacccgagatgtcgtttgaggtgtaa

SEQ ID NO: 1647 - DNA, 2757 bp, Saccharomyces pastorianus
atgagcaacaaaatatcagatcttacatccacacaaaataagcccctcctcgttacgcaacaactaattgaaaaatattatgaacagattttaggtagctctcagaatatcattcccattctaaaacccaggaccaaatctagtaagcctcgtaaggataatgtcaatgctggaagagtggaggtagatgctaggggaagactgcaagatagtaagggtatgattaccaaccaagtaaagtttaatttagacaccggagatgaggagaaattagatgacgagcaagagactgtcacagaaaatgatagtagcgatatagatatggaagatgtggacgacgacgagggggaagaagaagaagaggaagaggagagagtatctttggcaagtaaatgcaaatcatttctttacaatgtctttgtgggaaactatgaaagagacatccttattgaaaaaatctcctcccagaagcaacatgccatgtgttttgaagaatggtgttctgcgggcgcaaggctggatgaactcactgggaaaatagcgtggaaacagaaactggagtcgcccctatatgattacaagctgataaaagatctaacatccagactgcgcgaggaacggttgaacaggaactactctcaactattatacatcatccggaccaattgggtacgcaatctgggcaacatgggtaatgtaaacctttataggcattctcatgttggtacaaagtatctgatagatgaatatatgatggagtccaggttagcgctagaatcactaatggagtccgaccttgatgataattatctgctgggtatactacagcaaacaagacggaatatcggcaggaccgctttggtccttagtgggggtggtacttttggccttttccacattggtgtcctcggtacattatttgaactcgacgtgttgccaagggtgattagtggcagtagtgctggtgccattgtggccagtatattatcagtccatcataaagaagaaatccctgtgttgctaaaccatatcctggaaatggaattcaatatttttaaggacgataaacagaaaagtgaaagtgagaatttactaattaaaatatccaggtttttcaaaaacggtacatggtttgataataagcatctagtaaatacaatgatagaatttttgggcgatttgacctttagagaggcgtacaaccgaaccgggaaaattttgaacataacagtttcccctgcatcgttatttgaacaaccacgtttgctgaacaatttaactgcacccaacgttctcatttggtcagcagtatgtgcatcatgctcgttaccagggattttcccctcgagtccgctatatgaaaaggaccccaagacaggggaaaggaaagcttggaccggaagtagttctgtcaagtttgttgatggttctgtggacaatgatttacccatatctcgtctttctgaaatgtttaacgtagaccatattatcgcatgccaagtgaatattcacgttttcccctttttgaaactatcattatcctgtgtgggcggggagattgaagatgagttcagtgcaaggctgaagcaaaacttgtcgagcatatacaattttatggccaatgaggctattcatattttagaaatcggaagcgagatgggaattgcaaaaaatgctctgacaaaattaagatcggtgttatctcaacaatattctggtgacattactatcttacctgatatgaatatgcttttcaggatcaaagagctattatcaaatccgacaaaggagtttttgttaagggaaattaccaatggggcaaaggctacgtggcccaaaatatccattattcaaaatcactgcggccaggaatttgctttggataaggcaatctcttatacaaaaggcagaatgattgtcacttcctctttgaaaaaccccttgcagtttgcagattcggctattggtttaatcaaagccccagagcaagtcccagaggaatccaaagatccagcaaatgtgacgttactaaccagaacaccaacaaagggcgagaaagccggtaatcatattgccagtgtattggatgactacttgttagaatccgaatctaccaactctttattattgctaagagaaaatgcaagcacgtatgggcgtttgccctccggcttcagaccaaggtattccataacatctgcttcgttgaatccgcatcatcaaagaagaaaatcggatactattttcacttcaagaagaccaggaaaatctttctcattttcagttgcctctccaacatcgagaatactaagacaatctaataaaatcaatggacacccacccccaattctgcaaaaaaaggcatcctctggccgattgatgttccctgtggacgtcaaagcctatggttcagaaagccatgagcttgtcccacattctgctagtattgaaacacctacaatggtagacaagaaactgcattttggccggaagaataaatatctaaagcatctgaacaaaaaatgggttagcaatgggaacgcattgtacgcagatccagagaaggatgaacatcctacattaaggctaatcagcaatgtcgattcgaacgcaatgatacaccacgatcttgcaaatacttttagacgtcatagcgttgatggaagaccaccttctcaagccataaagagctcgccatttcgctcaaggccttcatcttcagcacagcacaagagcactaataatgttacccaataa

SEQ ID NO: 1648 - DNA, 1251 bp, Saccharomyces pastorianus
atgggttccaagaaagttgaggctaacgaagtgccaaaattaagtgtcaaagagaaggtcgtagagaagaagtcatcttcttcctcctcatcatcatcctcttcttactcctccagttccagtgatgagtcctcgagcagcagtagcagcagcgactccgaatcaagttcgtcatcatctagctccagctccagctccagcgactctgattcctctagcgactctgattcttccagcgattccgattccgactccagttccagcggatcctcttcctcttcctcttcctcttcctcttcctcttcctcttcttcttcttcttcctctagctctagcgagtcttcctccgaatcggaagctgaagacgacaccaagaagagatcgagagaatccgataatgaagatgtcaaggagactaaaaaggcaaagactgaaccagaatcttcatcctcttcctcgtcagattcaagctccagtgagtcctcttcatcttccgactccgactccagctccagctccagctccgactccagctccagtagttcctccgactcagaatccgactcgagctcaagctctggctctgggtctggctctagttctagttctagcgactcttcgtcagattcggattcagaatcggactcgagctcaagttctagctctagctctagctctagttctagcgactcttcatctgattccgactcagactcagactcagactcagactcctcttcttcctcgagttccagttccagctccaactccagctccagctcgagctccagtgaatcctcatcatcatcatcatcatcatcatcatcatccgactccgactccgactccgactccgactccgactccgactccgattctgaaacaaagaaaatatcaaaagatgagcccaaggccgaagaaacccctgcttcttctaatgaatctactccatccacttccgtttcatccgatgctagtaaattgaatattccagccggaaccgatgaaatcaaagacggcgaaagaaagcatttttccagagtagagagggccaagatcaacttcgaggcttgggaattaacagacaacacctataaaggtgctgctggtacatggggagaaatggctaacgaaaggttaggcaaagtaagaggtagagatttcacaaaaaacaaaaataaaatgaagagaggttcttatagaggtggttccatcactttagaaagtggttcgtacaagttccaagattag

SEQ ID NO: 1649 - DNA, 1806 bp, Saccharomyces pastorianus
atgctcaatcatctcagtcaaggctcagatgatatacaagacgagaagcaaggcgactttcccgtcatcgaagaggaaaaaaaccaaaccgtcactttaaaggactcttatgtcagtgacgatgctgccaactccacggaacactacaacttgtctccctccctggaggaggatgagttcgaggcccccacggacgaagaattgcggagtttgagacatgttgggggtaagatccccatgagatgttggctgatcgcgattgtcgagctgtccgaaagattctcgtactacggtctttccgccccattccaaaattacatggagtacggtcccaaggacacccccaagggtgtgctgagcttgaacagtcaaggtgccaccgggttgtcgtacttcttccagttctggtgctacgttacgccagtgttcggtggctacgtcgccgataccttttggggtaagtacaacaccatctgctgcggtaccgccatctacatcgccggtatcttcattctgttaatcacttcgatcccttccgttggtaaccgagacagtgctctcggcgggttcatcgcgtccattatcctcattggtatagccactggtatgatcaaagccaatctttccgtgctgatcgccgatcaactgcccaagaggaagccctccatcaaagtgttgaagtccggtgaacgagtcatcgtggattctaatatcactttgcaaaacgtcttcatgttcttctacttcatgatcaatgtcggatctctatcgctgatggccactaccgagttggaataccataaggggttctgggccgcctacttgttgccgttctgtttcttctgggttgccgtcgtcactttggtgttcggtaaaaaacaatacatccagagaccgatcggcgataaagtcatcgccaaaagtttcagggtctgctggattttgaccaagaacaaattcgatttcaatgctgccaaaccttctgttcacccagaaaaggagtatccatggaatgacaaattcgtcgatgaaataaagagagccctagctgcctgtaaagtctttgtcttctacccaatctattggacccagtacggtaccatgatttccagttttatcactcaagccggtatgatggagttgcacggcatccccaatgattttctacaagctttcgattccattgccttaatcattttcatcccgatctttgaaaaatttatctaccctttcatcagaagatacaccccattcaagccaatcacaaagattttctttgggttcatgttcgggtctcttgccatgacgtgggctgccgtcctacaaagtttcgtttacaaggccggtccatggtatagtgcgcccctaggtcacaacaccccaaaccatgtccacgtttgctggcagattcctgcgtatgtcttgatttccttttcggaaatttttgcctccatcactggtttggaatacgcttattccaaggccccagcctctatgaaatcgttcatcatgtcgattttcctgttgaccaatgcctttggttccgccattggttgtgccttgtctccagtcaccgtggatcctaaatttacatggttattcactgggttggccgtcgcttgtttcatttctggttgtttgttctggttctgtttcagaaagtataacgacactgaggaagaaatgaacgctatggattacgaagaagaagacgaattcgatttaaacccaatttctcaacctaaaggcaatgacattgaaatactagaaccaatgggaagtttaaaatcaactaccaaatattaa

SEQ ID NO: 1650 - DNA, 3591 bp, Saccharomyces pastorianus
  modified_base (676)..(757): a, c, g, t, unknown, or other
atgcctgagatctccgttcaaaatccgctaaggctctctgaaaacgggaatgctcgttccatgtttctatctgcatcacaaccacaacgtccatcaactactccgtccttccctatgtctgtgcaaaatgctgctaggctggacttgtcgagtttccaggtactgaatttatctgttaaaagacagaattcaaattcagtgaatgaagatataaatagcagtaagagacgaataagtagatccaattttttagatatcgaatacaacaataacgctagctcccaatcagaaaagaccacaatctgtcactcaaggccaaacccttccgtcaggtatttgggcagtccaaaaagggccttgcagagagaaaattctgtcgaagttacgcgatcctcccctttggtatcgaagcccgctagtcatactggaaaacatattgcatacgacaaatataccacaggaattccggtcaaatcaccgaacatttcaagtagcaacagcttactcaacatgtcaaaaagttcattagcctatgtggatgcagaaccagacggaccgtcatgtaatgaaattattgagaatttccagcacaaaaaaaccgaaagcgatgacattcatgacgatgatggcgatgacgacgcagatcctaatgacttaagtaatagtgaaaacaacnnnnnnnnnnnnnnnnnnnnnnnnnnnnnnnnnnnnnnnnnnnnnnnnnnnnnnnnnnnnnnnnnnnnnnnnnnnnnnnnnnatgacgatgatgataataacgaacgggaagaaagcaacgtgtacaggcccgcaaataacaaaaaatcaagcatcgctttaatccaaaaactacaagaactatacaaagtcatagtcaagcaagaaattgagttacaagagcggtgttcccaactgacgaattctcaaaccactgaattgaagagtctatggactatctacaggattaataccgaactggttaacaattacgttacgtttatcaccaccgccttattaccgtcccaaccacctcatgatttagttattggccaagagatcgtcgaaatatatagaattgaaagaagactatgggtatatggtacaataacctttttagacgttcttaaaaacttctccaatttcatggaccctgaagtttgctgccaatttattactcatgtttttgtttcattatcgaccatgatctctgatataccatccaaatattcaatcacctggttacaaagattaggcgatttatcaagaatggctatagcgttatatccctcaagtttcattgattggaagttaagtgcggagcattggtacactgaggcaatgaaatacatttataaccatggtaagctttattatcatatgtctacagttcagcaaaacaccttggaagcatttgtgaatttggggaaaagtgttttttgccaggaaacgtttacaccatctccgcagtatatgcaattggtcatcgataatatttatcaaagagcgtttgtcgaaagaaataatggcaaccttagaaactcgttattgattgaatatttgaaacatagcgaagccatgctattgcccagttttttagagagtccggacttgcaaaatgttgtgttgacctattttgttgagaaatttggtatagatgcaaatggttgcaatatattcaacccagaggatatgtttattcaaaatcctgacttcttcaaatactttttcagacatgctccatcttttgcacaatctcatattttacaaattgttggattcggagaaccaaagaatccatttgccattctgttcgagttacccaaatacttgaaggagagaaaggacaagaaggagcgtaaaaagtcttctaataatgattcttcaataacggaaagcacaacaagtaacagcagaaattacaatgatgatgatgatgatgaaataatgagttccaccacatccatatctgagcgtgattttttcatggagtttttcaatgatattgacactttacgacgtccaatagtctcttccatgttaacaaatgaggcttggttggagtctttaaagtttttgaacatgacttcattaaagtgcggtatgatagtgcttaggaagtttcttcatggccctctaggtatcgcattacctcattttctaccatggatttactttattatttcaatttgcttgaaaagcggccaattgagtgatccaattagcaaagagttttggatactcatcgtcaagagaatattcccctgggacacaatggttacttttatgaatattctaatagcatgcttgttggacaatgaaacgtccaatccaattattggaagcttgtgcagtgaatacaatgatttaaatttggctgaactattagaattttttaatgagaaggaagaactacctgaaatttggcgttgctggggtacattatggtttgacaccatctgccaaaagaacacaaagacaatcagtagtgacgatgattttgaggaggtaggtatcaaagattacatggcattagattcgccaactgatgggataatatttgatgtgaatgatgaaaatggtgagaaattttggaaaagggcatgtagaactatttttcttttcaaagagctatcgagaagtttcaaaataggagtagtaatcaacaatgaatcgtcgatcaaccgttcatcaatgccaagcaagaatgtactaggagatttatcattcaaactcgaaccattgagtaccctaggaagtagtcttccaacgctggaaggtattgttgacgtctttgaagcaagaagcgagaacaatgttgatttgcacgctgtgccagaacttagtgtcattaagggcggaagtattttcaactatactggctacaaaaagctttgtcctgattacacatgtttcgataaaaacggggaatttttaagtgcctctctctatacctcttggtatgttcctaacggcagtaacaattcggagactaacgtaagtagtagctgcgaaaaggaaagcgaggacctgttcttgaagtgtttgatgtcagatgaccaggaaatcgacttgaaaatcacatacttcgtctttgatgcgacatcatggttgaggcactcagcacgtatattcaagttagcacaaaataggctattgaaatttgctatctgcttaacaacattccaagaattaagattcctacggaagtcaaaggacgaaaacgtcatggaagcagccacaaggggtatcataaccattagacaactttactacgagaacaaggtactacctttaaggtttacgggtaatgtcgcaacgcatatcgaggagaacttagagttcgaagagcagataacatggagaacacatgtcgatgagtttgtcatcgaatccataatgaaagcacaagaaaagctggagaacgcaaaccaaccgcacgcttccacttatcgtttcaattatgtgatcttgatatcggatgacgataccatgaagaaaaaagcacaagaaaaaaaaataaaaacgttaagcacgagatttgtgttttctttatgcacaaaactcggcgagcagcgccgcttatgcacagactga

SEQ ID NO: 1651 - DNA, 2154 bp, Saccharomyces pastorianus
atgtttctaaacccaaatgagattttaagtctaattcgtgaagtatacgaagttgatatcaaatgcttttattcgcagttgcgtctaaagaaactaaaaaaattgttggaacatgccgcttatctgtttgacatctacgtaagggacttgaaaaacaacctagagaaagatgcactaacagccttcattgttggtggctactacctgtatcttattattccgcagtcgttacaatttcaggcaagaaacaatgtttatagcagttacgcaaagttgaaaaataagtaccaagaagaacagggaatgacctatgtcctaaaattggtgaaggacgaaagtgctagaattgttgatcaatgtttatctgactcaaaacgaatttccaggaccatgcaaagaaaaagagcttactctttgcccctacgaccgctccccgttcacatggcttctttatcgatacataaccaactcgacgttccggtacgggaaatgcctatagaaacgtcaaggccaataaataataccttggtgaaggacttggctaaaaaggaaaatgaattgaaatcaagtaatgagcttgaacaagaaaccgatatagaaggtagagatagtacaagtacagggcccttatctatgacctcgtacttaaggttagatactggaaaggactctttatttaaaactctctctagtccagcagcagcttccactgggaactccttagaggctttgttacagtttgaggagcctagccagaattcctcttctacattaaagtcaaaagagcaggaagaagaagaaaccgtaatcgcttccacctctcaaacttttaagttgccggtgatcgaaaatccagataacctactgtctgaattatccataactggcttgcgaaatccatgcaacacatgctatattaatagcatggtacagtgtctgtttggcaccactttatttcgcgatttgtttctaactaagaaatataaactctttctggagaatgaaaaatacccaaaaggattccaactgtcccactccatttacgttctatttaagaaaatgtacctgagtggtggaagggcaattatacctaatggctttttaaaggtgtgtaaaaagttaaggcctgacttgaacatcccagatgatcaacaggacacgcaagaatttttgatgatcattctggcacggattcatgaagagctgtcaaatgaaaatgtgactaagtattattctgatctaattttttatgatgcgactgctttgcaagtcaacccatccaaatatcaaaaatggtatgaagaaactgttctttcagacggattatctccaatcgattatatattccagggacagatggaaaatatactaaaatgtcaacgctgtggcaactcttcctacagctattctaccttttatgttctgtcacttgcaattccaaaaccctctttgtatagttttacaagtaaatccaaaaaaataaaattggaggattgtataaacttgttttcaagcgatgaagaattgtctggtgacaatgcttgggactgtcccaagtgtagaactactgattgcaagtcgaaaacggatgaaaatctcagccagaagaaaagatcaatactattcaatttgcactccagatcaagatccaaatccccccatcatcgtcatcatcaccatcatcaccatcataaaaaagatgatgcgacagataactccaaaaagtggaaatctaaaaagctgaccactgtaaagagtttggatttcattgttttgcctccaatactagtcatccatttatcaagattttattatgatttaacgaaaaaaaataacacggtaataacttatccactgatattgaatattattctgaaaaacaatgcggtcgttcggtataagctgtacgcaatagtaaaccattccggaaatcttgtcaatggacattacacttctgtagtaaataaagaaaaaagccatgaaattgggctaaatagacagatttgggtcacgtttgatgatgatgttattaaacaacacaataaggatcgtgatgactttgaaactggcagggcagagatttctagtagcgaagtatatgtcttattttatgaaagagttgatgaagaagattataaggaagaatgttgttaa

SEQ ID NO: 1652 - DNA, 2436 bp, Saccharomyces pastorianus
atgtcgaatacgagtgctaaagatatacggaaaaataagccaaaaaggggaaccggcttcgatttactcgaagttactgagtcattgggctaccagactcacagaaaaaacgggagaaactcatggtcaaaagacgatgataatatgctacgatcactggttaatgaatccgcaaaggagctgggctacgaaaatgggcttgaagacgttaaaacaattcaacaatcaaaccatctttctaaatgtatagcttgggatgttttggcaacacgctttaaacacacagttaggacttccaaggatgtaagaaaacgttggacagggtctctcgatccaaacttgaagaaaggtaaatggacccgagaagaggatgaccagcttttaaaagcttatgaagaacatggacctcactggctgagtatttccatggatattcccggaagaacagaagaccaatgcgccaaaagatatattgaagtcctagggcctggaagtaagggaagactgagagaatggactctgggagaagatttaagtctaataagtaaagtgaaggcgtatggtacgaaatggagaaaaatatcgtcagaaatggaattcagaccaagtttaacgtgtagaaatagatggagaaagattattaccatggtggtacgagggcaagcatcggaggtgataactaaggctataaaagaaaataagaacatagatatgacagatggtaagctccgacaacaaccaatcatggatgcggatatacgatccgatttcaggtcaaatacagaagaaaatttgcaagcatctcgagagaataaagcttcattgataaagcaggatatattaactatcaaagataacgaatcaagtaaattaccaaaattaaaggatagtaacgatacagatagtttgagcgacagcaagcaacaactattgccgccattaaaagacatttctgcacctccgccaataagaatgatgcaagttagccagccacatacaagcagtagtagaaataagatttctctacctgttgaagatctttcttcaatcaacaagcatagccctggcggaattcccgatagtccccaagcaactcttccaccaacatttaacccagcatccctcgatgagcatatgatgaataacactggcattacagatcctctaaaacataatgattccaccttgagaacaagagaaccaaattcctctagcacccaatggaagttcactctgaaagatggacaaggtttatcaatatcgaatggaactatcgacagtacgaggttagtaaaggaactagttgatcaagctaagaagtactctttgaaaatatcgatacatcagcatattcataaccactatgtcacacccacagacaatactgctagtaataacaatagtgtgccgaacactgcaaatgttaatggaaattctttactaattgacaatttcccacatatgggtagacaattgggaaatggcctttcagggttgagttcaaccaatgatacctttagcccagaataccgaacctctcttgataatatggataatgattttttatctagaacaccgaattataatgcattcagtttggaaccaacctcgcacaactccactgataacactaatgaacttggatcgcaaagcaatagagggacagacagtccatccgtgttttatcctcaggcaagagcattgatgccaaccaactcaaacgttactaacaatgaaatcaattcaggaaatgtcagtactaatagtatgtctcctaattttaatggaagaaacggtacagcaccaagctctacagcatcttatacaaccagtggttcggaaataccaccagatgtgggaccgaacagaataacacattttaattatttacctccaacgatacgacctcatttgggctcatcagatgcgacaagaggtgctgacttgaataaattactcaatccatccccaaattcagtaagaagcaatggaagtaaaagcaaccagaaagagaaaaaaaagagcgagccgcccggtcaccattcttcttcctctctgacgaccaacaaatttaaccgtattgatcagtccgagatttcaagaacaacatcaagatccgatactccgttaagagacgaagatggtttggatttttgggaaactttgagatctttagccactacgaacccacagcctccagttgagaagcctactgaaggtaacgaaaccacatcccatgtagtacaccagggcatcgtagcacatacaggggaaagcggtttaggttccaacagtgagggatacgatttttttaatgaattactggataagaaggctgatacattacataacgaagctaagcagcaaaaagaccttgatatgacgtctggtggctctaccgataatgggtccgttttgccattgaatccaagctga

SEQ ID NO: 1653 - DNA, 975 bp, Saccharomyces pastorianus
atgacacgcattgcgatagaaaagttgatagttgaacatcctcaaaaagttcttgttctcgatggtggacaaggaacagaattggagaatagaggcattaacataaatagtccggtatggtctgcggcgcctttcattagcgattctttttggcagaaaacttcttctgaccgaaccttggtcgaggaaatgtatagagactttatggatgctggtgcaaatgtgttaatgacagtcacttaccaggcaaattttcaaagtatttctgaaaatacctcgatcaaaacccttttggactacaaccgctttctcgacagagttgtgtcatttacgcgcagagttattggagaggacaggtacttaattggaagtattggcccatgggcggcccacgtctccagtgagtatactggtgactatggcccacacccagaagatattgattacctccaacacttcaaagcccagctggacaatttcaacaagcatgcagatattgatcttattggtttcgaaacggttcctaatttccatgagctaaaggctattttatcttgggatgaggacgttatctcaaaacccttctacgtcgggttatcagtgcacgataatggtttgctgcgagatggtaccactatggaagaaattgcagcctacgtaaaatgtcttggaagaaaaatcaataaacattttttgttgctgggagttaactgtattagtttcaaccagtctgcatacattttaaaatctctgcatcaggttttacctgacatgccactattagcttatccaaatagtggagaaatttatgatactaagacaaagacatggcatcaggtaaatggtaagctaaatggctgggacgtggtagtggaggaattcatagataacggtgcgcgcattattggcggttgttgtagaacatctgctaaagatatctctgaaattgcatctgctgtagatagacactcctaa

SEQ ID NO: 1654 - DNA, 1752 bp, Saccharomyces pastorianus
atgattgactctaaatctgccaaaatttcagaggtgcagttcagcactagtgttgtaagtacgccctcatcagacacaactaacctagttcacagattcaagaactctttcaaacgaaaggacgcattagtaattcaagatggtctgctgtattctgagctttcggaggaagaaaaagtacggtgggacttagccaatcagccttataaaaaggttctagatcaaagacacttaacaatgatagctatcggaggtaccctggggacaggactttttattggattaggggaatcgctagcatccggccctgcttctttgcttattgggttcttgctggtgggagcatcgatgctttgcgttgttcaatgtggagctgaactttcatgccagtatcctgtctctggatcttatgctctacacgcgagtaggttcatagacccgtctgtgggtttcagtgttggaattaattatttgttgatgtggcttatatctttccccagtgagttagttggatgttcacttaccatgtcttattgggctccctccgtcaaccctgctgtatgggttgccatcgcttttaccttgagcatgttattgaaccttttcggagcaaggggattcgcagaatcagagttctacatgtcgatcttcaaaattgttgcacttttcatctttataatcattgggattattttagttgcaggtggtggccctgaatcaactggctatatcggtacgaaatactggcacgacccaggttcttttgctcctccggcttttaaaaatttttgtaatactttcgtttcagcagcatattcatttagtggtaccgagatggttgttttaactagcgctgaggccagaaatgtttcgtcggtgtctcgggctgctaagggcaccttctggagaattgcggtcttttatatcgttactgtgattattattggttgtctggtcccttataatgatcctcgtttgattaatggttcttcgagtgaggatattactgcttctccctttgtgattgctttaagtaacaccggtgccatggggacaagagtgtcacagtttatgaatgcggtcatcctaatagctgtgttttccgtttgtaactcctgtgtctatgcctcttctaggctcattcaaggtcttgctacagcaggccagcttccaaagatttgcggctatatggacagaaatggtaggcctttagttggtatggcgatatgtggtgcttttggacttttaggctttttggttgtttctaaagaccagggtactgtttttacctggttgtttgcgttgtgttctatttccttttttacaacttggttctgtatctgcttttgtcaaatcagattcaggatggctatgaaagcccaaggaaaatcggatgatgacattatttacaagtcaccattaggaatctgtggaggagttgtcggatgtactttaaacgtgttgctagttattggggaaatatacgtatcagctgcgccggtaggcatgcctagctctgccgctaatttctttgaatattgtatgagtattccaataatgatcgctgtctacatcggacacaggatttaccgcaaagattggaggcactggtacattaagcgggaagatatcgaccttgacagcggacattccatggaggatttggaagccaccaagctgagaagggatatagagaaggaatatgttgcttccagagcattttactacaggatttacagatttttctgctaa

SEQ ID NO: 1655 - DNA, 1239 bp, Saccharomyces pastorianus
atgtctcctccaaccgctctaatctcgaccccaatttactcccctgattctcaaattgaggatgtcacaacagcagtagataatctgcactataattctaagcttagctatggaaattttgatacccatttttatgctggtcaagacgaagtctctcctactggtttgttaaaaatccgtaattcctacagaaaaaaatcaaagtatccggattatttaccaacttgggatcccactgagaagcatgagccgctcaaattccacacgtatcaagatcctgctttgagagcagacgttgactttcctaatctttttaccaaagaaagaattggtcaaacaaaagtgaagaaggttacgccaaagtttggtctcgaaattagtgggacccagttaaccgacctctctgatcctgcgaaagatgaacttgccttgcttgttgcgcaaaagggagtagtcatctttagagatcagaattttgctgacgaaggaccagaatatgtaactcaatatggaagtcattttggaaagttgcacattcatcaaaccagtggacatcctcagaaagtcccagagctacatattactttccgtagacccgatgcggatgaatttgcaagagtttttaaggattcgacaacatctcgtggatggcatacggacgtttcttacgagctacagccgccttcgtatacttttttcactgttgtggaaggtcctgacggaggcggggatacgctgtttgcggataccattgaagctttcaacagattgtccaaaccctttcaagattttttgagcactcttcatgtcatccacagctcgaaggagcaggctgaaaactcacaaagtcagggtggggtacaaaggaggttaccagtgacgcatatccatccactagttagggtccaccctgttttgaagaagaagtgcttgtatgtcaatcgtgcgttttctaggaaaatagtcgagttgaaaagacaagaatctgactcactattggaatttttgtacgatttagtggaaagcagtcaggatttacaattgagagccaaatgggaaccccgcacagttgtagtttgggataatcgcagagtccaacattccgctgtgattgattgggaagaaccgattcacagacatgccttcagaattacaccgcaggctgaaagaccagtggaggatctaaagttcctgaacgatgaaaattactacccttcttcacaaacgttgaatatttag

SEQ ID NO: 1656 - DNA, 1596 bp, Saccharomyces pastorianus
atgtcaaaagttgacatagatattggagctgactcaatttcctcttctgatgagatcttgataccatcggccctcgcagatgccacattagcgttcatggaggagaatgatgcaacagttgcgcagataacgcctgaacaagagaaaaaactgaagaagaagctttttctaacaatattctgctttgtttctgctatcaatcttttgctttacatggataaagccactttgtcctatgattcgattctggggtttttcgacgacaccggtcttacccaagatacgtacaatacggtcaatacactgttctacgttggttttgctattggccaatttcctgggcaatatttggcgcaaaagttaccgcttggcaagtttttgagtggaattttagcaacatggaccgtactcgtctttttgctttgcgctgcttacaatttttctggggtcgttgctttgaggtttttcttggggctgacagagagtgtcgtcattccaatactgattaccactatgggcatgttcttcaatgcatccgaaagagctgctgctcagccgtttttctttgcggcatgcatggggtctccgattccaactggattcattgcctatggtgttcttcacataacgaatccaagcattgccttatggaggatattcacaatcataattgccggactaactttcatcatgactattgttgtatttctgtggttccctaataatcctgccgatgctaaattttttacagtggaggaaagagtatggatcatcaggagagttcaagcgtccacgggctcttctattgaacagaaagttttcaaaaagagccagtttaaagaggcaatgaatgattacataacctggctgtttggattgtttttccttctccagcagctggctaacaatttgccttaccagcaaaatcttttatttgaaggaatgggtggtgtcgacgccttaggatcaacattagtatcggtcgctggagcaggtttcgcagtggtttgtgcccttattgcttctttgacgttaattaaatggaaaaatatttcagctttgactgcaattttttggacgttaccagcattggtaggatccattgctgccgctgccttaccatgggacaacaaaatcggcattttagcaaatatttgtatggcaggtcaaatttttgggattcccttcattatagctcttagctgggcaagctcaagtgcctctggatatactaagaaattaacaagaagttcggtgtgtctatttgcaatgggtattgctaatattatttccccacaaatatggagagcaaaagacgctccccgctacctacctgcttggatcgtccaaatcgttttatcattttctttggcaccagccattctgttgttaatccacttcatactgagggcaagaaataacgaaagattaaaaaattacgacgaaaactttcaaggttatgttaacaaatatcaacttgtcgaaagcgatacttcttcttctaacgaaaaaggtgcaacagttgcgcatgaaagcaacttggcagtgttcgacctgactgatttagaaaacaaaacttttatatatcctttataa

SEQ ID NO: 1657 - DNA, 2136 bp, Saccharomyces pastorianus
atgcaaaggctgcttctgcttctaacatggttgctgtcgttagcaagcgctttcgatataaagataccacgcactgaaaaacgagatcaaatagaatacaacgctgtgctggcatgcgcatcgtatatcaacactctaaaatggtcgttcgatagttctcttgtgccaggattctgctccaccacatgcttttacccaccagcattcaatacttggtctctttgtatctttaattcgctcacagatcatgctgttccaacggtcaatgcaagtttcgagaagagtttgggcaatgtaagaaagatgtgttcgtttgtggataagcgctttagcaatatttcgttggaacaatactatttctccctaaataacgcttctgcccacgccataaagcattataactctactgaatgcctatcgacgtcggtttgggccgatttcaagactagatctaaatgggtactggctttccatgccaatacttacaattcagatatcagtagcgtttacggcgcgtacttgagttactatttcgttatagtaggagtgatagcagtatttttccacatgagccattacaatgggctcaatcgagtgctgtttagatgccgtatcatcaatctcattcgtggccattgcgtattgcctacgtttttgattgggaaacatgctaaccattttaagttccttaattttgagatctttagtgggttgatgcccaactccttggaatcatggatcattattggttacacgttagctaacatgatattcttgtccatagattacattatagatccctataatcttattttcaagagccacctgtcgcaatttatgagattactggctgatagatccgggataatagcgtttacacaatttcctctaatcatcattttcacagcaagaaatagttttttggaatttttaaccggacttaagtttaattcattcattagtttccataaatggatcggcagaatcatggttctcaacgcaatggtgcattctctttcatattcattgtacgcgttggccaaccacaactattccataagcagcaaggaattgtactggaaattcggcattgcatccacaacaacgctttgtgttttactggttctgtcattaggaatggtaaggaaaaagtactacgagtttttcctttatacgcatattctgttggctattttgttcttttactgctgttggaagcacgtcacgatattcaacggttggaaagaatggattgtgatatcactaatcatatgggggctggagaaagtgttccgggtttggaacattctgcatttcggattcccaagggccactctaatcaacttgaacactagcaagaacccacacgaggaaatgttcaaagtcatcataccaaagcataactgcaaatggcaatccaagccaggccagtattgtttcctctattttttgcatcctctggtgttctggcaatgtcatccattcaccattatagatgaaggggacaagtgtgttatagtgattaaaccgaaagacgggcttaccagggtcatatataaccagatcttgaaatcgctgaacggtaagctacagctccgagtagccatcgaaggaccatatggacccagcaactacaaactcaacagattcgaccatttgctgttattaagcggcggcacaggcttacctggtccgttggaccacgccatcaaactctctcaaaacccagccaagccaagcatacaattaatcatagcaatcaagaatgtctcgtttctaaacggctacaagtccgaaatcctaaaactaaagcaaaatcaagcaaatctcaacgtgcaggttttcctaacccagaaactacctgccgcaaagggaccaaccgcccacgaccaactaataaatcttgatgatataatgacagaactgacaagttttgtacacatcaggcacacaaggcccgatttccacgaactgataaacgagtcaatgaagaatgggagtccagcggactccgtagcaatcgtatgctgcggcccgcccgccttggtcgacgacgtaagaaacaccgtttcccaaacagtcatcgaccaccctggaaggattatcgagtactttgaagaataccagtgctggtaa

SEQ ID NO: 1658 - DNA, 4986 bp, Saccharomyces pastorianus
atgcaacgcacactcaattcaacgaggcctgaccaacgattttggttttacgatgacgtaacccagtacggtagaataaaatatttaaattactatactcccttaatactggcaacatttacggtgttgtttgtaacttataacatatggaaacattattaccattacaatgtactacatttgaaacaaaaaaacccaattgaggaacttttatattcttccaccgacgaagacgaacacagtccgttgataaacaataataccaccacaacgaactacgttgacgttaacactaaaaaagacgagttgaaaaatagacatttctctttggaaaagcttaaatcggttaaattaaacggtgaacctcacggggagcccgagttgattagaagaggttttattgaaaagtcaagaattatcttggaatttcttttggttctttcgcaagttataatacattcttgtatcctattgcactacgtcaacaacaattcggagtttactcagcgaagtactgttaccggtttagtggaatggtgtttattgtttgtcattgtttctttgcgtctagtgaatgtcaatcaaaatttcaaactgataaacaaatatcccgggaatttatggtctgtgtcgtttataaactatttgattctgttctgctctatgattttacccttccgttcaattttcattcatcatatcaatgcttctgtattaagaaagtattacatttcacaaatatcaatcaacttggtacttttcctattgctcttttttgccaaaataagaaacaatttcgccgtcatctacaaaactgatagctggattacgccatctccagaaccagtaacttctattgctggtttcatctgctgggcctggttggacggctttgtttggaaagcgcacaatgtgagtatcaaagtcaaagatatttgggggttaatgatgcaggattattccttctttgttgtgaaaaagttcagatacttcgtcgatcataaggtgaagaggaagcgtattttttccttgaatcttttcttttttttctcgaattatctggtactacaatgcttttgggcgtttttaggcagtgttctatctttcgttccaaccgtcttattaaagagaatattggaatatgttgaagatcaatcatccgctccttcaaacctagcctggttttacgtcaccattatgtttgtaggcagaatcttagtagccgtttgccaagcacaagctttattctttggtagaagagtttgtatcagaatgaaaagtatcattatttctgaaatctacacgaaggctttgagaagaaaaatttctaccaacaagaccaaacctgcagctgaagatccgcaagcaattaatgaccaaaaaagtatcaacggtgatgaagaatccacttcttccgccaatcttggggcaattattaatttgatggctattgacgcttttaaagtctccgaaatttgcggatacttacactcatttttggaggctttcgttatgactattgtagcccttgtattattataccgtctattaggtcttgctgcaatcttgggtgtcttgatcattgtggccatgctcccattaaattacaagctcgccaagtacataggtgatttgcaaaagaagaatttagccgttaccgataaccgtattcaaagattaaacgaagcattccaagccataagaatcatcaaatatttttcatgggaagaaaattttgaaaatgatattaaagctatcagggaaaatgagttgtctttgctattaatgagatccattgtttggtcaattagttcttttgtttggtttgttaccccaactatcgtaacagctgcttcattcgcttactatatttacgttcaaggcgaggtattaactactccagttgctttcaccgcactttctctattcacacttttaagagatccattggaccgtttgtctgatatgttaagttttgtcgtccaatcaaaggtctcattagatagagtccaagatttcttgaacgaaaaggatacagcgaagtacgatcagttgactatagatcctaatgggaaaaggtttgcttttgaaaactccactatttcttgggataaggataatcaggatttcaaattgaaggacttaaacattgaattcaaaaccggtaaactgaatgttgttatcggccctactggttctggtaaaacatctctattgatggcactactgggagaaatgtatctactaaatggtaaggttgttgttcctgctttagacccaaggcaagaattagtcgtggaagcaaatggaacaaccaattctattgcttactgttcacaagctgcctggttgctaaatgatactgtaaaaagcaacattctattcaatagtcaatttaatgagacaagatataaagccgttattgaagcatgtggattgaagcgtgacttcgaaattttgaaagctggtgatttgacagaaattggtgagaaaggtattactctatctggtggtcaaaagcaaagagtttctcttgccagagccttgtattccaacgcaagacatgttcttttggatgattgcttaagtgcagttgattctcacactgcttcatggatttacgataattgtattactggcccactaatggaagatagaacatgtattttggtttctcacaacattgcattgacacttagaaatgccgagctagttgtattactggaagacggtagagttaaagaccaaggtgacccaatagacatgttacagaaaggtctattcggcgaagacgagttagtaaaaagcagtattttatcgcgagcaaattcttccgctaatttagccgcaaaaagtagcaccagcttaaataacctcccagttgcgaaagaactaccaattagcatgaataacaactccccattatttgaagtatcaaatcttcaaaaacctttgagaacagaagccgaacgtgcagaagatggcaaattaattgaagaagaaacaaaggaagagggtgtagttagtatggacgtctataaatggtatttgaaaatttttggtggctggaagatcgttacgtttttagcttccttattcttagtctcccaacttttgtatatcggacagtcatggtgggtccgtgcctgggcatcccacaatgttattgctaagattgttcctatggctcaacgcgctatcgcctttatctccaaggatgccagccatctgctagactggagaggctcatttcaggtaggcataatgtcaaatggaagcgagcccactggtaaacactctacaatgtattatctcattttgtatttgatcattggtttagcccaatcgttattgggagccggtaagactattctaaattttgttgctggtatcaatgcatcaagaaaaattttcaacatgatactaaacaaggtgttacattcaaaattaaggtttttcgatgctaccccaactggtagaattatgaacagattttccaaggatatcgaggctgttgatcaagaattgacaccttatatccaaggtgccttctattcgcttattgaatgtctgtctacagtcatattaatcacatttatcactccacaattcttgtctgttgcgattgttgtctcaataatgtattactttattgggtacttttacatggcaggctctcgtgaattgaagaggtatgaggctatctctagatcacccatttatcaacacttctcagaaactcttgttggtgtcacaacaattcgtgcattcggtgatgaaggaagatttatgcaagagaacttacaaaaaattgatgaaaacaacaaaccgttcttttatttgtgggtcgctaatcgttggttggccttcagaatagatatgattgggtctttggtcatctttggcgctgggttgtttatattattcaatatcgatcatctagactctggtatggctggtatatcgctgacatatgcaatctcctttactgaaggtgccttatggttagtgagactgtattctgaagtagaaatgaatatgaactccgttgaaagagtaaaagagtatatggaaattgagcaagaaccatacaatcaacacaaagaagtgccaccaccacaatggccacaagacggtaaaatcgaagtcaatgatctgtcgttacgttatgcaccaaacttacctagagtgattaaaaatgtttcattttctgttgacgcccagtctaaggttggtattgttggcagaacaggtgctggtaaatccacaatcattacggctttgtttagattcctggaacctgacacgggccatattaagatcgataatatcgatatatctggtgttgatttgcaaagattgcgtcgttctataactattattccacaagatccaactttgttttcagggacaatcaagtccaatttagatccatataatgaattcagtgaccaaaagatctttgaggctctaaaacgtgttaatctagtcagcgaagaacaattacaacagggaaccgaaagagaggtgaccaatgatacctcatcagccgactcagaaaatgttaataaatttttggatttggaaagtgaggttagtgaaggtgggtccaacttgtcacaaggacaacgtcaattgatgtgtcttgcgagatctttgctaagaagtccaaagatcatcttactagatgaggctacagcttccattgattatagttcagacgcaaagattcaagaaaccataaggaaggagttccaaggaagcacaatattaactatcgcacatagactaagatctgtcattgattatgacaagatcttggttatggacgctggtgaagttaaagaatatgatcatccatattcgttattgctaaataaacaaagtattttttacagtatgtgtgaacatagtggagaactggagattttagtggaatcagctaaaaaggcctttgtagagaaactgaactctaagaaagactga

SEQ ID NO: 1659 - DNA, 771 bp, Saccharomyces pastorianus
atggctccaggtaagaaagttgctccagctccattcggtgctaagtccaccaagtctaacaagaccagaaacccattgactcactccaccccaaagaactttggtattggtcaagccgtccaaccaaagagaaacttgtctagatacgtcaaatggccagaatatgtcagactacaaagacaaaagaagatcttgtctatcagattaaaggttcctccaaccattgctcaattccaatacactttggacagaaacaccgctgctgaaaccttcaagttgttcaacaagtacagaccagaaactgctgctgaaaagaaggaaagattgaccaaggaagctgccgccattgctgaaggtaaatccaagcaagacgcttctccaaagccattcgccatcaagtacggtttgaaccacgttgtctctttgatcgaaaacaagaagaccaagttggttttgatcgctaacgatgtcgacccaattgaattggtcgttttcttaccagctttgtgtaagaagatgggtgttccatacgctatcgtaaagggtaaggccagattaggtactttggttaaccaaaagacctccgccgtcgctgctttgactgaagtcagagccgaagacgaagctgctttggctaagttggtttccaccatcgatgctaacttcgctgacaaatacgacgaagtcaagaagcactggggtggtggtgtccttggtaacaaggctcaagccaagatggacaagaagaccaagacttctagttccgcttaa

SEQ ID NO: 1660 - DNA, 1986 bp, Saccharomyces pastorianus
atgagtaatcctcaaaaggccttaaacgattttctgtccaatgaatcagtccacactcatgagagttctagaaaacaatctcataatagacgctcatcggacgaaggacgttcttcctcacaaccctcacatcatcattccaacggtcacaataataatggtagccctggtaacggtaatgatggggacaacgatgatggttatgactatgagatgcaagattatagaccgtcgcaacaaagcgcgcttcccacacctacatacgtcccacagtattctgtaggaagtgggccctctttcccgatccaggaggtcgttcctaacgcgtacataaacacacaagacacgaaccataaagataacggtccgccaagtgcaagtagtaatagagcattcagaccaagaggccaaaccaccgtatcagcgaacgtacttaacgtcgaggatttttataagaatggagatgacgcgtatactataccagagtcgcatctgtcgagaagaaggagcagatcaagggctgagagcaacactggtcacagcgccactacgggcgctacaaatgcaaggactactggcgctcaaaccaatatggaaaataacgagccgccacgtagcgttcctattatggtgaagccaaaaacgctgtaccagaatcctcaaactccaacagttttgccttccacgtaccatccgatcaacaaatggtcttcggtgaaaaacacttacttgaaggaatttctggctgaatttatgggaacaatggttatgattattttcggtagtgccgtcgtatgtcaagtcaatgttgcgggcaaaatacagcaagacaacttcaattcagctctggataatattaaagtcaccgattcctccgcagaaacgatagaaactatgaagagtctaacttcgctagtatcttctgttgcaggcggtacgtttgacgatgtggcactgggttgggctgctgccgtcgtgatgggatatttctgtgctggtggtagtgctatctccggtgctcatttgaatccatctattacattggcaaatctggtatatagaggtttccccctaaagaaggtgccctattattttgctggacaactgatcggggcctttacgggtgctttgattttgtttatttggtataaaagagtgctacaagaggcatacggcgatatatggataagcgaaagtgttgcgggaatgttttgtgtttttccaaagccttatttaagttcaggaagacaatttttttccgaatttctatgtggggctatgttgcaagctggtacatttgcgttgaccgatccttatacatgtttgtcatccgatgttttcccgttaatgatgttcattctgatttttgtcataaatgcctccatggcctatcaaacgggtacagcaatgaatttggctcgtgacttaggcccacgtctcgccttgtacgctgttggatttgaccatagaatgctttggatacaccaccatcatttcttttgggtacctatggtaggtccatttcttggtgcattaatgggcgggctggtttatgatgtttgtatttatcagggtcatgaatctccagtcaattggtctttaccagtctataaggaaatgataatgagagcttggttcagaagacccggttggaaaaagagaaacagagctagaagaacatcggacttgagtgatttctcctacaacaacgatgacgatgacgatgagttcggtgaaagaatggctcttcaaaagacaaaaactaagtcatccatttcagacaacgaaaatgaagctggtgaaaagaaagtccaatttaagtctgttcagcgtggtaaaagaacgttcggaggtataccaaccattcttgaagaagaggattctatcgaaacagcttcactaggtgcgactaccacagattccatgggattgtctgatatatcttcagaagattctcatttcgggaatttaaagaaagtaacgtag

SEQ ID NO: 1661 - DNA, 798 bp, Saccharomyces pastorianus
atgttgaacgtgctattgaggaagaacgcctttggtctagtgggtagaaaagggctggcaaccgccgctgccgctgccaagcatacccctagaatgaagaccttcaaagtttacaggtggaatccggatgagcccagtgctaaacctcgcttacaggcttatcaagtggatttgaacgattgtgggcctatggtattggatgcgttgctgaagatcaaagacgaacaagatgctaccctaacctttagaaggtcatgtagagaaggtatttgtggttcatgtgccatgaacattggtggtagaaatactttggcttgtatatgtaagatcgatcagaacgaatccaaacaactaaagatttaccccttgcctcatatgttcattgtcaaggatttggtgcctgatttgactaatttttatcagcaatacaaatctattcagccttacttgcagagaacatcgtatccaaaggacggaacagaagtgctgcagagtattccggaccgcaagaaattagacggtctttatgaatgtattttgtgtgcatgttgttctacttcatgtccatcttactggtggaaccaggagcagtatttggggcccgccgttctaatgcaagcttatcgttggctcattgactcgagagaccaagctacaaaggcaaggaaagccatgctgaacaactccatgtctttatacagatgtcacaccattatgaactgtaccaaaacctgcccaaagggtttgaatcctggtttggctattgctgaaattaagaaatctttggcgtttgcctag

SEQ ID NO: 1662 - DNA, 9426 bp, Saccharomyces pastorianus
atgttagagtctttagctgccaacttgctaaaccgattactaggctcatatgtggagaatttcgaccctgcccaattaaacgttggaatatggagtggtgacgtgaaactaaaaaacctgaaactgagaaaggactgtctggactcgttagatttgcccgtagatgtgaaatctggtatattgggtgatctggtattaacggtaccatggtcaagcttgaagaacaagcctgtgaaaattatcatcgaagactgttatttgctatgttcaccacgctcagatgatcacgaaaacgatgaagaaatggtaatgagagcattccgtttgaaaatgaggaagctggcggaatgggaattgactaaccaggcccgcatattcagcaatcaatcagaaacttctaacaaggcatcttctgaaaagatgaatgctgggttcatgcagtctttgactacaaagattatagacaatttacaagttaccataaagaacatccatttaagatacgaagacatggatggaatttttaccacgggtccatcctctgttgggctgacgctgaatgaattatcggcagtgtccacagattcaaactggacgccaagtttcatcgagattactcagaatattacccacaaactattaactttgaactcgctttgtttgtattggaatacagattccccgcccttaattgccgatgatgatcaagatacgagcttagacaacttcgtgtccagtttcaaaagtatgatttcatccgacaattcaaccctacccatgcaccaatacgttctgaaaccagtcagcggggtgggaaaattgagcatcaacaagcttggatccaccgaggaacagccccatatcgatttacaaatgttttacgatgaattcggtatagagctagacgatacggaatataatgatatcctgcatgtcttgtccagcatacaattgaggcaaataaccaaaaaatttaaaaaagttagaccatccttcaccgctactgaggatccgatagcatggtttaaatatatcgcatcatgtgttgttaacgaaattcatgaaaaaaataaaatgtggacttgggaaagtatgaaagaaaaatgtgaccaacggagactgtatacacaactatgggttgagaaactgaaattaaaaagtttagagactccgttacgtgaccaaaatcaagaggcccaactgactgaattgcataaagatctaacgtatgatgagatcgttctctttagatctgtcgccaagaggcagtatgcgcaatttaaactgggcatgagtgaggactcgccaactcccactgctagctcccaaactgaacctcaatcttcaaacaagtctgcggtaaagggaaatggcggctggctttcttcatggtggaacggcaaacccactgatgaagtggacgaagatttaataatgaccgaagaacaacgtcaagaactttacgatgccattgagtttaacgaaaacgaagataaaggccctatcctacagcttcctagagatagagtcgaacttcgtgtgacaggcctactgagaaagggttcatttactatacggaagaagaagcaaaatctaaagttgggttccattgttttcgaaaattgtaaagtggatttcgcgcaaaggcctgattcatttttagcaagcttccagttgaacaagtttggtttagaagatggctcacctaacgcgttgtacaagcacattatcagcgttagaggcacatctgaggatcaaccacaaactgaggaccatgccattgaaggaaaagaggaggagcctttattacttgccgcatttgaatggaacccgttgaatggattagctgattcgaggctcaacatcaaattattggggatgactgtgttttatcacgttcattttattacagaagttcacaagttcttcaaggcctctaatcaacacatggaaacacttggtaatattgttaatgctgctgaggccacggtagaaggttggactacacagacaagaatgggtatagaatcgttgttggaagaccacaaaacaatagacgtgactttggacttgcaggcaccattgatcatactaccattagacccacataattgggacactccttgcgcaatcattgatgccggtcatatttccataactagtgatttagtaccaaaggagaaaataaaggaaataaaacaattatcaccggaggaatatgacaagattgacggaaatgaaataaacaggttaatgttcgataggttccaactcttatcgcacaatacccagatttttgttggccctgacattcaatcgactataggtaagatcaacacaccctcatctacaaacgatttcagaattttggataaaatgaaattagaattaaccatggatatatcaatcttgcccaaagcctataaactacctacgataagagtatttggacatttacctcggttaagcctttccataaatgacattcaatacaaaaccattatgaacttgatcgccaattccatcccatcaatgattgatgctgagcaagaaaacaatgactataccaattactcttttactggttccgaacaagaaactaagaagcaaattcaatcacaactaaaaagtaccttgaaactattgtcaaatatgcaaccactacaaatccaacagaaatttatggaaatacacttcgatattgatcaagccaagatatcgttctttcagtgcattaagaatgactccagagacagtgaaaaactgattgatatcttatgccagaaattgaatttcaactttgataagagggctaaggaaatgaatcttgatttgagagtgcattcattagatgtcgaagattttatcgagcaaactgataataaagattttaaaaacctgatatcatctagtactgagaaggtggcaagaacccccaaagatttgtttacattaaagtacaaaagagcccagagaatagtgactcatgatgatactttgattgaattatttgatcaagatattgtcatgcatatgagtgaattacaaatggtattaacacctaaatccgttttgacgttgatgaattatgcaatgctgacattcacagatccaaatgctccagagatgccagctgatgccttaagacataataaagaagacagagaagacgcaccacaaaagattaatatgaaaatcaaaatggaggccgttaacgtgattctaaatgatgactcggtaaagatagctactctagttttatcagcaggtgaacttatgatggttttattaccggaaaaatacaacattaacttgaaattaggcggactagagttgactgatgaaaccaacgaatcattttctagcgattcggtgttcagaaaagtaattcacatgaaagatgaagagctggtcgaactgacctacgaatcatttgatccagctactaacaccaaagattatgattcatccttaaaatattctactggttctatgcacattaattttatcgaaagtgctgtaaatagaatagtcaacttccttaccaaatttcaaaaatccaaagtttcctttgatagagctcgtcttgctgcatacaaccaagctccctccatcgatgccgtaaacaatatgaagatggatatcgtaatcaaggcacctatcattcaatttccaaagttggtaggcacacacgagagcgaatatgatactatgagattttacttgggtgaattttttattcaaaatgtgttttccgtgatcgatgactctcataaaataaatcatatcaaactgggtgtccgagaaggtcaattatcatctgatttgttttttgatggttcaagtcaaaaactacatttggtagaaaacataggtttactattcaatatcgaccgggatccactgccacaagatgatactcctgagcttaaagtaacgagtaatttcgattcatttgcattggacttaacagaaaatcagctggcttacctgctggagatctccagtaaagtttcgtctgccttcaacatcgcagaggaggaccccagcacatcaacaggaaaagacgctgataaaagtccatctcctgatccagtaacctccagtaacgaaagtgaacgcgcggttactactcaatctttacaagaatcaggtaatagtaatataaagaatcctgaccaaaaatacctagatttctctttcaaggcccctaagatcgcactcactgtttataataagacaaaaggtgttacttctttggatgattgtggactaacaagaattatataccaagacatcgggtgtaatcttggtctcaagaatgatggcacaatcgatggccaggctcatgttgcagctttcagaatagaagatattcgtaatataaaagataacaagcacacagaattgataccaaagagtaggaataaggaatatcaattcgtagcaaacattagcagaaaaaatttggaatccgggcgtctgctgaacatttccatgacgatggacagtccaaaaatgattttggcaatggattatctgctttctcttaaggaattctttgacgcgatcgtgtctaacaaatctgagagtagttcatattacccagaaactgcaaatcaaaagactgaaaataaagcagttgttcaaaatgtagaagaaagtggtgatgcaaccaaaattcaatattctattaacgtcattgaaacagctcttattctacttgctgatccatgcaacataaataccgaagctatatccttcaaaattggacagtttttggtaacggaccaaaatataatgactgtagcagcaaataacgttggtatctttctgttcaaaatgaattcatctgaagaaaaattgagactgttggatgatttctcatcttcgttaaccatcgataaaagaaattcaactcctcaaactttattaacaaatatacagctttctgttcagccattgttgatgcgtatctcgctcagggatatccgtctagccatggtaatatttaagagagtcacgaccctgctaaataagatgaaagaacagaaaaatgatgaagaggaagaggaggtaaccgagaagattcaattctctcgtgaatttgaaaggaaactagcagtcttggatccaagtattttgggcgagcgtagtcagcccagccaaatcaccgaatccaaatccatcggagagcctactacaattttgaaaaacgaaatgtttaatgccgatttgggcggtttgagacttatcttgattggtgacgtccatgaaatgccaatattagacatgaatataaatgaagttactgcttccgcaaaggattggtctactgattttgaagcccttgcttctttagaaacctacgttaatatattcaactattcaagatctagctgggagccacttttggagatgatcccagtaacattccatttatcaaagggtcattctgaaatggatcctgcgttctctttcgacattttgactcaaagagttgcagaaattacactttcagccaaatcaatcgcaatgctttctcatatccctgcgtcattaacagaagagttgccgttagcctccagggtatcccagaagccatatgaattggtgaacgatacagaattagattttgatgtgtggatagaggacaaaacgtcagaggttaaaaacaatctcgtggttttgaaggcaaacacctcgttgccttgggaatttgaagattggagaagtattagagagaaactagacactgataaatcgaaaaatgttttaggggtttgtgtttccggacaagaatataaaactgtaatgaacatcgatgctacaacagaaggagaaaaattacacgttttaagcccaccaaggaataacgtacataacagaattgtttgtgaggctaaatgtgatgaaaataacgtgaaaatcattacatttagatcaaccttacttttggaaaacacaactttgactggaattgaacttttagtggaactcaaagattcagataaacaatctttgatttatgttattaatccccatgagagcaaatccgttcctgttgaatatgcctataattccgctattagaattagaccaacatcagagggttcatatgattggtcgcaacagacactgtcttggaaagacttgttaagcaaccaaatgtctattttctgtctttcaaaggaagaacctgacaaaaggtttcatttcgaagttggcgcaaagtacgatgaaagggaaccgttggctaaaatatttcctcatatgaagatagtagtttctgcctctttgatcattgaaaacttactcccagcagacatcaatttttctattttcgataaaagagaggaaaagagaacagattttttgaagactggaaaaaccatggaaatacatcatatttctttagacagttttctcctgatgtctgtccaaccactgcaagatggtgcttcagcttcaaaaccctctattgttaatacaccacacaagagtccattaagcccagaagagtcgttatccttgactctatccggaggccagaatttgcttctaaaattagactataagaatattgatggaacaaggtcaaaggtcataagaatatactctccttatatcattatgaatgctactgatagagaactataccttcaaagtagtattacaaatattgctcagtctaagattttgcttgaaaacgaaaaacggtatactattccgaaaatgttctcatttgacaaagagaacgataaaagcaatagagctcgtgtcagattcaaggagtcggagtggagttcgaagttatcattcgatgccataggtcaatcgtttgacgcatcagttagtataaaaaacaaggagcaagaatccaatttgggtattaatattagcgaaggtaaagggaaatatttgctaagtaaagttattgagattgcaccaagatatattattagcaatactttaagtatccctattgaagtttgtgaaacaggatccacagacattcaacaaattgaaccaagcataaccaaacctctgtataggatgagaaacgttgttgataagcaattagtggtcaaattcttgggtggagactccgattggtcgcagcccttctttatcaagaatgtcggtgtgacttatttaaaagttttgaaaaatgcaagtcacaagcttctaaaaattgaaattcttttggagaaggcgacaatattcataaaaattaaagatggcagtgacagatggccattttccataaggaattttagtgatcatgactttattttttaccaaagagatccacaaaaggttagtgatccatacaaggatgacagatctatcgagccatcaaaccggaatttcaagccaatattttacagaataccatcgaaaagtataatgccttatgcgtgggacttcccaacagctaaggagaaatatctagtgatagaatcaggcacacgtacaagagaagttcgactagccgaaatcggtgaactgccaccattgcgcctagacagaaggtcaagagataatccagctcctattgttggtttacatgttgttgctgatgatgacatgcaagctttagttattgttaactacaagaccaatatcgggttatataaattgaaaactgcagctgcggctagcaattcttcggcttcggtaaatagttcagcaaccgacggatttgtgcaaaaggatgaggacgaaaaggtaagcacacaagtggttgtttcgttcaaaggtgtcggaatatcattaattaacggccatttacaggaactactgtatgtaaacatgagaggaattgaagtgagatataatgaatctaaagcgtatcaatcattcagttggaagttgaagtggatgcaaattgataaccagctattttcagggaattattcaaatattttatatccaactgaaatcccttactcggaaaaggaaattgaaaatcatcctgtggtgtcaggttcgatttctaaagttaatgattcattgcaagctgttccttactttaagcacgtcactttgctgattcaagaattttccatacaattagatgaggatatgttgtacgctatgatggatttcatcaaattcccagggtccccatggattatggattcaaaggcgtataaatacgatgaagagattcagctacctgatgtttccgaactgaaggctgctggcgatatttattttgagatcttccatattcaaccaaccgtcttgcacctctcctttatacgatctgatgaaattagcccaggcttggctgaagaaactgaagagtcattttcgtcatcattatactacgtccatatgtttgctatgacactgggtaatgttaatgacgcacctgtcaaggtgaactctttgttcatggataatgtaagagtcccactgccaatattaatggaccatattgagagacactatactacccaatttgtgtaccaaattcataagatcctgggatctgcggattgttttggtaacccagtcggtctctttaacaccattagttctggggtttgggatttattctatgaaccataccaaggttacatgatgaatgatagacctcaagagattggtatacatttagcgaaaggtggactaagctttgccaagaagaccgtttttggtctttccgatagtatgtccaaatttacagggtcgatggcgaaaggtttatccgtgacacaagatctaaaatttcaaaaggttagaagattgcaacaaagagttaatagaaataacagaaaccccttggccaactcagctcagtcatttgctagtaccctaggaagtggtttaagtggcatagcgttagatccatacaaatccatgcaaaaggaaggtgccgtcgggttcttcaaaggtctcggtaaaggtatgatcggactgccaactaagacagccattggattcctggatctcacaagtaatctaagtcaaggtgtgaaaagcacgaccacagtgcttgacatgcaaaagggcagcagagtgcgtttaccaaggtacgtagatcacgaccagatcatcaaatcatatgatctacgggaggctcaaggacaatactggctcaagactgttaacggaggaatatttatgaaagatgaatacctgtcacacgtcatcttgcccggcaaagaactggcggtaattgtatctatgcaacacatagccgaggtacaaatggccacgcaagaactgatgtggagcacgggctattcgtccatccagggaattactttggaaagatccggcctccagatcaaactcaagtcccaatccgaatacttcatccctatcagtgaccctatggaacgccggtctctgtacagaaatattgctattgccgtcagagagtacaataagtactgtgaatccatattgtga

SEQ ID NO: 1663 - DNA, 1146 bp, Saccharomyces pastorianus
atgcagattttcgtcaagactttgactggtaagaccattactttggaggtcgagtcctccgacacgatcgacaacgtcaagtccaagattcaagacaaggaaggtattcctccagaccaacaaagactgatttttgctggtaagcaactggaggatggtagaactttgtcagactataacatccaaaaggagtctactcttcacttggtcttgagactgagaggtggtatgcaaatcttcgtcaagacactgactggtaagaccataaccttagaggtcgagtcttctgacaccatcgacaacgtcaagtccaagattcaagacaaggaaggtattcctccggatcaacagaggttgatttttgctggtaaacagctggaagacggcagaacgctgtctgattacaacatccaaaaggagtccactctgcacttggtcttgagactgagaggtggtatgcaaatcttcgtcaagacactgactggtaagaccataaccttagaggtcgagtcttctgacaccatcgacaacgtcaagtccaagattcaagacaaggaaggtattcctccagaccaacaaagactgatttttgctggtaagcaactggaggatggtagaactttgtcagactataacatccaaaaggagtctactcttcacttggtcttgagactgagaggtggtatgcaaatcttcgtcaagacactgactggtaagaccataaccttagaggtcgagtcttctgacaccatcgacaacgtcaagtccaagattcaagacaaggaaggtattcctccagaccaacaaagactgatttttgctggtaagcaactggaggatggtagaactttgtcagactataacatccaaaaggagtctactcttcacttggtcttgagactgagaggtggtatgcagattttcgtcaagactttaaccggtaagaccattactttggaggtcgagtcctccgacacgatcgacaatgtaaagagtaagatacaggataaagagggcattcctccggaccaacagaggttgatttttgccggtaagcaactggaagacggcagaactttgtcggactataacattcaaaaggagtccactctgcacttggtcctaagactaagaggtggcaattaa

SEQ ID NO: 1664 - DNA, 744 bp, Saccharomyces pastorianus
atgccgttgtttgaatcgttcaaaagtttcatccagtcgccgacggaatcgaaggtgaaacaggcaaccagcgaggacgagacaagtggtgccaccgggacgttgatgaacgagatatcgattttgacgtacagtcccaagacggtacgggagatcatccagatcatccgaaagcggctgttacttgggcagaacaggaggaactcacaccgcagctgtatccaggtgatgaagacactgacgctggtgtcgtacttgatgaacaacggatccaacgagttcatcaagtggcttaagggcaatatgatactgattgaaattttggaggactttcaggtccaggatacccgggacgaccgcaatggcgaggagatacgcaagctgagtaggaatctgcacgaattactgcaagacgacgagctgctggagagacagcgaaaggacgtgatccaattccggtcgagcatatcgacgccaggaaggaagtccacggacaatagccatctgaagctggaggagatgagaaatgagctcgctcgacagagcttggaaaagaaagccaagcccgctcccaccagcaccagtctggacttccagagacaacgcactaagaacacacacgaatacgctcgattttcattagtgcctctggcggaagaggacagtgaagactctcctagtgcagctggcggcacaagcagactatcgtttaggcccaagtcctcaaacaacccattcagatga

SEQ ID NO: 1665 - DNA, 1893 bp, Saccharomyces pastorianus
atggtaacagattccaaacaagatttgcctcagtatagcaaagactcagactcagattcagactctagcagtagctctaacttaagcgctgtgttcactttatcttcgaagagcgcgactgtagttctcaacagtgaagaatatgacgacgatgacgatgacgatgtgaacggattagataatgaattggccgacaacataacttatgtgggagacgaagatgaaaccatgcttgtaggtttgaaagaaaggcagaaactgcatctatctggcgcttttcgtttgcaaatagtgaaaggtggcatcgtctataacaatgtacactacaatgcctcgagagaaatcttgcacttctggcacccattatcacaatctataccgactatagatttttcacatttcgctggttggcaagatacgatatttttgcccagaaacaatagatttaatatcaaaaatgatgaattgaaatcattcccgtgtgttcttcgcgtcttcaattcaagccagacaggactgtcagaagctggtcgtctataccgtgatgttaattatctctggaagcccaaggaaccgtgtttcccattaaacgaaagggctacgtatcatctattacacgaatcagatgaggttcagtctttatctataccgagatattggtcggcccctttagaaaagttatatttgaatcataagaatgctacgtatgacacaagaatcatggtacttggtggtaaaaactctgggaaatccacttttttgaggcttttgctagaaaaatttacgcaggatatacgggcttccacgacagatcaggatgaattggtgtatctggacttagacccaggtcaacctgaatattcattgcctgattcaatttctttgaataagctgattccaaagccaattactctcggacaacatctttgtcagggttctaacttccaaactttattgcagttttacattgggtcctcttctcctcaagacgaacctgcatcatatttgaactccgttgataaacttatagattatttggaggaacaagccttttttggaacatccttgcttaacttgcctgggtggattaagggatttgggatgcagatcttgaatcacattataaagaaatacaagccgactcatttagtctttttggagacagcaaactcaaaaaggcatctggacgaactaactattccgcaaagtttttctacatcgttacgggacacatacctgcctgaagttgttcgcataccggcccataatttaaatcacgcttcacctgctaggttccatgcatcacaactacgaactttcaaagtattagcattatttcataaactgactcaattagattacgattttgctccgcttttgaaatcggctcctttacagatttcatacggtggagataaacgtggtatccaaggcatccggtttcccatggaattccaaaatttaaatcctgaagatatcagatctttactggaaggcgcagtagttgggatacacacacatttagaaggagacccgttagttgtaaagaaattggacaccttccccattttacaatccagcactccttctcgtaagagcttcgtaaccctaggactgatacattctattgacacattgcaacaaataatgaatatttatgtgcctccttgccataaaaaaaatttggatgaacagcctgaagatttcaaatggataatcgtaagaaacaagacagaaacgcccttctgtgacttgcttccatcgcatcgcgctataacttgggaccctagtatacaaataccgtttgcaacatttgaaagaaggaagaaattagaacatgtctggaaggttcgtaaaaatgtgatgagacgtgggcaattcatgaaaaggtag

SEQ ID NO: 1666 - DNA, 2499 bp, Saccharomyces pastorianus
atggatgactttacaatttatagtactatttctacaactgcttttttacaggttccacatttatacaccacaaacagattgtggaagcccattgaatcaccgtttttactcgaacttgtccaaaacaatgtgaattccaaagaaattgtaaacagaaaggcgatttgccacgtagaaccatcgtggataaatttaggtggcacatttgttaacgatgacatgatctcaataaaggctactagtagcaatatggaacgcaataccattagtcgagtttccttaccctttcccatgcatggggatgaccccgcggtagaattggaaaagatgaaacgtgtactagcagatctaagtgaaaaatttaatttggaactaatcgttactaatgaaccggcttatttggcatcaaagccaaccagcgaaaacaatgagtcatggctttacttacatgcactaggattggagtccaatttaatggaatgcgaaccccagttattggcatttttggatttgataaagaagaacgggatgactttgcctccacaacactacatcgtcgagccaatggaattggactcttattcaattatccccttatacatgggagtagatatggctaatttcaaatatatatcgaacgttttcaaaaccagtatttacgctcctgcccttatgactttgtccgcggattttagggcaaatccacagatatttttctctggaaccatccattcgttaactttattagccaagaaaaccttacaagagtccgtcgactttggttcaaagaagtttttttatcgcagattgacgaatattactccaggaaaattactattcattcaaaaatatcgccaacaaaaaataaaccagttaattttgaaataccaatcgctgattagggtcactaatgaacacattgaatttcaatcgatttctacaaaccttttagagatggtaataaaaaattttaccatccatgtcctacatgagattgtagaagtgcaaatttccctcaatgaaaactgcgaagtttcttcaaaagtaataattgataatatttttagcaacccagaaagcgaagtcatagtagttactccaggaaaagaatcgtttaatcaattaatgattgtcggcaatcaattctcgactaacaaagcatctgataattccataatacattatttatcccattttataactggcccaaataaaatcattaattcgaatctaagacaaattaaagccatttttgaaattcatccagattttgaggacttcatatcgggtaaaaaaaatggtaagctgacacgtataatggaactatccgcttgcttgatccaattggaaatggaagaagaggatgataatctctacctaaatttggttagtgattgtttctccgatttcacaaaatcgttcaaagatgtcatgaatgaatttcctgctgaagaatcatttttcattccagaagtttaccatagacctattataggcacaggtgggtcattgattcaagctacaatgaggaaacacaacgtctttatccaattttccaatagtttcaattttccacaaaacaaaatctctatggttagatatgacaatgtaataatcagatgccccaggaaaaacaaagcaaatatttgcttagctaagagggagttgaaagatattgtccaagagtacaataacttacaatcgagaacgcctattaggttctctaatgggcagtatagacatgtcttgaacgtcaatggcgaaaaaaatattataggccaaattgaaaagaatgagaatgtttatatcgtgatacccttggaagaacctttagatgggaatgtgcaactatccgtaagaggtaatgatgagaatacagtaaaggctgctaatgaattggtgaatggcgcgtttggtcatgaatacgaacttagaatagataaacctatagatgctcgcaaggagtatgagttctataatctgatcgttgttccttttctgcaaactatgaatataattgccacttttgagaaagaccttatcactttcactattgaaaaggatacaagtgaaaacactctaactaaagcaaccgaattgctatctgattacatgggaacacaaaagaggaaaataatattcaagaaactgatcaaagattttgttttaccgcccacaaccaacaagagtaatgctaaccacaatgctactaatggtaattcgaaaccaatgcatagttccaaaaatcgtaacgcgaccatcgataatatcaactctttgggaagtccaccacaacgtcaaacaaacagcctcaactacaaaatgccaggcgtgacaccagcagagggagctcgggccatcaagggatacatacctaatacttattacaacggacttggttacggctatggttatacgtatgagtacgatcgtaattatacgagtttcaatcaaactcaagccaaccacaggcaaaactatcaaaatggtagaaaatga

SEQ ID NO: 1667 - DNA, 3054 bp, Saccharomyces pastorianus
atggatgaaaagtcaataaagcagtcaatactttcatcttccaatgatgaaaaaattatatacaaatcacgaataaagaaatttcagaaaaatcataaattctatattattttgttgattttcattgcaatcttacaatttatatcaatagcttttttcacgcgcgggttcttactgtcaagacacgttctggataacatatccgcccaaaacgaaacgaccgccttacagccaaggttcaacaaaaccgtggttctggtcattgatgctttgagatttgattttgttatccctgttaatgaatccagttcgacccacaacctgaactaccacaataacatattatcactatatgactcttttgcaaacgatgaggatacatcttctttactgttaaaattcattgcagaccctccaactaccactttgcaaagacttaagggtctaacgacaggttcactgcccactttcatagatgccggatcgaactttgatggaactgtcattgaagaagacaatttgctcaagcagctctacttggcaaacaagacggtcaagtttgctggagacgatacctggatggccctgttccatccattcttgtctaacgatagttttccgctggaatcacttaatgtttgggatttggatagtgttgataaaggtgttatggattactttcatgatcacttacagcaagatcaagaatgggatgtaatgatcgggcacatgctgggtattgatcatgtaggccacaaatatgggccagatcatttcaccatgaaggaaaagcaagtgcaagtggatcagttcatcgattggatactaaaatctattgatgaaaacaccctgctggttattctcggagaccatggtatggatcatacaggcaatcatggaggcgactccattgatgagttggaaagcactttgtttctctattcaaagaagccaaatctatggaaactcaaagactcttccaattacgacattagtgctttgggacacgattaccgctctgttagacagatcgatttagtgtccagtttatctttattactcggtcaacctattccatttaataatcttggatggccaattgatgaaattgcaagaaacgataacgaatggtccgagtttgtccgcctagctataaaccagttacaactatacaaggatacgatgcaaattcatgattccaatgacgagatactaaagccattagcagaaaatatactaaacacttctcctaaaactaatccgaaaaaattcattaaattggggcacaaatatcaaaaagtatttttacaaacctgcgaagaattgtgggcaaagtttgattattattcaattgccaccggtataatattactcaccatctctttaattctattgatatccatcacaaaattaatcccttctattgtcgtgaatcaaatggttccagaatttgtcccaggtattatcattatggtcttggtcacaaacttgtgttttcatggaatcttttatgtttaccaacaaccgacttttgtagatcagttttggggtactctgttagcgactgccgttggcatcattattggttgttatataacaatcttcgataggtataacttcatttggatcgctatgagacttggcgaaacattggctgattattggtcaagaatagctgtcatgtttatgattatacatgctttactttttacttccaattcctttacagtgtgggaagatagaattgtggcctttcttttgtccacttttggtatgctaacactatatgaatttgtgttcttaccaaaaagacaatctaccacggcattattaaccgcgacaattagtgaaaaggagggaactacttcaggtgtgaattcttcaacggcaaattcaaattatttaccactaacaagatttgcaagattattaggtggttaccattcagcagttttaatcatttttaccagattagcttctacaatcaccatttgtagagaagaacaaggtgaatattgtatcccaactttcaataatcaaaataattccgcttggtgggtattgggtctctgcttcctgatgatttttatcttgccggcatgtatcactggttattacaatctaacatcatcgtaccaggctgcagctccgatttggataaacgttttcctgaaaggtatccttggtttgaatttcgtttattggtcactgacttcattagaaaataacaatgcgacaattacactaccgtttttaaataatattacaattttcaagttcactttggctagaatcattgctggattttcgttgatcgcctccaacgtgggttggctaatggggccactctgtattaaattaaatgttcacaatactgacgtcaaatctcatgaagctacaattttgggttataccaatatttacggttcggagtttttcctcttagtcataaatgttttgatgagtatcctattcttcaataaacctctggctcaattatcatacttcctcatgtgtaaccaactattatcgattttagagattattgatcttttgaaattgaaagaaaacataattggtccaattgccttagggctcttatcataccaacactttttcaccacaggtcatcaagcaacgattccatcagtgcaatgggatattggatttatgctttctgaaaaaatcacgttccccttcacccatatagccatcatcctgaacacttttggacctcaaattctcgtttctttatctgtagcattactaacgctttggtcacagcctccagatgtcttaaagccacaaacgcttttggggaggattgtttcaaactgtggtatactactcacgtacaacaccattttgtgtttgagttcatttatctgggttactcacttccgtaggcatttgatggtttggaagatcttttgcccaagatttatcttcgctgctttgagtttaatagtcactcaactggtggtcacattcggcaccattgcatttgctagtgggagattgattaaacatatcaatgacattttctggaaatga

SEQ ID NO: 1668 - DNA, 2250 bp, Saccharomyces pastorianus
atgacttcaaaaccatccactagtgaagctagggctcactcagtatcccatgtatcgagcacgggtatgaagggatcatcgacatccaacagttctagaccatttagaccatgtgcggactgtacgtgttcgcccggtctgctgtccaggcaaggacgtagagcctctctattcctaaggaagctggaaaattcaaggaggtcgtccagcatgctgctcaatgacccgaagggagctggtgggagtagcgccgcaggaaacgggtctgtttactcctgtgactcgctgtgtgctattaatagggaggttaacaccaccgagaggctgttgaaattgcgccaagagatgaaaaaacacgatttgtgttgttatattgtgcccagctgcgatgagcaccagtcagaatatgtatcgttgcgagatcagagacgcgctttcatatccgggttttccgggtctgctggtgtcgcttgcatcactagggatttgctaaatttcaacgaggaccatcccgacgggaaatccattctgagcaccgatggtagatacttcaaccaagccagacaagaactggattataactggacacttttgaaacagaatgaagacccgattagttgggaagactggtgtatcagggaagcattggaaatggccaagggacttggtaataaagatgaaacggtgttgaaaataggtatcgaccctaaactcatcacctttaacgaatatgtgtcgttcagtagaatgattgacactaaatataaagccaagggtaaagtggagcttgtgcccgtggatgaaaacttgatcgacagtatttggtccggtttcgaaaccttgcccaaaagaccttgcaacgaattactgctgttgagatatgaatttcatggtgaagaattcaaagacaaaaagcaaaaattactggcaaaactaagtaataagtctggaagtgcaacagctgctcctgccaagactttcatagtcgttgcgttggacgaagtttgctggttgctaaacctgcggggatccgacattgactataatccagtttttttctcttacgtggctattagcgaagaggagactattctcttcaccaacaattctttcaatgatgctatatcggaatacttcaaagaaaacgatattgaagtgaggccctacgagcagatatggcagcatttaaccaaggtcactgcccaggcctcctccacggaccacacatttttgattcctgatggagcgtcgtggcagatggtccgttgcctaaacgttccagaaggaaatagccaagcgacgaacacggcggccccaccaaactaccgcatgattcactcgcccatcgatgttttgaaatctatcaaaaacgatatcgaaatcaaaaacgcacacaaggcgcaagtcaaagacgcagtatgcttggtgcagtattttgcgtggctggaacaacaactggtggtgcgcgaggcattgatagacgaatatcgtgccgcggaaaaactgatcgagatcaaaaaaacgcaaagaaacttcatgggcaactcattcgaaacgatatcgtccacgggcagtaattccgccatcatacactattctccaccggcggacaactcgtctatgattgaccctacaaagatgtatctttgcgactccggttcgcagttcctggaaggaacaacagacataacaagaaccatccatctaaccaaacccacgcaagaagagatggacaactacacgctggttctcaagggtgggctagccttggagagattggtgttccctgaagacacggccgggtccagtatcgacgccattgccagacagtttctatggtcgcgtgggctggactacaagcacggcacgggccacggcatcggatcttttctgaacgtccacgaaggacccatgggcatcgggtcccggcctcatctgatgaacttccccctaagagccggaaacatcataagcaacgagcccgggtactacaaggacggcgaatacggtatcagagtagaaagcgacatgctgatcaagaaagcctcgtcaaagagcaagttcctcaagttcgaaaacataacagtagtgccatactgtaggaaactgatcaacaccaagctactaagcgaggaagaaaaaacacacatcaacgagtaccactcgaggatatggagaacggtggtgcatttcctgcaacctcaaagtatctcatacaagtggctgaagagagaaacgagcccattatga

SEQ ID NO: 1669 - DNA, 1764 bp, Saccharomyces pastorianus
atgtcggatcattcccgtgtttccaacaaggaaaaccatctgatgccaacggattcgtcaaggagctcatcgagcgctacgcgctcggcgggcaccacagataccactggcgttgaaccagtggatttcacaggtgaaggagccaagtacaccacggcgacagaaaatgacgttggtgccacggagtccgccctccaaaggactacgactatgaattccgcggcagagtcagatgtcaagatcaccaggagactgaccaagattctgacgggatccgtcgacgaacccgaccgtatagaagttgattactcgcactgtccgcccatgggtggtgagagaccttacccaccaacattgccaaatagagaccagttcgaagtaactttcgatgggcccaacgatccgctacatccgttcaactggcccataaagaaaaaagtcctgctgtgtttcgttctatgtttggattgtattgctattgctatgtgttcttccatctttgcctcggccgtgccacaaatctgtgagatttaccacgtcatccaagtcgttgcgatcctcggtgtcactcttttcgttcttgggtttgctgcgtcaccaatcgtttatgcacctctttccgaactatacggtagaaagggtgttctggtgttgtctgcgtttgggtttgctcttttccagtttgctgtggctaccgccgaaaatctgcaaaccattttcatttgtagattttttggtggtttcatcggtgctgctcccatggctgttgtccctgccgcttttgccgatatgttcgacactaacgtcagaggtaaggccattgccctgttttccttaggtgtctttgtgggccccattctagctccggttatgggttcctacattgcccaaagaaccacctggagatggttggaatacgttgtcggttgtttcgcctctcttgttttcgttttgatcgtggtgttttttgaagaaactcatcaccctactattttggtcaacaaagccaagcagatgagaaagcaaagtaataactggggtattcatgctgcccatgaagacgtggaattgtccatcaaggatattgtccaaaaaaccgtgacgagacctattgtgatgctattcgtggaaccattgttattattcgtgactatttataactcgtttgtctacggtatcctgtatctactgctagaagcctaccctcttgtgtttgtggagggttacggatttaccgagaacggtgaattgccgtatatcgccttgattattggtatggtagtgtgtgctgcttttatctggtacatggacaacgactatttgaaaaggtgtaaagccaaaggtggcttagtccctgaggccagattgtactccatgatcgttgcaggtactattttccccattggtatcctgtggttctgctggactggttattatcctcacaagatccattggatggtccccacagtaggcggttccttcattgggtttggtctgatgggtatttttttaccatgtctgaactatatcatcgagtcgtacttgcctttggccgcttctgccgtcgctgcaaacacttttatgagatccggatttggtgcgtgcttcccgctgtttgccgggtacatgttccgcggtatgggtattggttgggccggtttgttactaggtctattttccgctgccatgattcccgtgcctctgctgtttttgaaatacggtgaagccataagaagaaagtccaaatacgcttacgcctcttaa

SEQ ID NO: 1670 - DNA, 2727 bp, Saccharomyces pastorianus
atgaacgacgaaacacaattcacagaaagagccctaacgattttgacattggctcaaaaattggcttcagaccatcaacatcctcaattacaacctatacatattctagctgccttcattgaaacgcctgaggatggatctgtcccatatcttcagaatctgattgaaaagggccgttacgactatgatcttttcaaaaaagtggttaataggaatttggtaaggattcctcaacagcaacctgcacctgctgagataactccaagttacgctctgggtaaagtgctacaggatgccgccaagattcagaaacaacagaaggactcattcatagcccaagaccacatattatttgctcttttcaacgattcatctatccagcaaatcttcaaggaatctcaagtagacatcgaggccatcaagcaacaggctctcgaacttcgtggtaatgcaagaattgactcccgtggtgctgatacaaacactcctttggaatacttatctaaatatgccattgacatgaccgaacaagcccgtcaaggtaaactggatcctgtcattggtcgtgaagaagaaatcagaagcaccattagagtcctagcaagaagaatcaagtccaacccatgtttgattggtgagccaggtattggtaagactgctatcattgaaggtgttgctcaaagaatcattgatgatgatgtccctacgattttacaaaacgcaaaactatttagtttggatttggctgctctaaccgcaggtgccaagtataaaggtgattttgaagaaagattcaagggtgtgttgaaggaaattgaagaatccaagactttgattgttttattcattgatgaaattcatatgttgatgggtaacggtaaagatgatgctgctaacatcttgaagccagctttgtccagaggtcaattgaaagtcatcggtgccaccacaaataacgaatacagatccattgtggaaaaggacggagcctttgaaagaagattccagaaaattgaagtcgctgagccaagtgtaagacaaactgtggccatcttgagaggtttacagccaaaatatgaaattcatcacggtgtaagaatcctggatagtgccttagtcactgcggctcaattagcaaaacgttacttaccttataggagattgccggattctgctttagatttagttgatatttcttgtgcaggtgttgctgtcgcaagagactccaaaccagaagaattagactccaaagagcgtcaactacaattgatccaggtcgaaattaaggctttggaaagagatgaagacgctgattctaccacaaaggacagattaaagttggcaaggcaaaaggaggcttctttgcaggaagaactggaaccattgagacaacgttataacgaagaaaagcacggtcatgaagaattaacccaagctaaaaagaaattggatgaattggaaaataaggcccttgatgctgaacgtagatacgataccgctactgctgctgatttgagatactttgctatcccagacattaagaagcaaatcgacaggttcgaacaacaagtcgctgaggaagaaactcgtgctggtcctaactctatgattcaaaacgtagttaactcagataccatttccgaaacagccgcaagattaacaggcatcccagtaaagaagttatcagaatccgaaaatgaaaaattgattcatatggaacgtgacttgtcttccgaagtcgtgggtcaaatggatgccatcaaagccgtctcaaatgccgtgagattatctagatcaggtttatccaatccaaggcaacctgcatctttcttattcttagggttgtcaggttcgggtaaaactgagttagccaagaaggttgccggatttttgtttaatgacgaagatatgatgattagagtcgactgttctgaattaagcgagaaatatgcagtttcaaaactgttaggtaccaccgcaggttatgttgggtatgatgagggtgggtttttaaccaaccaactgcaatacaagccatactctgttttgctattcgatgaagtggaaaaggcccatccagatgttctaactgtcatgttacagatgttggatgatggtagaattacttcgggtcaaggtaagacaattgattgctctaattgtattatcatcatgacctctaatctaggtgccgaattcatcaattcccaacaaggagccaagatccaagattcgactaaaaatttggtcgtgggtgctgttaagcaacacttcagaccagaatttttgaacagaatttccagtattgttgttttcaacaaactttcaagaaaggccatccataagatcgtggatattcgtttgaaggaaattgaagagaggtttgaacaaaacgacaaacattataaattgaacttgacgcaggaagccaaggatttcctagccagatatggttattccgatgatatgggtgcacgtccattaaacagattaattcaaaccgaaattttgaacaagttagctctcagaatcttgaagaatgaaatcaaagataaggaaacagttaacgttgttttaaagaagggtaaaacccgtgatgaaaatgtctctggtggagctgaagaatgcttggaagtcttaccaaaccacaaggctactacaagtgctgacacattaaactatgatgacaatgaagacagtatggaaatcgatgatgagctagattag

SEQ ID NO: 1671 - DNA, 843 bp, Saccharomyces pastorianus
atgtcgtcaaaaccaaccaagaaccaaggctccgcctcagcccctcccaccagagaccagtccctcgtgcagaggtttatggcggtggccaagagcctgcagtttgcgtggtttaccggccattctgtcgtattgatcagcacgatcctgtacctgttcaagatgtctgaggtctactacagactggtctacctcggtgtcatcgaatcgttcggcatcatcatctaccagcaatttttcacccgcaacgaaccattgcaaaccccaggggccgctgccaccaaggcctcggtgaagtcgcgcatttccggcttgttaaagagcgaagatgtgttgtacctgattctggccgtgttctggttgttcaccccaagattttccttcagtttgatcccatttttcgcatttgccgtgttccacgtcttaatctacgttgaaaaagtcatcttgccaaaagtgttccatctgtccagcaaggagtcgagtggcatcctcaggttcatcgacaagtttgttgttcagtacaatgacctgtgtatgcactgggtcgggactgcagagctactgattttcatcttgatcctgttcagagccattttatgcttccagagatcctggatcatgctggcagtgtacgccgccttcatcaagcttagatacgaaaactccaagtacatgaaagccgccttcgcccaatggagagtcagaatggacgggatcataagccatccatctgtcccaccctacgtcaagagagcctacaacgcggtcaagatgagtctggtccgcgtgtcccagatccgtttgagcggtgccccacaggaaaccaagaagcaaaactaa

SEQ ID NO: 1672 - DNA, 1674 bp, Saccharomyces pastorianus
atgtcccaagacgaaaatattgccaaggctgttgccgaatctgccgaacccgcccaagttatcctcggggaagacgggaaaccattatccaagaagggtttgaagaaattgcagaaggagcaagaaaagcagagaaagaaggaggagagagctcttcaattggaagccgaaaaagaggcccgcgaaaagaaggctgcctccgaagacactgccaaggaaaattacggtaagttgccattgatccagtcccgtgattctgacagaaccggcgaggaacgtgtcaagtttatcgatttggatgagactagagacagtgacaaagaggtcctattcagagccagagtccacaacaccagacagcaaggtgccacattagcctttttaacattgagacaacaagcctctttgatccaaggtcttgtaaaggccaacaaggaaggtaccgtcaccaagcacatggtcaagtgggctggttctttgaacctggagtccattgtccttgtcagaggtattgtcaagaaggtggacgagccaatcaaatccgccactgtgcaaaacctggaaatccacatcacaaagatttacaccatttccgagactccagaaacgctaccaattcttttggaagacgcttcccgttccgaagcagaagctgaggcggccggtttgccagtagtcaacctagacactagactagactcacgtgtcatcgacttaagaaccgtcaccaaccaggctatcttcagaatccaagccggtgtctgcgaactgtttagagagtacttgtccaagaagaagtttactgaagtgcacacaccaaaacttttgggtgccccaagtgaaggtggttccagtgtgttcgaggtgacgtacttcaagggtaaggcctacctggcccaatctccacagttcaacaaacaacaattgatcgttgccgatttcgaaagagttttcgaaatcggccctgtgttcagagctgaaaactccaacacccaccgtcacatgaccgagttcaccgggttggacatggaaatggcgttcgaagaacattaccacgaagtcttggacactttgagcgagttgtttgtgttcatcttcagtgaattgcccaagagatttgcccaagagatcgagctggtacgtaaacagtacccggtcgaagaattcaagttgcccaaagacggtaaaatggtccgtcttacatacaaggaaggtattgatatgctaaaggctgccggtaaggaaatcggcgacttcgaggatttgagtaccgaaaacgaaaaattcctgggcaagttggtgcgcgacaagtacgacaccgacttctacatcttggacaaattccccttggagatccgtcccttctacacgatgcctgatcctgccaaccccaaatactccaactcttacgatttcttcatgagaggtgaggagatcttgtccggtgcgcaacgtatccacgaccacgccttgctacaagaaagaatgaaagtgcacggcttatccaccgaagacccgggtctaaaggactactgcgacgggttcagctacgggtgtcccccacacgctggtggtggtatcggtttggaaagagttgttatgttctacttggacttgaagaacatcagaagagcctcgttgttcccaagagatcctagaagattgagaccatga

SEQ ID NO: 1673 - DNA, 327 bp, Saccharomyces pastorianus
atgagctccaatgaagaggtctttagtcagataaacgcaactgtgaatgtggtcgataataaaaagcgtctactattcgttcaggatagttgcgcactagtcctggggcttgttgcagggtttttgcagattgaatctgtcaatgggttcctttggttcctagccctgtacaacttgatcaatatggtttacattgtttggatctgtcaattacaaccagggaaattctaccaaagcccactgcaagatatttttttcgaatcatttatcagagagttaactgggttcgtcatggcatggacatttggttatgccttaatcggataa

SEQ ID NO: 1674 - DNA, 1242 bp, Saccharomyces pastorianus
atgggctttatatcgtcgatattgtgctgttcttccgagacggctcaatccaactccggttctgcttatcgccaccaacaatccagctccctcaataaaaacagaaacgtcaagcactccaacacgaaaagtcgagcacgtgccgtgcagaagacaaactctccgccctccaagactaattcggccaccactttgagctctacagaaagatccacgggtaaatctgggataagtacgaacgataatgagaaaaagaaaccagtgtcgccgactgtagctgctaccaccgtcactagtaataatactacaaagaaagtcgacagaaaaatcagcaaagaagacctacacgaggaaaaatacgaagttgatgaggatgaagaggttctcgatgaagataaacgtcgcagccgcggcgccctacgtgataagggatccgtcgtgaaagaagtgcccaagcagcagaaacagcacaagcaacaaaaacagcagcaacaagagtccatcgtacgagtatcgcctgaccatcttatccaagatattgatttgagtagagtaagcagtagtccccaggctagtgtgacttccaacgatgctgatgatgacgaagatgacgacgaagacgacgaagacgaagagtatatcaatctaacgctcttgcaacaagaccagtaccatgcaccgggcttcaataccctgctccccccacaagatgaaagtacaaaggataagaaatgtttaatactggatcttgatgagactctagtacattcgtctttcaaatatttgcgatctgctgatttcgtcctacccgtggagatagatgaccagattcataacgtctatgtcataaaaagaccgggcgtagaggagttcttggaaagagttgggaagatattcgaagtcgtggtctttactgcaagtgtctcgaggtacggtgacccgctactcgatatactagacacggataaagtcatccaccacagattattcagagaggcttgctataactatgaaggcaactatatcaagaatttgtcccaaatcggaagaccgttatcggagatcatcatccttgataactccccagcttcttacatcttccaccctcaacatgcaataccaatatcgtcctggttttcagatacccatgataacgaactattagatattattcctcttttagaagacctttcagtgaaaacttcattagacgtaggcaaaattctggatgtaacaatatag

SEQ ID NO: 1675 - DNA, 210 bp, Saccharomyces pastorianus
atgactgaaactgacaagaaacaagaacaagaaaaccacgcggagtgcgaggacaaacctaagccatgttgcgtctgtaagccagaaaaggaggagcgggatacatgcatcttattcaatggacaagactctgaaaaatgcaaggaattcattgaaaagtacaaagagtgcatgaagggttatggcttcgaagttccaagcgcgaactag

SEQ ID NO: 1676 - DNA, 2244 bp, Saccharomyces pastorianus
atggtggtaggaactaaaaaatactctaatttggactttgtccctacaatcagtgacagtgaagacgatgttccaattctagattcttctgatgacgaaaaagtcgaggctaagaagactacgaagaagcggaagggtaagaataacaagaaaaaggttagtgagggggataacctcgatgaggatgttcatgaggacttggacgcggggtttaagtttgatttggacgccgatgataccacttcgaacttccaaggctggaactttctagcagagggcgagtccaataaggacgatgccgaagcttttgtgaagaaggacgttgacttggataagattattagaagaaaaggtgggctggtgaaaatggcccatattgagagtaaacaagaagaagaaaccgagaaagaacaagtagaaaaagaaaacgatagcgacgatgaggaattagcaatggacgggtttggtatgggagctcccgccaagaatgaagaggaagatgattcagaagacgaaccagaagaagagcaggaacaggaggaggaacaggaggaacttaccatggaaaagggcggcaaaaatgacgaagcagttgaagaagacgattccgaagaggcaaaagccgatttttacgcacctgaaactgaggcgaatgacgccaaaaagcaaatgtatgacaacttcaacagcctgtccctgtctcgtcccgttctcaaggggcttgccagcttgggttatgtcaagccttccccgattcaaagcgccaccatccccatcgccttgttgggtaaagatatcattgccggtgcggtgaccggttctggtaagactgccgcgttcatgattcctatcattgagcgtttgttatacaaaccgggcaagattgcctccaccagggtcatcgttttgttgcctactcgtgaattagccttgcaagtcgctgatgtcggtaaacaaattgctcgtttcgtatccggcatcacttttggtctagccgttggtggtttgaacttgagacaacaagaacaactgctgaagtctcgtcccgatatcgttattgctactcctggtagatttatcgatcatattaggaactcggcaagtttcaacgtggactcggtggaaattttggtcatggatgaagccgatagaatgctagaagaaggtttccaagacgaattgaacgaaatcatgggcttattgccaagcaatagacagaatctattgttctccgctacaatgaactccaagattaaaagtttagtaagtctttctttgagaaggccagtaaggatcatgattgatcctccaaaaaaagccgctactaagttgacgcaagagtttgttcgtattcgtaagagagatcacttgaagcctgcgttgctctttaatctgatcagaaagctggatccaatgggccaaaagaggattgttgtctttgttgcaagaaaggaaactgcccataggttaagaatcattatgggtcttttgggtatgagcgtaggagaattacatggctctttaacacaagaacagcgtttagattccgtgaacaaattcaaaaatttggaagttcctgtactcatctgtacagatttggcctctagaggtttggatatccccaaaatcgaagtcgttgtcaattacgatatgcccaagagttacgaaatttacttacatagagttggtcgtactgccagagctgatagggaaggtcgttctgtcacacttgtgggtgaatcgtctcatgatcgtagcattgttcgtgctgctatcaagagtgtggaagaaaataaatcgcttactcaaggtaaagctcttggtagaaacgtggactggattcaaatcgaagagacaaataaactcgtggaatcaatgagcgataccgttgaagaaattctagttgaagaaaaggaggaaaaggaaatcttaagagcggagatgcaattgagaaagggtgaaaatatgttaaagcacaaaaaggaaattcaggcaagaccaagaaggacatggttccaaaatgaatcagacaagaaaaattctaaattgctaggagctttatctagaaacaaaaaagtcaccaacagtaaaaagagaaagcgtgaagaagccatcgctgatgataatggttcacgttcctatagaaagactaagaatgatcgtgtcacagaccaagaaagaactttcaaaaaacagaaaagtgcaaatccaaacaagaagaagggcttttctaaacgtaggtaa

SEQ ID NO: 1677 - DNA, 2004 bp, Saccharomyces pastorianus
atgagcagtaacgagcaggtattagacgaaagcctggagaaagtgagagccttactgaattccaaattacgggagccgatcgagttcctaacaggtgcagagtcagatttttgctacactacgctaattgttagtgaaaatctgaatttaataggccgtggctatgagcagatattgacagattacgtttccctttgcgatcaaaagtacctgcgtgaagttgcaatttcagattcacgattttggaatatattgtatgataattgtccaaaattgaggccagaaacagtagtgtcaaacctcattaggctttttaatataacactcgattgcccaaatgctggtgaggatgaagtaataaagagtctctgtcgtattctcacaacgaatcctcagattatagggatgcttctactagttctgtcgcacagaccgattcaaaagtcattattcatgaacactattctatgcattaacctatttttgaaatgttcacttatcttatgcgagacttcagtatcacacgctgtagaatgtgtgccagcaattctgattttattattccaatacaactttccagcttctatatccgaactgatttatgtagaagagctacaaccactgattttagaagagtttgtacctttgaagcaaaggttgataaactttctatcgtcggttaacattgaggactattcatgttccctgaaagagaaacttctcagggctattaaaaaccattccgtatttcagaaaggacttgaaatggaactgggcgagctcccaagtataaacctgttgaatgcctatgacacatatacattcttaaatagccccaatggatcattcaagaggctttacactgaacaactgctattcggtgaaaatgattttcctctttatgaagcaatattcaaactatcggatcagtttcgaagacttttcaacttaaccgggaaacagcaagatttcgattccgagtctgattacaatttgaaactccaaattgccaccgctgttctaaatcgacaaacttgcttctataaaacacttgagttgtttttgaggttctggatagaatctttagcaagatcggaaaacgatatggtttcactactaagcttagccattatcaccctaaaatatatttgtttatcatcaggcgacttaaaatcagcaagggagtccaaatcactccttaaaacccaggtcggggcacttgactctatgaactataaatttgcaagaaaactgcaattagactatataaaagaagaccattatcggacctggtcgtcaagtatcgctagcttcgatacaatgctatcaggccaggtacacgattacgttcgtcatcaaaggctccttcaattgcaaaagggaacatgggtttattcagaagacccattaaacacggaagccggaaccccgaaagtttatttcatcatagtgtcggataatcatgcgagtcttttagccagagaatttcaaactcaaacggatgatttgccttatttatttgataataaaatcctaacaagtccaagttgtgaagcattggctaaaaacggcagaacgaaagttgtagttttgaagcatataacctgcttcaagagcagagaacttacaacaccgagccgtcgaactggtagtaatgtttacatcaaattgcaggaacaaaatgtatacaccgaagttgagctaaaagaccgcaacgacagaacggttttgaagttttacttagacactgaagagggaaaatatatatggctagacggattgaaacttatatcaccatcccatcatgaggatatatctagagatacaaaggagcaaatagacacactgtttgacttgaggaaaaatgttcaaatgataaatttgaacgttcacgaggaggattcgatagcgcctccacccaaatcgaatgatgagaatgaagatgaggaattttatgacttggaaacgctaaagagaataacggaagatttttatttcgattag

SEQ ID NO: 1678 - DNA, 1854 bp, Saccharomyces pastorianus
atgggtcagcttaatgaagctaaaaagatgaatgtcactgagtttgccgatgcccaaagaagccattacacagtatatcccagtttgcccaaggcgaacgaaaacgacaaacacattccatttgttaagcttctgtcaggcgaggaatcggaaacaaatgtcgaaaaaaggtgggagttgtacgaccagttacattcacatttccacgaccaggtcgaccatattattgataacattgaaactgacttgaaaacagaaatttcagacctcttgtataatgaaacggctcaaaagagacgatgcttcaacaccatcttcctattaggttcagatagtacgacgaaaattgaacttctaaaagatacgccctctcagtacaatgccttaattgaacttactccaaaggaatctccaaatgtgagaatgatgcttcgtaggtccatgtataagctttacagcgctgccgatgctgagcaacatcccaccataaaatatgaagagactaatgatgaagataccgattttatggagcaaaacaatgatgtgtcatatgacttgtcccttgttgaaaatttcagaaggctttttgggaagaatttgaacatggttttcaatttcaaagatgtcgattctatcaatttccacactttagacagtttcatcatcttactaaaaagcgcctttaaatatgatcacgttaagataagtttaattttcaacatcaatacaaatttatcaaatattgagaaaaatttaagacaatcaacaatacgacttttaaaaagaaattatcacaaactggatgtatcaagtaataaagggtttaaatacggtaaccaaatttttcaaagtttcttagacaccgttgacggaaaattgaatctttccgatcgatttgtggaattcatcctcgacaagatggcaaataacaccaatcacaatttgcaattattaactaagatgttagattattcgttgatgtcgtacttcttccaaaatgctttttcagtttttatcgaccctgtaaatgttgattttttaaatgacgattacttgaggatactaagtaagtgccccacattcatgttctttgtcgaaggtcttataaaacagcatgctcctgctgacgaaatactttcgttgttgaccaacaaaaacagaggcctagaagagttctttgttgagtttttagtgagggagaatccgattaatgggcatgccaaatttgttgctcaatttctcgaagaagagttgcatataaccaatttcaatctgatagaattatatcataacttattaattggcaaactagattcgtatcttgatcgttggcctgcatgcaaagagcacaaggaacgacttcattttgagcctattgatacaatcttccaagaattattcactttagacaacaagagtggactactcacccaatcgatttttccctcctacaaatcaaaccttgaggataacctgctgagttgggaacaagtgctgccttcgctcgatggagacaccgatgggggcatttccgaaagcttggataaagtgatggctccagtagtgggccagttgtttaagctttatcgtgaggcaaacatgaccattaatatatacgatttctacactgcgttcagagagactttgccaaaggaagaaatactgaattttatcaaaaaggacgcctctaacattagacttcaagagctaggagaagccccagatgcgtttgaaaaagtatcattgattctatttatgcaagcaatctttgcctttgaaaatatggggctcattaaattccaaagcgttaaaaattacgatcttgtcgaaaaatgtgtctggaaaggcatctaa

SEQ ID NO: 1679 - DNA, 2277 bp, Saccharomyces pastorianus
atggctagtttagaagatctaatccctactgtcaacaagttgcaggatgttatgtacgactccgggatcgacacactcgatttgcccattctggctgtcgtcgggtcacaatcctctgggaaatcctccatcttggagactttggtcggtagagattttttacctaggggtaccggtattgtcaccagacggccattagttctccaattaaacaacatacctccaaactctcctctaatagaggaagatgataattcggttaaccctcatgatgaagttacaaaagtatcagggtttgaggctggtacgaaacctttggagtacacgggtaaggaaaggaaccatgcagatgagtggggagaattcctacatataccggggaagcggttttatgattttgatgatattaagagagaaatcgaaaacgaaactgcaagaatagccggtaaagacaaaggtatcagtaagattcccatcaatttgaaagtcttttctccccatgtgttgaatttaacactggtagatttaccggggattacaaaagttcctattggagaacaaccacctgatattgaaaaacagatcaagaatttaattctggactatatagccactccgaactgtttaatcttggccgtctctccagctaacgttgatcttgttaattccgaatctttgaagttagctagagaggtagacccacaggggaaaaggaccattggtgtcatcaccaagctagatttaatggattctggcactaatgctctagatatcttgtctggaaaaatgtaccctttaaaattggggtttgttggtgtagttaatcgctcgcaacaggatattcaattaaataagacagtcgaagaatctctggacaaggaagaagactactttaggaagcatccagtttacagaaccatctcaactaaatgtggtacgcgttacttggccaaattactgaaccaaacattgctaagtcacattagagataaacttccagatattaaaaccaagttaaataccttgatctctcaaactgaacaggagcttgctagatacggtggcataggagctaccaccaatgaaaacagggctagccttgttttgcaattaatgaataagttttctacaaactttatttcatctatagatggtacatcttctgatatcaatactaaggaactatgtggaggtgcccgtatatattacatttacaataatgtctttggaaattctttaaagtcaattaatccaacttctaacttgtccgtccttgatattagaacagcgataagaaattccacaggtcctcgtcctacgttatttgttccagagttggcatttgatcttttggttaagccccagattaagcttttatcagaaccatcacaacgttgcgtggaactagtttatgaggaattaatgaagatatgccataaatgtggttcttctgaattggccagatatcccaaattaaagggtatgcttatagaagtaattagtgagctacttagagaaagactgcagcctactcgttcttacgtggaaagtttaattgatatacatcgagcatatattaatactaatcatcctaatttcttaagtgccacggaggcaatggatgatattatgaaaacacgtagaaagcggaaccgggaattgttatcaaagagcaaattatctcaacaagaaaatggccaaaccagcaacactaatggcactccatccatctcctcaaatgcagaccaagattctgttaggaatagtgactacgatgatgaaggtattgatgccgaatcaaagcagacaaaggataaatttttgaattacttttttggtaaggacaaaaagggccaaccagtgtttgatgcatcaggtaaaaagagaaatattgtgggtgaaggaaatgttgaagattttagaagcttacagatatcagatttttcattaggagatatggacgaccttggaaacgctgaaccgccactaaccgagagagaagagctagagtgtgaattaatcaaacgattaattgtttcatactttgacatcataagagaaatgattgaagatcaagtgccaaaagcagttatgtgcttactcgtaaatttctgtaaggattccgttcaaaataggctagtgactaagctttacaaagaatccctatttgaagagctattagttgaggaccagactttggctcaagatagggaactatgtgtgaaatcgcttggggtttataagaaggctgcaacacttattagtaatattctgtaa

SEQ ID NO: 1680 - DNA, 1983 bp, Saccharomyces pastorianus
atggctaagagaaacagatcccaatttcgtatccaggaaagaactgcaaagaaaagaaagcaggaagattccttgttagaaagtagtgctttccaaaatgtgccagataatatagatgaaaataacataaataacacgaatggcacatcctgggatgaagaagaacaaggatacgaaatgattcccagaaagaatcgctctgatacatccgatcttgtggaagggttacctattaaaattaacggtaaagttgaaagaacactacataaagctcaagaaaagcctaagaaaaacgaagaggtagacgaagttagcgacgattcagtggacagcaaatcagatgatgaagaagaagaggtaaaggaagaagaacctgatacagaagaaaagattataaagttaaaagaagatattgcggatttagttaccagaattatggaagagcctgaagaaaatacaactgcattaggacgtctttgtaaaatggcagaatctaaaaatcctaatacttgtaagttttctatgttagctctggtgcctgtgttcaagagcatcataccaggttatagaattaggccactaagtgaaaccgaaaaaaaagaaaaagtctctaaggaagtttctaagcttagaaattttgagcactcgttggtttacaactataaaaattacattgagacattgaagaacctttccaaaacccccagtaatgctgctcctatcaaagtttcattaggtatcttggctactcaagctgccaaagaattgatctcgaccgcgtcgcatttcaattttaggacagatatctttactttgcttctgcgtagaatttgtaaaccaagaatatcaacagatccaacctccattcaaataatcaagacattcgaaactttattgaatgatgatgaagagggcctaatctcattcgaaatactcagaatttttagcaagatactaaaaacgagaagctttaacgttgaagagtctgtcttgaatatgttattatcattggatgttttacatgactacgatcctaatactaaagctgaagagcagattagagcccctaaactaaagaaaaaagatagagtccatctttccaaaaagcaaaaaaaagccagaaaggagatgcagcaaatcgacgaagaaatgcgtaacgctgaacaagctgtctctgcagaagagagagaaaaaaatcaatcagaaattttgaaaattgtgttcactatatacttgaatatcttgaaaaacagttcccaggtgctcattgggtccgttttagaaggattaacaaaattcggtaatatggccaattttgatctattaggggacttcctcgaagtaatgaaggaattgatcagcgatactgaattcgacaacctttcttctgacgaagtacgtaaggccttactttgtatcgttagtgcgttctcacttatttcaaacactcaacatatgaaggttaatatggatttgtccaaatttgtggatgggctttacacgctattaccttatatttgtcttgatgcagatattgagctttcctataaatccctaaggttggccgatcctctcagtaacgaaacaacgaaaccatcagttaacgtttccactaaagcagagcttttattaaaggcgctagaccatatattcttccgttccaaatcaggaactaaggaaagggctacagcattcaccaaaagactatacatgtgcattggtcatactccagaaaaaacgagtatcgcgattctcaaattcattgataaactaatgaatagatatcctgaaatctcgggtctttactcatctgaggatagaataggcaacggtcattttgtaatggaggctaataatccttcaaggagtaatgcaaatgcagcaacactatgggataacgctcttcttgaaaagcattattgtcctattgttgtaaagggactgcgctctttatcgactagatcaaaagactactctaaatag

SEQ ID NO: 1681 - DNA, 846 bp, Saccharomyces pastorianus
atgtccaacccagatgacttagatgacggccttgtatatgattttgattctcaacaggaagtagaaatcgaagctaatggtaacgatggattacaaaagagacctatacaagatgatgatgatgagaaagaagtgaaggagacctcagaaggtgaatctgaaagaccaatgtccaaaagacagaaaaagctgcagaaaaaatcaaagttcatcgagaaaaagaaggaggaaagtcaatatattgtttcgcaacgaaaatcgattcctacaagttcacctgagaaaattattgagtatttaacagcattgatacgtgaaaagaaccccgacttgagtgctttggaattagaggaactgtactttaaaaaaaaggatttcctctctacagaaaaatttgacaccgaacgtaaattaactgatttctcaacatttatgcaaaagttttctgtggcaccaaaaaagatcgtcttttcaatgtccaatattagagtagctgacgtttatcgtagtttgaatggtggtaagaactgtgttaaattgttttccaaaagcaaactgaaggacgatatagccactgtggaacgtttacttggtgatagctcgaaaaagtccaaaaatagtaacgattctttttatttcattgccacgccaacaagaatgcaaaaaattatagaggaaacagagttactatttcaaggtaaagagaaattggacatcattcttgatgcaagttatctggatcctaaggataatactatattatcatttgagaatgcagtcgttctctgtcaggttttgaagacctttttgaataaaaaaagttccgtgaaaatactactatactag

SEQ ID NO: 1682 - DNA, 1446 bp, Saccharomyces pastorianus
atggctcctgcagtagtttcggaatctgaagaagatgaagacaaggtcgcggtctcaagaagaagcaagagacaagttcatttcgatggttcgggcaatgaacgtttaggccagcaacagcagcaacagcagcaacagcagcaacagcagcaacagcagcaacagcagcaacagcagcagcaacagcagcgttctagtcacagggataaagacaggcatgcacagcgaaaaaagaagaagaggctctcgaataggaatctgcagggtgctagcggagggtacgcctgggaagacgagatcaagagaagttgggatctcgtcaaagtggacgatgaaggagatatggcctctcttgtggccagtatcgtagaggccagaaagaagcgtaccgcaaagaggaatatcacaccgtaccagaggggtatcatcagaagtctgatattgaccttggattgcagtgaggcgatgctggaaaaagatttgagacccagcagacatgcaatgatcattcagtatgctatcgattttgttcacgagtttttcgatcaaaacccaatttctcaagtgggtatcatcataatgaaaaacgggctggcacaactagtcagccaagtgagcggaaatccgcaagaccacattgatgctctgaaagctatcaggaagcaagatccaaagggaaatccctccttgcagaatgcgttggaaatggcaagaggtttgctactgcctgtccccgcccactgcacaagagaagtgctgattgtattcggtagtctttccaccactgatcctggcgatattcatcaaactatcgattcgttggtgagtgagaaaatcagagtgaaagttctggggttatcagctcaagtggccatttgtaaagagctatgtaaggcaacgaactacggtgacgaatctttctataagattttactcgacgagacccatttgaaggagctattcaatgaggctattactccattacctgttaacaagataaataaaggtttcacactggtgaagatggggttcccgacacgaatatttgaagatactccaactttttgctcatgccactccaaactggtttatggtggttatttttgcccaaattgtcatagtaaagtctgttcattgcccacagtgtgtccatgctgtgatttgatgctgatcctctctacccatttagccagatcataccaccatttaatgccattgaaaacgtttacagaagtacccacaacagaatcatttcgatcagaagattgtttcagttgccaatctagattccctatattgaaaaatcacaaaaacggtaatttgttaacaagttctcgttaccgctgcgaagattgtggagaggaattttgtgtcgattgcgatgtgtttattcatgaaatacttcacaattgtcccggttgcgaatctaaacctgtaataacgtaa

SEQ ID NO: 1683 - DNA, 1011 bp, Saccharomyces pastorianus
atggaagtatataaagaacgggtatctacgtccgcaaaaggggatgctacggcgaagtacttattgcagtatatcttatcagcaagaggtatttgccatgaaaattcattgatcctagccctaatgagactggaaactgatgcttcgacgtttgacgcgcaatggtcgatccagcagtggatagacaagctgaatgatcacatcaatgccataaatgtaagactaaacctcctgggctataagatcgttcgaattaaccatgggattggtagaaatgcagtgactatgaaaaacaggaagaattttgggctcttcgaaaataatgcagctgctcgagcccatggtggtagtgcaccggattcgcaagtgacggtactgccagagagtaaccgattttttgtctatgttaacttggcgtccacggaggagaccaagttagccactcggtttaatcaaaatgagatcgagtttattaagtgggccattgagcaattcatggttaatggggagactataatcaagggtccggcattggagacctcagtcgtcgtgaaggagatcaactgtattctcatggcagccacggggaactccaatctgccgaaatgggttaaatcctgtactttcactgtggggtccacggatctcttacagtttcaagagttgacggcaatggagattgaagatttgttgctccgattgtgtgaactgaaatggttttacagaactagggaggggaagctcggcattgatcttcgctgcattgcagaactagaagaatacttgacatctacttataatttaaacacttgtcaaaattgccataaattggtccttcaaggcgttagatgcggccacgaatcgtgccgaaatgaaaataacgaagatggagagaacagcctaccccaaatttggcacgttgattgcttcaagcattatataacacatgtaagtaaaaactgtgatcgttgtggttcattactaatcacagatggtgtatacgttctttaa

SEQ ID NO: 1684 - DNA, 600 bp, Saccharomyces pastorianus
atgagaatttatcaatgtcatttttgctcatctccatgttatccaggtcatgggatcatgtttgtacgtaacgatgctaaagaattcagattctgtcgttcgaaatgtcacaaggcattcaagcaacgtcgtaacccaagaaaattaaaatggactaaagctttcagaaaggctgctggtaaagaattggctgtggattctaccttgactttcgcccaaagaagaaatgttcctgttagatacaacagagaactagttgccacaactttgaaggccatggccagaatcgaagaaatcagacaaaaacgtgaaagagccttctacaagaatagaatgagaggtaacagagaaaaggacttcttgagagataagagattggtcgaatctaaccctgaactattgagaatcagagaagtccaaatcgccaagaatttggccaaggaacaagaaagagccgaattagaaaaccaacaagaagaatctgaagaagaagaagaagacatggaaattgacagtgatgaagaagaagaagaacaattagaaaagcaaaagatcttgctaaaaaacaaaagaagaaattcaaagaaaattgctttttag

SEQ ID NO: 1685 - DNA, 480 bp, Saccharomyces pastorianus
atgagtcagctagtggtagatttgaaacacctgaaaacattagcaaagaggtacgaaatcgctgatggtattgatgatggagacgagaagaagcacaaccgtattcaatcatctaaaagatttagaatggtcgttcagttagtagacttcttgttctgtgagcgtaataaagaacgcactgacggccttttctgtaagatggtggtaaggaacctttgctgttctggtgtaataaatggtggagaagagatgagtctatatatgagcgagcgattgttttcggctcataaagacgatcccatgttaataaatggacagatccttgacattcgaattggattatggtacggaacgtaccaaagcccgccaatctttgaaactatcaacttcaagattttatctcagagtgatgtttgcgagttttgtgaatttatcagatcaccaatcggtgaaacttttctaaacatttctaattcgtag

SEQ ID NO: 1686 - DNA, 615 bp, Saccharomyces pastorianus
atgttccacagacgcaagaggcccttggataggaggtaccatgatcaagatagcaaaaaatttaagcctaaatacgttgatatattgcctgatttcagaccttcagggctgctagaattggagtcgaacaataaagagggcatagccttaaagcacgtggaaccacaggatgctatctctcccgataaatatatggataagctggacttagatccgcgagataggacagtttacgaacttttagtgtataggaagaatgacaaggataaagccgtatggaaaagatatgaattgaacgacaggagttgttttttggttggtcgtgagttgggtcgcagtttggatgcagattcggacgatagaaaggagacggtggtcgcagatataggtataccagaagaaacatcttcgaagcaacattgcgttatccagtttaggagcgtccatgatattttgaaatgctatgtcatggatttggactcctccaacggtacctgtttgaacaacgttgtagtgcctagggccaggtatatagaattacgaagtggtgatgtcctgacactttcagaatttgaagaagatacagactatgaacttgtctttatgaatgtataa

SEQ ID NO: 1687 - DNA, 1014 bp, Saccharomyces pastorianus
atgaaccggattaagaacacaatcgctgtcgctaagaggttgaaactaagcagtattatgaccaactcagaattaccaagcattttcaatggcaccgttgatctggggattatcggtggcacaggtctatataacctggactgtctagagcccatcgcattgctgccacccatggtgacaccctggggtattacatcgtctccagtcacgatttcacagtttgttggtaccaacagccatttccacgttgcctttatcgccagacatggtgtcaaccacgaatatccacccactagagttccattcagggccaacatggcagcgttgaagaacctaaactgtaaagccgtgctttcattcagtgccgtggggtcgttgcaggcccacatcaagcccagggattttgttttgccgcaacaaataattgacagaaccaagggcataagacactcatcgtacctcaacgacgaaggcttggtgggccatgttggattcggacaaccattttctgagaaatttgcagagtatatctaccagttcaaggatgcgataacaaaccccgaatccgaggagccatgccacttgcactacgacaaagacatgaccgtagtctgcatggaaggcccacaattttccacgcgtgctgagtccaagatgtacaggatgtttggtggtcatgttattaacatgagtgttatccctgaagcaaaactagcccgtgagtgtgaactgccttaccagatggtttgcatgtctaccgattatgacgcatggagagatgaggcagagcctgtcaccgtggaaaccgttattggtaacttgactaacaacgggcgtaatgcgaacctcttggcctccaagatcattgtgtccatggccaaggaaataccagagttcatgcacagcggcgatgggctacgcggttccatcaagaaatctatctccaccaaaccggaagccatgtccaaggacacgctagagaaattgagatacttatttcctgattattggtag

SEQ ID NO: 1688 - DNA, 906 bp, Saccharomyces pastorianus
atgagaagacaagcggaccaattggccctggacaacaacggtgtgtcggagttgctacaaggcacagaccgcacgaaaccctcatcgcaaacgcaaagtaccacaccagtgttcaagttgggcaacttcgaaagtcctgtgctcaaagagctgtcccggcgaacggtcaataaggagctggagacgcagaggatcattgcaaacgcgattgcatttgcgctttggaacctgctggtgaagttcatcagattcttccgagacaacactcatgttggtgcgcaattttgcaacaggttgtcccggctccatctatacctgctcacgttccatgcggtgaagcaggccaacaccgtgtactactcgacgttcagttggttgacggcggaacttgtcgactacgtgtgccagctagtgatctctctgaacattctattctccttgtggaagcttttgtccaccgtcaaaatcgccgatttgagcctgaccaaaaggcaaagaaagctcctgggtgtggatacgccgtcctctgatgacggcgagacgccacaacgagcacagcagcagcctcattacgtgcccaccgccaaggctcaaaaattggcacaagacaaaacgcatattcctcaaactagcactaaccatccagcatatctcttcaagggcctagagacgcctctaaaggcgagacaaagggaaacagcggaccaggcaaaactgcaacccaactccttactaacaagcaacgtttttggcagtctacaaagaggccaagctaccagcggcactctattgagaacggttaacaacagtgactcgccgcacacccctgtaataagaaagggctacattccaagtagtaaatacgcatacatgatgaattcacaaactccaagaaaaaaaatataa

SEQ ID NO: 1689 - DNA, 1158 bp, Saccharomyces pastorianus
atgggatttatagcaaatatactgtgctgctcttcagaaacctccaggattcgccgtcaacaccaacaaccagaaacccgccttaatcacagccacactcaccgccagaaacaaagccgaaagcaaaaagttactccagacgttgataagatgcaatattccacaccggagatcctgatacccagttccgatttaggaagtaacgtagatgccaaggctaaccacgataacggaaccagaagactggggctcttatcgagaaacgagacccacgagacccatgactcgtacgacgaggaaaaagaatacgaagattgtaacgagggagacgtggagatgaccgatgtcaacaatgccggtcaagacgaggcaaaagagaaggaagatcatgttgttcacgaatataacgtcgacgcggacagaaactcgagccttgtcgacgaagctccacaacagaaccagtatcaggttgaccaagaaactatagacccgcagtatctggccagcagcaccgatatcaatttgaacttgacgccaaccctagaggaggactttccagatttgatgcacttgcaaccagagcagtaccatgcccctggctacgacactctattgccacccaagctgcagccatttcaacagaagaagtgcctgatcttggaccttgacgaaactttggtacactcttccttcaaatatctgcacaccgccgatttcgttttgcccgtggagatcgatgaccaggtccataacgtctatgttatcaagagaccgggcgtggacgagttcttgcacagagtgagtcaactttacgaggttgtcgtcttcactgctagtgtctcgaggtacgcaaatccccttttagatacactggatcccaacagaaccatccaccaccggctttttagagaggcctgctacaactacgaaggtaactacatcaagaacctatcacagatcggcagaccgttgtcggaaacaattattctagacaactcaccggcttcctatatcttccacccacaacatgctgttccaatctcttcttggttttcagacactcacgataacgagttgctggacatcatcccccttttagaagacctttcagcagaaaatgtgttggacgtgggcagtgtgttagatgtaacgatataa

SEQ ID NO: 1690 - DNA, 543 bp, Saccharomyces pastorianus
atgacatcatacgaatttaagaccagcataccgaaagaaaccaatattctttcaagtgcatcacccgacggcaatgaattatatttgcaagctactcactttaacaatacaatcctattacaagttcgattaaatggagaaatggattccacttatgaggtgtccttaaaagggctaaacccgcttcttgatattgatccagtgccattagcaggaagcttaggaaacactggcgacaattatgacgatgagcaagatgaatttgtaagagatcatttatctgattaccaggtagttaccaaattgggagatagcagcgacccaaaagtacctgtggtatgcatacaaatcgctgaattatacaggagggttgtgataccagaagtgaacggcgcaatggttcaaggcaacatggaattcaacctgttgatatctatgagcagtaagatgtggagggctgcaaaaggacagaatgatgacgataacgattttggcaaattagtgtttttattaaagtgtatcaaagacatgtatgtaaaatga

SEQ ID NO: 1691 - DNA, 753 bp, Saccharomyces pastorianus
atgcctatcaaccaaccatccggacagatcaaattaactaatgtttcattagtgaaattgaaaaaagcccgtaagagattcgaagttgcatgctaccaaaataaagtccaagactatcgtaaaggaattgagaaagatctagatgaagtgcttcaaatacaccaagtttttatgaacgtttccaagggtttggttgccaacaaggaagacctacaaaaatgttttgggactacgaacattgatgatgttatcaaagaaattatgcataagggagagattcaactatcagagaaggaaagacaattaatgctcaataaagtgaacaatgagttgctaacaataatcagtgccaaatgtattaatcctttatcaaagaagagatatccgcccacaatgattcataaagccttacaagaactgaaattcagccctgtaatcaacaagcctgccaaattgcaagctttagaagctattaaattattagtctctaaacagataatcccgatcgtaagagccaagatgaaggtcaaagtggccataggcgagccgtcgaagcaacctgaacttatccagaaaatcaataaattgattactacatcaccacaagagccaacagatccggaatcgaatccatggacgtgtataggtcttattgatcctgtcaattatagagacttaatgaccctgtgtgataaaaagggagctgtacaagtcttggatatggcagtcatagataatacaacgcataactaa

SEQ ID NO: 1692 - DNA, 723 bp, Saccharomyces pastorianus
atgtggtcgtatttttttggtggagcatccggtagtgcgaagaacaaagagttgcctaaaaaggctatagtggaactgagggagcatatcaaccttctttccaaaaagcaatcacatctgcatacccaaatcacaaaccaagagaatgaggctaggatctttttgacgaagggcaataaggtaatggccaagaactcgctgaagaagaagaagatatacgagcaaaacttaagcaagttggaaggaacgatggaatctctggaacagcagctattctccatagagagcgccaacttaaacctggagacgatgagggccatgcaacagggtgctaaggcaatgaaatccattcacaatggtctagatatagataaagttgatgaaacgatggatgagataagggagcaggtagaattaggagacgaaataagcgatgctatatctagaccattaaacactggggcaaacgaggtggatgaagacgaattggatgaagaattagacatgctggctcaagaaaacgccaaccaagaaacgtccaagattgtcaataataacgtcaatgcggcaccggcagcagagaataaggtctcgttgcccaatgttccaagcaataaaattaaacagagtgaagcctccctaaaggaaggccaagaagaggacgaggaagaggacgaggacgaaagggcactaagggagttgcaggcagaaatggggctttga

SEQ ID NO: 1693 - DNA, 1023 bp, Saccharomyces pastorianus
atgaatataaaagatagaacttcagaatatcaacaaagcgtgttgagttacaagaaaagaaacaaaaactttaaacagcagcaaagagagcgtgttcaagagcaagaaaatggaaactctgctgacagcacaaccaagaatgggaaacccgtgtcagagtttcaaaaaaaagcctctggcatagcccatgaaatttcatctaccgcccaattactatctaaattagccgtcctggccaagaggaaaccaatgttcaatgataaccccatcgagattgcagagctgtcgttcttaataaagaggaagatctacgccattgaacagagcctagtacagttgagtcagctcaagaagaacgacgcgaatggcaacgcatcaaatcaatcttctagccaaccaaacgccgtacagcactccaaaaacgtcgtaaaccttctaaacacgcaaatgaaaaatatatcggggaatttcaaagacgtattggaggaaagacaacgattggaaatggcaaacaaagacagatggcaaaagctctccaccgacacggaacacgcccaaacagaagatcatacacagagcaacaatgtagtggatatgaccacctacaacaactccaacccgttcatgacttcgttactcgatgagtccgcagagaagaataaaaactcatccaaccaaggtgaactatctttccctcaaaacgattctcagttaatgctaatggaggagggccaactatccaacaacgtctacttacaagagagaaacagagctgtggagacaatagaatctaccatccaagaagtggggaaccttttccagcaactggcctccatggtccaagaacagggtgaggtcatccagagaatcgatgctaacgtagacgacattgacttgaacatcagcggtgctcaaagagaactgatgaagtacttcgacaagataaaaagtaatagatggttagccgcgaaggttttctttgtcatctttgtattcttcctgttttgggtcctagtcaattag

SEQ ID NO: 1694 - DNA, 1776 bp, Saccharomyces pastorianus
atgggtaagtataccaagaccgcgattctgtcagtttatgataagacaggtttattagacttagctaagggattagtggagaacaatgttcatatcctagcatctggggggacagccaacatggtcagggaggccggtttccctgtggacgatgtttcttcaatcacacatgcgcctgaaatgctagggggcagggtgaaaactttgcatcctgcagtacatgcggggatccttgccagaaatctagagagtgatgagaaagacttgaaggatcaacacatcgacaaggtggattttgtcgtctgcaatttgtatcccttcaaagaaactgtggctaagatcggtgttacggtacaagaagccgtggaagaaattgacattggtggagtaactttattgagagctgctgcgaagaatcattccagagtcactattttgtcagatccgaacgattactctagcttcctacaagatttgaccaaaaatggtgaaatatctcaagatctaagaaataggttcgctttaaaggcattcgaacacacagccgactatgatgcagcaatttctgattttttcaggaaacagtactttgagggaaaagctcaattaccactaagatacggttgtaatcctcatcaaagacctgcacaagcttacatcacccaacaggaagagttgcctttcaaagttctttgcggtacgccagggtatataaaccttttggatgccttgaactcgtggcccttggtgaaagagttatcggcgtcattaaacctaccagccgcagcatcgttcaagcatgtctctcctgctggtgctgcagtgggtattccattgtctgatgttgaaaggcaagtttattttgtaaacgatgtggacgatctatcaccattggcatgcgcatacgctagagctcgcggtgcggacaggatgtcatcatttggcgatttcattgccctatctaacatcgtggacgtcgcgacggcaaagatcatctccaaggaggtttccgatggtgtgattgcccccggatatgaaccggaagcattgaagatattatctaagaagaagaacgggaaatactgtatcctacaaatcgacccgaactttgttcctgggcaattggaatccagagacgtttatggtgtaacactacaacaaaagaggaacgatgcgattataaaccagtccactttcaaggagatcgtgtccaaaaataagggactaactgagcaggccgtaatcgatttaaccgttgccacgttagttttgaagtacacgcagtcgaattccgtttgctatgccaagaacggtatggttgttggactgggagctggccaacaatcgcgcatacactgtactagattggccggggacaagacggacaactggtggctaagacaacacccaaaggtgctgaacatgaagtgggccaagggaatcaagagggcagacaagtccaacgcgatcgatctctttgttacagggcaaaggatagagggtccagagaagacggactatgaaagcaaattcgaagagatccctgaacctttcaccaaggaggagagactggaatggctgggcaaactaaccaacgtgtcgctatcgtccgacgcgtttttccccttcccagataacgtttatagagccgtgcagtccggcgtgaagttcattgctgccccatcggggtccgtcatggacaaagttgtgtttcaagcggcggattcattcgatgttgtctacgtggagaacccgatccgtctgttccaccattag

SEQ ID NO: 1695 - DNA, 615 bp, Saccharomyces pastorianus
atgggtgcctacaaatatttggaagaattgcaaagaaagaagcaatctgatgttttgagattcttgcaaagagtcagagtctgggaatacagacaaaagaacgtcattcacagagccgctagaccaactagaccagacaaggctagaagattaggttacaaggccaagcaaggtttcgttatctaccgtgtcagagttagacgtggtaacagaaagagacctgttccaaagggtgccacttacggtaagccaacaaaccaaggtgtcaatgaattgaaataccaaagatccttgagagctaccgctgaagaaagagttggtcgtcgtgccgctaacttgagagttttgaactcttactgggttaaccaagattctacttacaagtacttcgaagttatcttggtcgaccctcaacacaaggctatcagaagagatgctcgttacaactggatctgtaacccagttcacaagcaccgtgaagctagaggtttgactgccactggtaagaaatccagaggtatcaacaagggtcacagattcaacaacaccaaggctggtagaagaaagacctggaagaagcacaacactttgtctctatggagatacagaaaataa

SEQ ID NO: 1696 - DNA, 3516 bp, Saccharomyces pastorianus
atgagccagatcgagcaggaggaaagtaaaaggtttttcaatgatgagcttgatacttcggaggtgtcattgaattttaaatctgagaataaagagtcatttctatttgcaaatagcgataatgataaggaatccgtatcagtcagtgaaactccagaagacgaaggtgaaaaaacctttccatcggcagtgaaggaagttgttaaagatgaccaagatcagtttattggggagcttcagagaattatcccagagatgccaatgagtcttgcagtggaactgaatgaaaagttcagtagccagtctgaagggctctctttggcattgtctcactactttgatcattataatggaaaacttggcggtaatttgccgtcttccccaacccaggtaaacacaagccctgatacttctatttcagccttatccccctctccatctcatgttagaaaaagaaaaaattacggtttcagaaatcaaacgcgattagaagatgatattaattggaaaaggtttataggtgctctgcaagtcactggtatggctacaaggcccaccgttagacccctgaaatacggttctcagttaaagctaaaaagatcaagtgaagagatttctgccaccaaagtttatgattcacgaggcaggaagaaaacctccatggccagtctagtcagaatatatgatatccagtataatagagaaattggccgagtccccgaagacatcgctcaaatactatacccccttttaagctcttcagaaataagttttgaagctacgttagtcttttgcgataacaagcgtttgagcataggtgacagctttatcttacaattggattgctttttgacctccacaatttttgaggaatcatcgaacgatgatctatctttcatgaaaaaaagacgtacagaaagagacaataaaagagaaaaagacaatactagatttggtagatcattgaccgaaaccgatgaggagctggagaatcgttcgaagagactggctctactaaagttatttgataggttgaaactaaaacctattttggatgaacagaaggcattagaaaagcataaaatagaacttaatagtgacccagaagttattgatatagatgatgacgagataaacgctgaccaagtgactgaggtccatgaggacccccggaatacccaacatgaagaagaaacaatgaacctaaatcaactgaaaactttctataaagctgcacaatcttcagattctttgaaaagtttacctgaaacagagccttcccgtgatgttttcaaactggaattacgaaactatcaaaagcaaggtcttacctggatgttgagaagagaacaagaatttcctaaagccgcatctgatgaggagactttggaaacagatgctaatatgataaaccctttatggaagcaatttaaatggccgacagatatgtcgtgggcatctcaaaaggccagacaagatcatgttaatttggaagacgatatattcttttatgcgaacttgcattctggtgagttttcattagcaaaacctatattgaaaacgatgataaagggtggtatcctatcggatgaaatgggtttgggtaaaactgttgcagcatattcactaattttatcttgtccttacgataccagtgctgtcgacaagaaacctttcgatgttaagactacagaaggtgctgatgatattcctagttcctttacatcatcttcacaagataacaaaaagccttatgcatctaaaacaactttaattgtagttccaatgtcgttattgactcaatggggtaacgagttcacaaaagctaacaattcgtctgatatgtatcatgaagtgtattatggtgggaatgtttctagcttgaaaacattactgacgaagactaggaatccgccaactgtagtccttactacatatggtattgttcaaaacgaatggaccaagcattctaagggaatgatgacagatgaggacgtgactataacatctgggttgttttctgttgacttttatcgtataattattgatgaaggccataatataaggaacagaacgactgccacatccaaagccattatggatttacaagggaaatgtaaatgggttttaacgggtacaccgatcattaacaggcttgatgatttgtacagtcttgtgaagtttttaaaattagacccctggcgccaaatcaactattggaagacttttgtatcaacgccctttgaaaataaaaactataaacaagcatttgatgtggtgaatgcaatcttggaacctgtcttattaagaagaacaaaacagatgaaggacacagatggtaacttattagtagagttgccgccaaaggaagtcgtcattaaaaaattaccgttcagtaaatctcaagatgtattatacaagtttctactggataaagctgaaacgtccgtgaaatcgggaattgcacgaggtgatttgttaaagaaatactctacgattcttgttcacatcttgagattaagacaggtctgttgtcatccagaacttattggaacccaagatgagaacgacgaggatttgtccaagaataataaattagttacggaacaaactggggagctcgatactttggttcgtgtaacctccgaaagattcggtagctctttcaccaaggaagatttagaaacagtgatggaaaagttgagattcaagtatccagataatgaatcacttcaactgttggaatgttctatttgcacagcggaacctattaacttggataacgtggtattcactgaatgtggtcacagtttttgcgaaaaatgtttatttgaatatgtcgagtttcagaacggtaaggagcttcctttaaagtgcccaaactgtcgtgaagcaatagatgggagtcgtttactggccttgaggcgacaaaatgtcagtccaggaaacgtggaatttaaagcatatacctctgcatcgaagtcaagtaagatcactgccctaatgaaggagcttcaattgctacaagatagttccgcaggtgaacaagttgttatattttcccaattctctacctacttggacatcctggagatggaacttactcacgctttccccaatgacgtcgccaagatctacaaatttgatggccgtctttctttaaaagaaaggactagtgtactagctgatttcgctgttaaggactatagcagacagaaaatattgctactgtcactgaaagccggtggtgtgggtttgaatttgacttgtgcatctcatgcctacatgatggacccatggtggtcacccagcatggaagaccaagctatagatcggctccatagaattggacagacgagcagcgtgaaggtcgttagattcattgttcaaaatagtatagaggagaaaatgctgcgcattcaagaaaagaagagaaccattggtgaggccatggatgccgacgaggacgaaagaaggaaaagaaggattgaggaaattcaaatgctgttcgagtga

SEQ ID NO: 1697 - DNA, 1503 bp, Saccharomyces pastorianus
atgacggaaagcgtggatgacaggactttcaaagatcttttggtgaatgtgcaatccattctgattgctgcttccgtaaaatgtcgcgtagtagatgagagtttcccagccaagttctttgagaaaaatccggataaaatatatgaatcgtattgtaagttcattaggaatagaagcaactcggaaggctccatacgtaatgaggataagctggctttaaccaccatcaataagaggtttgaagatggagagtatgagcctgtgcaaggtgggttttacaagctgtatcacgatatcaaattggtctgtacaatgctcatccacttttacccgcagggcacaaggaactaccagttagttgacaagttctacaaattctcctctgaacttttattacgggaatgttttagaataggaattgccttaacacaaacaaataaatcgaagtcaagaagtgggaagattttaggtgggaacgaggcggatgactacgatgatgatgatgctacagaactagacaagactatctccaatgactttatcaagatctctatgaactattctctaccaatttctcaaacatttcatataaaaaccaaagatttggatcttttctcgtcgatcatttctaaatctaaccttgataaaagaccccatgaattgcccaacacaaactttaaaataaacaatgtcataccccaaactgacatagaaaatgaagcccctagattagggtttgtgggcgctaatactagtaatattccggatccgactctaccaccgactgagatgatgactaggtttttgcatcctaactggtatgcactacctacgactgtttggttgaaatatgggaactacaattcttgggccccttcctttaatgaaaacggtacagttgtggactcaacaacaagagggcttatttggcttgaaagaataggttacatggacttgtatgaaacaagcgaaaaaaagacgacgcaagaggagaaactggatgcgaatgaagatgacaaaaatattgaacagaaacatgaccatgaggttgttgatggcaagattgatggtaccgaaagtgttgatgacaatgatgataatgtaagtaccacctctaagaatactgagggcactgaagataacgaacagactataattaagcttcaaaatctgtataattggacaccatcgaatcatattggggatgatgaagtcgaaagcttccaaaatggtacgccagataagttagtttcagagtcccttttaaaactaaaacaattaagaaaagagcggattttaaatagagtttccaagcccaccaccgaggagagagaagtatattttaaagtgaagagaatactaaaggaaattattttggccaaaaaagtttccaagttaccaataaacagtgtaagggcattcccagtcttacaaacaaactacaatggcagtatacccgtagtaagggcccaaccaggtcgtaaaaggaaacacaagaaatga

SEQ ID NO: 1698 - DNA, 1422 bp, Saccharomyces pastorianus
atgcggtcctatacggaaattcttcagaaattcgttaggttcattgggccagggatcctggtcagtgtggcctatatggacccagggaattatgctactagtgtttctggtggtgctcagtacaaatataccttattgttttccattttcatatcgaatatctttgctgtgcttttacaatgtctttgtgtcaagctgggtactgtgacgggttatgatttggctgaaaactgtcgtcataatctacctaagaaactgaactatactctttacttttttgctgaagtggccatcatcgccactgatttggctgaagttgtgggtactgccattgccttgcaaattcttttcaagataccactgacttggggtgtcttattaacggtgttggatgtcctagtaatcttaatgttctacacaccaaacggtcagtctttgaaaaaagtcagagtatttgaatttggtgttggtatcctggtcatcggtacttgtatttgtttcgtcctagaattgttcaagatttctattcccgataaagctgaactgtttaaggggtttttgccttcgactattatcttcaaagagcaacaagctctttatatctccttaggtatcttaggtgccaccgtcatgcctcattctttgtatttgggctcgtccattgttaagccaagattgcatgattatgatatgaagaaatatgggaaggttaatgatcgtccaagcttaagcgctataaaatactcgttaaactacgcttacgccgagttaatcatctctctgtttttgatcgctactttcgttaattccgctattttaatcgttgcaggtgccactttatctggtcaacctgaagcagaggatgctgatttattatctatttacaaattgctggtccattacatatcacccgcagcaggtttgatctttgcgttagccatgctatgctcaggacagtctgcaggtatcatttgtacacttgctgggcaaatcgtttcagaagggtttctgcaatggtctttaccaccttgggccacaagattgtgcacaagattaatcgccattgtaccatgtgtatttgttactttaaccatgggtgaaaaaggaatttcagatattttgaatctctctcaagtggtattatcgttgattttaccaatcgtttcagcgcctttgatttactttaccgcaaataggaaactaatggtcgttcatgatgaaaatggagtggtgagggctcccaacgatgctaacacaatcacagacgaaactactccattgaattccaagcacagtaaaatcgtcgattttacaaacagtcgcttattaacctatacctccattttcgtgtgggctttaataggtagtttgaactgttatctggtgatttcgttctgtttaggtgctgacatccacttttag

SEQ ID NO: 1699 - DNA, 252 bp, Saccharomyces pastorianus
atggctgatcaagaaaacaccccattacacacagttggtttcgatgccagattccctcaacaaaaccaaaccaaacattgctggcagtcatatgtggattaccacaaatgtatcaatatgaagggtgaagatttcgctccatgtaaggtgttctggaagacctacaatgctttatgtcccctagactggattgaaaagtgggatgatcaaagagaaaagggtatatttgcaggtgatatcaatgtgaattaa

SEQ ID NO: 1700 - DNA, 705 bp, Saccharomyces pastorianus
atgagatttactgctgctttatattcctttaaaaacctcttctcattaggcttgctggtcagccattgctctggtgcacaggcaataacgtccagtgcagatgagaatacactggccaggtccgccgctgcagatgctgatatgccgttcttcctggtatttttggaggatttcgaaaccgcatttccacagtatacttcatacatgatgcagaaccatctgacccttcctcaagctgttgctgactattactaccatattgctgacttagcctcaacggctaatctggaatctgatattgctcagagtttcccgttcacgcaattcaaaacatttattacggccttcccatggtatacctctttgctagaaaaggcttcggctacgactatatatccaccgcaacacttcctaacagatgacacgcagcctagcgaaactagctccgcctattccagtcggacagcctctacttccacagaaaactctattgcttcatccacagcaagcacgagtcagcccatattttcaaattccaagtcacatgataactcgacgttttctagtactaacgaagatacggcctcaacatccacagaaaagtcttcatcaatctcgtcaaccacacaatcacaaaacggtgcccgcacaaatagcttgtatttccccatggcgttatttggaatccttgccgcagcgctttaa

SEQ ID NO: 1701 - DNA, 480 bp, Saccharomyces pastorianus
atgaagatcagccaattaagtgctctagcttttattccaattgccctattacaattactagtcgttcaagcgcaacttctcacggatacaaatgctcagaatttaaatacggccttgggccaaaaggtgcaatacacctttcttgacgctgggagttccaacgatcaattgcttcatcttccaagcacgacgccttcgtccagtgttataactaatagtttggcaatggctaatttcaccggatcttcctccttcccagtagtgacttccagcgtcatctcatctatagactaccaatccgcaaactctactataaccactcagcttacaacgtccccatcttcgtcagcaaactacacaacgagctcccacacaaccaaaactataggctcaagtacaagtacgggtgccgcaggttcaatcaagccatgtttttactttgttgtactgttagaaacaatcgcttatttgttttcctaa

SEQ ID NO: 1702 - DNA, 312 bp, Saccharomyces pastorianus
atggttacccaattcaaaactgccagtgaattcgactctgcaattgctcaagacaaactagtcgtcgttgatttctacgccacttggtgcggtccatgtaagatgattgctccaatgatcgaaaaattttctgaacaatacccacaggccgccttttacaaattggacgttgacgaattaggtgaagttgcccaaaagaacgaagtctctgctatgccaactttggttcttttcaagaacggtaaggaagtcgctaaggttgttggtgctaacccagctgccatcaagcaagccatcgctgctaacgcctaa

SEQ ID NO: 1703 - DNA, 1692 bp, Saccharomyces pastorianus
atgtctgaaattactttgggtaaatatttgttcgaaagattgaaccaagttaacgttaacaccgtcttcggtttaccaggtgacttcaacttgtccttgttggacaagatctacgaagtcgaaggtatgagatgggctggtaacgccaacgaattgaacgctgcttacgctgctgacggttacgctcgtatcaagggtatgtcctgtatcatcaccaccttcggtgtcggtgaattgtctgccttgaacggtattgccggttcttacgctgaacacgttggtgttttgcacgttgttggtgtcccatccatctctgcccaagctaagcaattgttgttgcatcacaccttgggtaacggtgacttcactgtcttccacagaatgtctgccaacatttctgaaaccactgccatgatcactgatatcgctactgctccagctgaaattgacagatgtatcagaactacctacgtcacccaaagaccagtctacttgggtctaccagctaacttggtcgacttgaacgtcccagctaagttgttggaaactccaattgacatgtctttgaagccaaacgacgctgaatccgaaaaggaagtcattgacaccatcttggctttggtcaaggacgctaagaacccaattatcttagctgatgcttgttgttccagacacgatgtcaaggccgaaaccaagaaattgatcgacttgactcaattcccatctttcgtcaccccaatgggtaagggttccattgacgaaaagcacccaagatacggtggtgtttacgtcggtaccttgtctaagccagaagtcaagaaggctgttgaatccgctgacttgattttgtctgtcggtgctttgttgtctgatttcaacaccggttctttctcttactcttacaagaccaagaacattgttgaattccactccgaccacatgaagatcagaaacgctaccttcccaggtgtccaaatgaaattcgttttgcaaaagttgttgaccactgttgctgacgccgccaagggttacaagcctgtcgctgtcccagctccaactccagctaacgctgctgtcccagcttctactccattgaaacaagaatggatgtggaaccaattgggtgaattcttgcaagaaggtgatgttgtcatcgctgaaaccggtacctccgctttcggtatcaaccaagttgctttcccaaacaacacttacggtatttcccaagtcttatggggttccattggtttcaccactggtgctaccttaggtgctgctttcgctgctgaagaaatcgacccaaagaagagagttatcttattcattggtgacggttctttgcaattgactgtccaagaaatctccaccatgatcagatggggcttgaagccatacttgttcgtcttgaacaacgatggttacaccattgaaaagttgattcacggtccaaaggctcaatacaacgaaattcaaaactgggaccacttatccttgttgccaactttcggtgctaaggactacgaaacccacagagttgctaccaccggtgaatgggacaagttgactcaagacaagtctttcaacgaaaactccaagatcagaatgatcgaaatcatgttgcctgtcttcgatgctccacaaaacttggttgaacaagccaagttgactgctgctaccaacgctaagcaataa

SEQ ID NO: 1704 - DNA, 486 bp, Saccharomyces pastorianus
atgaaatttggacgtcgtgagcaacagttttacctgtggtacttcatcgtgcacattccgataacggttttcatcgattcatcggtggtcatccccccaaaatggcaattggggtttgcgcaaaaggtcgtcaacaatcacattgcaaagcaacacgattttttgctgtcagagaagccaaactggctatactggtttgttcttcttgaactggttttgcaactgccccttttcggctatttcgttgacaaactctggaacttgaacaaattacaagtcaatacggacaacaagctactaacctggctgcggatctatggttggaacgcctcgctaactacgctagtgtgtatcatcgtcatcttccagcgtggttacatcccttacgatgtgctaagaacagctctgaccacgacccagaagtgccaactggcctccgtatacttacccacgtttctcattccgctgcgcctgtgtcttttatag

SEQ ID NO: 1705 - DNA, 651 bp, Saccharomyces pastorianus
atggatcagagtgtggaagagctatttggagcattgcgagatgctagtgtgagcctgaaagcaagaagctcatcgaaagaggaaggttcattcgaacaagacgatgttttgcagatagacaagaacgacgatggagtagataccgaaagcaagttccaagagatcgaagccaatttaaagaaactccccaagttggaaaacggattcgatgccctagccaagaaaaagacgaagaagggcaagttgcccagtatcgagatagaggaaggaaacactaagaagagtaagaaggatgacagcgactggttcgccttacccaagccggatgacaacatgcgccgtgaagtccagcgagatttgctactgattaagcatagagccgccctggacccaaagagacactacaagaagcagcgttgggaggtcccagaaaggtttgccattggtactatagtcgaagacaagaccgagttttatagtagtcgtatgaacaagaaggaaagaaagtccaccatcctagaaacgctcatgggtgacgatacctccaacaagtacttcaagcgtaagtataccgaaattcaggagaaggccactagtggcagaaaggcacatttcaagaaaatgaaggaaatgaggaagaaacgcaaatga

SEQ ID NO: 1706 - DNA, 759 bp, Saccharomyces pastorianus
atgcagttcgaagagcttctcgacacagacaaacaagtacaatacgctcatgcagccaccctacactacaagaacaccaaaaccccagatttcttggaaaaggacacacatcacaagaagtttcacactgtagaaagcttgaaccaacaaagttcatcgaccccgcctacagccactgatgcgacttccgcctctaccttttctggtcacaccaatagctcgactttcaaaagacacattgtagccgtggacgatatatcgaaaatgaactatgaaatgataaaaaattccccagggaacgtaataaccaacgccaatcaggatgagattgacataagtaccctcaagacgaggttatacaaggataacctctacactatgaatgaccagtttctacaagctgtcaatgaccaaattgtaacactaaatgcagcagagcaagagcaagagcaagagactgaggaagttgatttgccagatgatgaaaaaatcgatatactgtccaagatccaagaaaacctactcgacgagtatcaaactctttcacaaaaggaacgaaaatggtttgttttgaaagaattgctattggatgccaatgtagaactggatttgttcagtaatcgcggaaggaaggcaaaccacccaatcgcattcggagcagtggccatcccaaccaatgttaatgctaattccctggcgttcaatagaacaaagagaagaaaaatcaataaaaatggtttattggagaacattctttga

SEQ ID NO: 1707 - DNA, 1785 bp, Saccharomyces pastorianus
atggacgaggttgacgacattctgaacaataaccaggtggtggacgaagaggaggacgacgaagagatgctgagtgggctggaaaatgactctaagcaggacctcgaggggaacgatgacggtgatgatgatgatgacgacgacgacgacgagcaggaagaagaagatgagcaaggcgatgacaacgatgatgataccgcaaaggaaggcaagaccgatacgtctatggacgaccagcgtgttggccgagagtcttctgctgctgcatcggcatcggcatctgctgttgctgctgctacggacggctctgaagagggtgaaattgatgatggtgatggtaacggtgatgatgatgatgaagttgaaaataaagatgaggaagtgaaacctgaggagtcttctctaaatggagaggtgtacgagtactacaagcacatgttgcaggctgcacagatctctgactcgtacaatatctaccccacggcagctatccccattcagacgcacgtcaacgcgctagcggtgtctagagggctcaggtacctgttcctgggcggcaacgacggctacatcaggaagtacgacctgctgaacacgctcgaggggaagctgtccctgacgattttgcagaagcattcgctggctgagtctatccagaatgcaggtatattgcaatcgtactgggtgaatgagatcccgcaaaaaaaatcggaaatgaagctctctgccaacaaggccgagtacgagcccaaagtgagtcccgttcactcccttgaagtgcaaagcgagtgtctctttattctaagcgggctgcagaatggtggtatcaccatgcagggcgttcgatatatggaggggagcattgcccactatttcaagggcaggaacggccacaaccagatcgtcaatatcctgaaactgaacggccaagaggacagatttctcagcggttcctgggataaacgtctcttggaatgggacttgcaaacaggtgatatcgttaacgaatttcagaaatcaaggtcagagttgtcgtctttggaaatgcgcccactgttttcttccgttgatgtttccagtaacgtcaacaacggcaaagagaacgaaaacgccgatgacgatatggattcgctgttcggtgatgaagacgaagatgaaaagcaagataccgacaacgaccccaccaaaacggacaacgcgtctcatgacgaacaaagcaaggaacagatatgcagagagtctttaaatacagtctatgacgaatcggtgttcatgacttccggattgaacggctcaatacatatttgggatcgacgcacgacccagtcgcccgcattgaacctggaaagaggcccaaacattccaccatggtgtctgtcagcgtgttggggagtagatggtgatcatgtgtatgcagggagaagaaacgcttgcgtggaacagtttgacctgaaaatgccctcgaaaccaatgcacaacttgaaattgccgtccatttcgggtcccgtctcctgtgtgaaagccatgcccaataacaaacacatactatgcgcatccagagataacattagactgtacaacgtggatgtcgcagtggcagcttcaaatccctctaccaagagttctaaagtaccgttcctcatcgttcctggtcatcacggtggcattatatcaaacttatacctcgatccaacttcaagatttttaataagtactagtgggaatagaggctggcaaggtaattctactgatacgacgcttatatacgatatagacttagaatag

SEQ ID NO: 1708 - DNA, 1098 bp, Saccharomyces pastorianus
atggatttggtcttggaagtcgctgaccattatgtcttggacgacctgtacgctaagatcctacccacgtcgctggctgccagcatccctgccaaatggcagaactggctgactttgaacagcgggtttaccaactctaccatcttgcaacagacgctgaactctaagaatgccgtcaaggagtgcagaaaattctacgggcaggtgcccttcctgttcgacatgtccagcactacatttgcgtcgcttttaccccgttccaacctgataagagaatttttttcactatgggccatcgtcaccatcttcggtcttctactgtacttgttcaccgctagtgtcagttatgtctttgtcttcgacaagtccatcttcaaccatcctcgttacttgaaaaatcaaatggccatggaaatcaagttggccgtcagcgccattccatggatgtcgatgttaactgccccatggtttgtcatggaaatgaacggccactccaagctttacatggacatcgactacgaaaaccacggtgtgagaaaggtcgtcatcgaatacttcaccttcatctttttcaccgattgcggtgtctacttggcccacagatggttgcactggccaagagtctaccgtgctctacacaagcctcatcacaagtggttggtctgcacaccttttgcctcccattctttccaccctgtggacgggttcttacaatccatctcttaccacatctacccattgatcctgccattacacaaggtttcctatttgattctgtttactttcgtcaacttctggactgtcatgatccatgacggccaatacttgtcaaacaaccctgctgtgaacggtacagcgtgccacacagtccaccatctatatttcaactacaactatggtcaatttaccactctctgggatagactgggtggttcataccgtagaccagatgactcattgtttgaccctactttgagagactccaaggagacctgggatgctcaagttaaggaagtcgaacagttcatccaggaggttgaaggtgacgataatgatagagtttatgaaaacgatccaaacatcaagaaaaataactga

SEQ ID NO: 1709 - DNA, 2547 bp, Saccharomyces pastorianus
atgtccctagcacggctagtgtactctcttttcagaaaagtacgatcggtccttctgctattcattaccatatcactattattctattatacgttccaaaatgaaatcgatatcctaaattcgtatgctttaaacgattcgctgccatctataaacaacaacgagcacgatacggagacatccacgaacttggagtctgcaaccctatactcatccatttctgaccgaatttccgctgataagggcaacagcaatattattctggatttgtctgatcctgctacgttaagagagaaaaacaagtactttccgctgctaataaggaaatcttccaacaaaattggttcgaactcaccaatctcatctctactgacattcaaggaaaaatatgccgtcttgtttgaatattcattgccttctcaaacttccgcaacccaggatgaggcccacaaagtccaacacaatatgcaattaactccagattttgccatggttcaacaggtcaaagaaattttcatgaaatcgtgggaacaagagcaattactactgaaaagtaaattaaaaagagaatccacatggcccatagatctaattgattctctagatacattgtatttatgcggcgaaactaagctttttcaagattcagttaacctaatagaagatttcgactttcggatacctccactggcagtagaagttattgatattccagacgtcactaaccgcgtacttgaagggttgctatccgcatatgaattatccatggataagagactgcttactaaagcaaagcaagtggcagatttcatattacggtccttcgatactcccaatagggtccctattttaagatttttttggaaatctgacttgagaaataggtttcccgatcgtgagactccctcgggtcaattaactacaatgtcgctcgcattcattagactgtcacagctcgctcatttgaataagtattttgacgctgtagaaagagttttcaccacaatacgacaatcctataatgaatttgatatggatttcatgttacctgacgttgtagatgcatctggctgccagctgctgacttcaagggaaattgaaaagggcgtacacataaaggggtccggtatcatgaaaagcatcaatgaagatttcaaattcgttcaatgtcaacagctaggtatatttttgagctctccttcgcttgacgactctcaagaacaacctcgatatcagtcttatggaattaatgaaaagacaataccgattttggagaatttgctcaagattgatgatcttttccaatcctcttacgatattttgggcggatcaagtaagaacgccaaccctgcgacggaggatgctaacgccaatgatgatatagtagaagacggtgaatatattgagaaaaggaatttgaaaagcggtcagaaaaaggaatcagcagaaaatgctttgaatggtaaatcggtaatagactcgcaaatgtttctaacgtactcaataagtcatatttttaaattcatgactttccaacccatgttccccaagcaaaagggaaatccaacagttaaatttttaagttccgtactgacaaaatctcaatttacgcccgcaaccaatgagttggatgtcacggtaaaaagatcatacaacgtttcattaaactcttgcaggcttggcggcatcctgggtttaagttcacgtatttcccctcaaggcggtgtcaacagcaaatatatcttaccatcgtcactattggaaatgagtgaaacaattacacagagttgttttgcattaatgaaagagtttgacgggctggtccctcaaaaacttcaattggacccttgctctgacgacaaaaatgagggttgcgaatttaatagtgaagtcaaatctcaaatgattatcggtggtgaatatgagatccttgaaaatgaccaggatactggaatcaaagtttggaaccacggtacaaatggagataaccatagagtaaagagaaatataatagcaggggacgaactagtagaaaacgaaagcattaaataccacacccttggaaaaacaaagtctgccactgcagcgaatgatgacgaaataacgcaaatgcgtagagtttacacatttggcaaagacatcaaaccgcatataacgaaggatgatattgttggttacaaatggacaaaccatccggactggccattgtgggtcaacaaagtggaatcgagaagactattggattcgaatattatcgaatctatattttatatgtatagaatcagcggagaagaaaaatggagaagcatgggcagacaatcgtttgaaatcctgctgagagagctaatgaaattaaacagtggtgccaagggaatgtggcaggtaaaggaattttatgaaaacggtgaaaagacaaacaatgacttacctagctattggttttccagaacattaaagtattacttgttactatttagtggtggggatacaatttcattggatgagtacatcttaactcaaggtggccatataattaaaaagaaatga

SEQ ID NO: 1710 - DNA, 1410 bp, Saccharomyces pastorianus
atgccttacactctatccgacgctcatcacaaattgatcacctctcacttgatcgacactgatccagaagtcgactccatcatcaaggatgaagtcgatagacaaaagcactccatcgatttgattgcttccgaaaacttcacctccacttctgtttttgacgctcttggaactcctttgtccaacaagtactctgaaggttatccaggtgctcgttactacggtggtaacgaacacattgacagaatggaaattctgtgtcaacaaagagctttgaaggctttccacgtcactgctgacaaatggggtgttaacgttcaaactttgtctggttccccagccaatttgcaagtttaccaagccatcatgaagcctcatgaaagattaatgggtttgtacttgccagacggtggacatttgtctcacggttacgctactgaaaacagaaagatctctgctgtttccacatacttcgaatctttcccatacagagttaacccagaaaccggtattatcgactacgacactttggaaaagaacgccatcctatatagaccaaaggttcttgttgccggtacctctgcttactgtcgtttgatcgactacaagagaatgagagagattgccgacaagtgtggtgcttacttgatggtcgacatggctcacatttctggtttgatcgctgcaggtgtcattccatctcctttcgaatacgctgatatcgttaccaccaccacccacaagtctttgagaggtcctcgtggtgctatgatcttcttcagaagaggtgtgagatctattaacccaaagaccggtaaggaagtcgtctacgatttagaaaacccaattaacttttctgttttcccaggtcaccaaggtggtccacacaatcataccattgctgctttggccactgccttgaagcaagctgctactccagaattcgtagaataccaaactcaagtcttgaagaatgctaaggccttagaaagtgaattcaagaacctagactacagactggtttctaacggtacagactcccatatggttctagtatccttgagagaaaagggtgttgacggtgcccgtgttgaatatatctgtgaaaagatcaacatcgccttaaacaagaactccattccaggtgacaaatccgctttggtcccaggtggtgtccgtattggtgctccagctatgaccaccagagggatgggtgaagaagacttccacagaatcgttcaatacattaacaaggctgtcgaattcgcccgcgaagttcaacaaagcttgccaaaggatgcttgtagattgaaggacttcaaggctaaggtcgatgaaggttctgatgttttgaacacttggaaaaaggaagtttacgactgggctggcgaatacccattagctgtttaa

SEQ ID NO: 1711 - DNA, 810 bp, Saccharomyces pastorianus
atgaagtggttattacttccggtcacacgcatagcaaatatccgccctagatttgtatctccgtgtataagatccgtttcacagtacttacgacgtcgaaccctccaaaattcgcccgcaatggcacaaacacccgaacttaagaccaagctgttcaagcccctggtctggatcgattgcgaaatgaccggcctggaccacgtgaacgaccggatcatcgaaatctgctgcattatcaccgatggtcatttaacgcccgtgcaggcgccagatggccaagcggagtcgcactacgagagtgttgtccactatggtcctgaggtgatgggcaaaatgaaccagtggtgtgtcgagcaccacggcgatagcggtctcacagccaaagtcttggcgagcgagaagaccctggcccaggtagaagaagagctgctcgcctacatccagcgctacattccagacaagaacatcggtgttttggccggcaacagtgtgcacatggaccgtctgttcatggtccgcgagttccccaaggtcatcgaccatcttttctaccgaattgtcgacgttagtagcatcatggaagtcgcccgcagacacaacccggccttgcaagcacgcaaccccaagaaagaagctgcccatacagcttacagcgacatcaaagagagtatagctcagttacagtggtatatggataactatctgaagccaccacaggagacagagtcccacgagtcaactgcgtcgcagcaaccagagtcagcgtcttcgtcaacctcttctctaaagaggccacgcaccgatttttga

SEQ ID NO: 1712 - DNA, 1788 bp, Saccharomyces pastorianus
atgcctaccgtctctgtgaacaagcagcaactgtttgaccttttgggcaagaactatacctcccatgaatttgacgaattatgttttgaattcggtatcgaaatggacgaagataccaccgaggaggccttgaaaactggcgaagagcccgaattgaagctcgacattagtgctaaccgttacgacttgctttgtatcgagggtatttcccaagcgctaaatgagtacttggaacgtaaagaaaggcccgattataaattaagcaagccaaccaccaagttgatcattgacaaatctacggaacaaatcaggcccttcgctactgctgctgtgttgagaaacatcaagctaaacgaaaaatcgtatgcctctttcattgccttgcaagataaactacatgccaatctttgtagaaacagaagtttggttgccatgggtacccacgatttggactccattgaaggtccattccattatagagctctaccaccaaaggatattaaattcgtgccattaaaccaaacccaagaatttactggtgacaaattgatcgagttctacaagtctccagaacagaaaaacaacattggtaaatacgttcacatcatcgaagattctccagtcttcccagtcatcatggacagcaaggaccgtatttgctctttaccaccattgatcaacagtgaccactccaagatctccgtggatacacgcaatatcctaattgatattaccgccaccgataagaccaaagctgaagttgttttgaatatattaaccacaatgttctcacgttactgtgacgagccattctcagtggaacctgtggaaattgtttctgagcacaacggccaatctcgtttggcaccaaacttcaacaagaggatcatggatgtctccatcaaatacatcaactcctgtctagatctaaatcaatctgccgaggaaatcgcacactgtttgaagaaaatgtcattgcacgccgttccatccaaggaagacaaggacattttacacgttgacattccagtgactagaccagacattttacacgcctgtgatataatggaagatgctgctgttggttacggtttcaacaatctaccaaagggtgagaagctatccaatgccaatttcattgccaaaccactgcctatcaacaagatatctgacatcttcagaattgcatcatcccaagcctcatggctggaagttttgccattgaccttatgttcacatgatgaaaacttcggatacttgaagcagcctgacaacaatgacctagcagtcaaattggccaatccaaagactctggaataccaagtcgtgagaaccaccctattaccaggtatcttgaagactgttaaagaaaacagaaagcattcattgccaatcaaagtcttcgaaaccggtgatgttgtcttcaaagacgaaactcttgaaagaaaggcttacaatgaacgtcattgggctgcgatttatgtaggtaaaaattcaggatttgaaatcatccaaggtttactgggtaagatcatgcagactttcagaacagaatggattgccgactacggtgctggcgcatccggtagaggttactggatccaagaagacaactctgtcaagacctacttccctggaagaggagccattgttatgttcagatccaaagaaggtgctaagccaatacagatcggccacctgggtgtcttgcatcctgaagtcatgatgaacttcgacgtcccattcgctgcgtccttcgtagagattaatgccgaagtcttcctataa

SEQ ID NO: 1713 - DNA, 822 bp, Saccharomyces pastorianus
atgaccgttcctaagaatcgccccatggcaccctttggcaccattatcaaatcaaggataaaacaacctcagttttactggtttgttggccattttttaacaatctttaactttatacaatttcatctctcaatcacgtctaaacaaaaccaattgtcatgctacaggaggtcgttattttatatagccattacatatgctatcgtgctttaccagttctttaaaagcgaccagttgaagttcaatatcacgcttttgcgacaagagatcaaaaaattggacaatttgcagtacttttccatgctattcatactcttcatcttatcacagttcaacatcataatcagcggctcattatacagtcctgttattttttctatcttccacttcctaaattacttcaaggaaaatctactaccatttctaccattgttaccacataatctgaaaaatctgttgaactccaaaataacagtgttcattcagaactacaacgggtttttcttacagatggcccaagtcttcgaaattatttgcggattgcgcgtgggccttttcttattgccctttaaccttttcctattagtgataaaaaggtcaaatgcatcgtttgaggtatttggtacgatcctagccggtttgacgtacctgtggttcttcaagttacggtacttacaaagcgaatccttaagacagatttttaagcaatacgttcttagattggatgcctacatcagccgtaccttgcccccatacttttcccttttctggagtggctataagaatttcgtcatggctgtgttttggaaaatacctgtatag

SEQ ID NO: 1714 - DNA, 549 bp, Saccharomyces pastorianus
atggctggaaaagcaggaaagaagcaagctagttcgaatacgaagataatccagggcttgtacaaacaagttttcctgtttttagggatggccattgtacgtcttttaatctcttataaacgaacctcgtttggacaatggattaaattggtgattttgaatgttccaatgttcattgcgatctatattatcgtgatatccggttcacccaagtatgacgggaaccgtgtagtgaagcaaggtatagacttgaaagatgactctaatttgatatcatatttcttcgatttgatttatttatcactttttggtaacgttggtataatagccttcagaacttttaaattttggtggtgtttattactgtgtccaatttacgcaggctataagctatacgggctcaaaaatatgattatgcctggcgctcaacaacaaacacaaccaaatgatggcccagatgccggcgatggcaagtcaaagtctaaaagacagatgaaaagggagaaaaaaggtgacaatgactctaaaatcaagtacaaatatcgttaa

SEQ ID NO: 1715 - DNA, 555 bp, Saccharomyces pastorianus
atgttctcctttgttcaaagatttcagaatgtatcgaatcatgccttttcattagggattgtaattgttgtgtttatcatggcatcttcctactaccagttaatcaataacagcgcgttctccctacctagtgatattgacaatgtgaagacactaatcaacgtaagaacaagtagatacttcggctcacaaagaggcaagccaaaggagaatatgaagattaaattcgacctaaatacagatttgactcccctattcaattggaatacaaagcaggtatttgtctatttgactgccgaatataacagtagtgacaaaatagccagtgaagtcactttttgggataagatcataaaaagcaaggataacgccgtaattgaggtaaacgatttaaggtccaagtattctatttgggatattgaagataccaagttcgacaataaggacgtagttttcaaattacattggaacattcaaccatgggttggcttgttaacttacggtgaaacagtaggtaatcaaacggtcaccatagagaatccagaaaaagtttaa

SEQ ID NO: 1716 - DNA, 2898 bp, Saccharomyces pastorianus
atgaaaaggtgtgctccggccatattgaaaacttacaattataatagaggtatatggaatagtggcgtgcccgatcgtataagaaaactacttcgagataagtcgacctcacctttatgttcacacgatgagagaaatctagtctcattctttatgacgcgtgaaaatatgcctctgaagtcagctggtactgcattaacaaagaggacgacatcagcaataacaacaacatctgttaccacggcttttgaacggcagtatctcataaagtatctttaccgacatcaagctcatggaaacgtgataaaaattgcgcaaaactttctttataccaccatcgattcacgaagattgttaaggcaggatgtatcgttacctgaactgaaaaagtttcttctctctttactaattttacaaagaggtgtccaattggatcaagcaatgggtgatgttatatctcagtttctactaacacaaaagcaaatggttgtagatttgattaactcgattttttcaaagatggttacaatgaacatgcatggtgaagcagtatataagtgggtcaagtggatgaaattagttaacggtcattgtcaatttacaaattatatggaaaacagaatagtattgaggaacttcctatcattcatgaggcgatctgatgttcaccctgattatatatcctacttgaaagctattcagctcactcaagggcctgcactcgcatcccaatttgcaaccacgctgatatttttactgacctacattaggaacttttccttggcagaagatgtttggaactacaagtgtgagcataacctaccgataatagattctgacctgacgtgcattctaaagacatactgtcacatgcaaaaattttcactggttccacaaacatattataaatatcctgatgctcaacacgatcaaaatcaattcgattatttattgatagcacattccaagctccataattgggacgcattacaatcacagtttaatgctcttttcggtgtcggtaaattgccctcaatacaacattatggtattttgatgtacacaatggccagaattggtgagttggatagtgtcaataagctatatactcaactattgagaagaggaatgataccgacatacgtcgttttgcaatctctattatacgcacattataaagttggggactttgcagcttgcttcaatcaatatgaactattcaagaaatatgacatagcgccttcaacagcaacccataccttaatgctcaaagtgtatcgtggtctaaacgatcttgacggtgcgtttagagtattgaaaagactaagtgaggatcctagcgtggaaattaccgaggggcattttgccctactgatacaaatgtgttccaaatctacgaactatctgattgctcaagaattattcaatcttatgacggatcattatagtattcagcacactggcaaaagtgttgcttcattgatggatgtatacattgaaagtaacagggcagcagacgcaatagccctgtttgaaaaatactcaaaggacctatcctggagagatggcttaatctcagtatacaacaaagctataaaagcacatattagttcacagaactccagtaagtgtgaagaaatttttcacaagattacagatttaaacctagctgttgacagtgaattttataagatgatgatcagatttctagtcaagttaaaccgggattatgatacggcattaagtatcatagatcaactgataaaacatcctgtgattaaagtagacgctacacattttgagattatgatggaagcttatgacaaaataggctatcgcgatggtataattaatttatacaagttaatgtctcaaaataaggtcgcagcaaattccaagatcttatattttatattgaaggccgttgccaagaaaagtttacaaaatgatggagaagttaaagagacgataaagatggtagaagagattatggaaaatgcttccaatggaacccttgatgttacgtacaacaagcttcacccttccgtcatggcatggccaatgaggatggttgtgaagcatgatagtccacagcgggccttggagttatacaatcgctacaatgagcttttcttcaaaaagcatgactggatatcaaataacaacaaattcgtaatgatgagatctttgctggtactattggctcagattgaacaatggaaagattttgaaacattgttcattaagtatatggatcgtgtagaaaatattgagagtttaccatcgtctacaacaccaaatatcaaaatgaaaagtctgttcagtggacttttcccatataaagtaagccaattggttgcaatgaataaaattgatgaattaccactgctgtggaaaaaattacacgagaaaggtttcattttggacaatatgtcctggaatagcacagtagacgcactttttaaagattcaaggaccatttcatatggtttgaagattgtcgatgatactttaattcatggacatgacttgattcacaaatttagactattaacaaaactatcccaagatacggcacactcaagtcataaatcttggtcaacattagaaatgaaagaaaaagatccgtataagttccaacccaagttatacttacaaagtgacacttacaacagtatagtgaaacagctggatacatatttaaatggtattgatgatataacagaattggaaacccggatacgtgattttatatcgaattacagatatttcatgaaagattatttattgaaacctagagacaacattagtaaatgggaacagattgaaatgagacattcctcgtactttaaagaactaagaaaacttaaaatagtactgccagccagcaacttttaa

SEQ ID NO: 1717 - DNA, 456 bp, Saccharomyces pastorianus
atgggtacagctaagcagagtcagaatagaaagaagtttacaagggagtataaggtaaaagagattcagagaagtatcacgaagaagaccagacttaggaaggaatatctcaaagctctaaaggatgaagggtatacggtaccggagaaggaacctagaaccggtgtgaaagactctgttagaaagatcaaggaagccagggctacggaaggcaagaaaaaactggacgagaagaaggagatcaagaaacaaagaaagaagctacaaagagatgaactgaacgaacgaaggaatgatgagctggaacgaatcagagtatccaaggaaaagttccagatgagagaggacaggaagaagagaatgacccaaagaacaaggtcgggtcaacctctgatgggtcctaagatcgaggaccttttggataaaatcaaaacagatgacacttatacttcctga

SEQ ID NO: 1718 - DNA, 1071 bp, Saccharomyces pastorianus
atgacagaattaactacgcaacaagctgttgtcttagagcagcctggtaaaattgtcttaactaatgttagtatccccaaaatttcagacgcaaacgaagtaatcattcaaatcaaagccacagggatatgtggttcagatattcactactatacgcatggcaggatttctcatttcgtggtgaagtcgccaatggtgcttggacatgaatcctcgggtgtagtggcacttataggcgacaatgtcaagacgcttaaagtgggagacagagtggcactagagcctggcttccccaataggttctcatcaaaattaaaagagggaaggtacaacctggaccctgatttgaaattcgcagctacaccaccctatgatggaaccttaacaaagtattatagggctcccaaggattttgtctacaaaatacctgatcatgtgtctttcgaggaaggggcattgatggaaccattgtcggtggcagtccacgcaaacaagctggccaaaatgagatttggcgctcgatgcgtcgtatttggagctgggcccgtaggtctgttgactggtaaagtagccagtgtatttggggccactgaggtagtcttcgtggacctgtcagaaaccaaactggaaagggccaagcagtttggtgcgacacatacggtcaactcaggcgacttgccacctggtgtcagtgtagaatctgttatcagaaaggctattggtaagaaagatgccgatgtcatatttgaatgctctggtgctcagccttgcatcagaacaggcatcgaggtttgcaaggcaggtggaacgtacgttcaagttggaatggggcaagaagagatccagtttccaatctcaaagatctctaccaaggaaataaccttacaaggctccttcaggtactgtcagggagactacagcgactctatcgagttagtctcgactgggaagctctcgctcaaacccctgattacacatcgctaccagtttaaggaggcaattgaggcattcgatgagaacagggaccacccgctggacaacgttaagacaataatcgagggcccagaatga

SEQ ID NO: 1719 - DNA, 3249 bp, Saccharomyces pastorianus
atgactaccacgataggttccccacatatgctggctaatgaggatagactttctaacgagatgcccgcgctgaaggaccattctgagcagaatggacaagagcaacagggtcctgttaagaacactcaactgcatagtccctcagcaaccgtcccggagaccacaactgctcagaaggagtctctggaaatggtaccgaccagtacaagtgctgcagcgggagccgtaacgagcacaccaccgccctcgttaccacacgttgagattaatcaggtcagtttagcattggtagtaaggaacttgacggtatttaccatgaaggagattgctcaatacatgaagactaacgtgcacactcagatgaatgagcccaattcagcaaagaaaatacgttttttgcaactgattatattcttaaggacacaatttttaaaactttatgtgcttgtaaaatgggcccgtaccataaaacagaacaatttccatgtattaatcgatcttttgaactggtttagaatgaccaatatgaatgtcaacaattgtatctgggctttgaagagtagccttgattccatgaccaatgctaagttgccaaatgtggatttggtcactgctttggaggttttgagtcttggcagacctaatttacctacgcacaacttcaaattgagtggtggcggtgactccacggatgcagtagatggaatggctaaagtgcccctgagtttgattttacaaagattgcaggatctgaacttaactgtttcgatcaaaattgcattaatgaacgttcctaaaccgttgcataactatcgtattaagaacggcagaatatactttgctgtaaccaatgaatttgagattcagttatccactgtaaatagacagtcgcccttgtttttcgtggatttgaaactcctatttagcacagaagctgagcagagcgtttcaaccgtaacagaatccaattcacccaacggtagcagcggtaacaacgatgatggctccaaccctaacggtaatagcctacctttaaataagccaagactggagaagttaattaatgagattcttttgaaaagtaatgatcccttatcatctctttacaatttcttacacaaatatgtgttgacactacaactatacatggttcatagagaatttttaaagctagccagtggtgggaaattttccaaaagtaacctgatccataactatgactccaaaaaaagtgtaattacggttagatattggttaaatggtaagatggacagtaaaggtaagataaccattggtattcaaagaaccacagagagtcttgttttgaaatgggataatcaaagtgcatcaagggccaaaaatatgcctgtaatttataataacattgtatcaaatatcgaaggtatcctggacgagatcatgttcaaccattcaagaattatcagatcggagctgttagcaagggatatatttcaagaagacgaggaaaatccggatgttttattattccaacttcctacaacatgcgttgctatggcacctatccaattaaagatcgacttattaagtgggcagttttatttcagaaatccgactccacttttatcgaattacgcctcaaaaatcaatagagcagagagtccagaggaattggcaagaattttacaacagttgaaattagacaagataattcacgttttgactaccatgtttgaaaacacaggatggtcgtgtagtaagatcatcaaaattaataagccaatcaggactcagttgaatatcaacaacaacaatacttcgaagacggaaagtagcaccgttgttgataataacgccaacagtggcgatttttcccttttgttacaaagggatctgttcattaggttaccacactggcccctcaactggtatctaatattgtcgataatatcctctaaaacatcttgtgtggtggaaaaaagaattggtaagattgtctcacaacgtggaaaatggaatttaaaatatctggacaattctaacgtaatgacagttaagttggagtcaataacgtatcaaaaaatcatgatattgcagaaaactattttgaacagaattattaaccatatgctaattgattccttgaatcagttaaaaatccataataagatttgttcatctgaaatgattagcgaacaaaaactacctcaatatatcgttcagggaggtagtactaacgataacatctctatcataacactagagttagaatcctttttggaaggttctaaggcgctaaattccatactggagagttccatgttcttgaggatagattattcaaactcccaaatacgattgtatgccaagtttaagagaaacacgatgatgatccaatgccaaattgataaactatacatccactttgtgaaagaagaaccactagccttctacttggaggagaatttcacaagcttaggtataataattcagtatttgaccaaatttagacaaaaattgatgcaattggttatattgacagatgttgtggaaagattacacaagaattttgagtccgaaaacttcaaaataatcgcattacaacccaacgagatttccttcaagtatctctctaacaacgacgaggatgataaagattgcacaataaagatactaacaaattacgattctattaaaaatttaacagtgcaattatcaccttcgaacccccaacatataatacagcctttcttagataattcgaaaatggattatcattttatctttagctacctacaattcacgtcatctttgtttaaagctctaaaagtaatcctcgttgaaagaggggaaaaattccgtactggtggaagccagtactcgaccatggtgaacattggattgcataatctaaacgagtatcaaatagtatattataaccctcaggcaggtactaagatcacaatatgcatagaattgaaaaccgttttgcataatggtcgtgacaagatccagttccacattcattttgcagacgtggcacacattaccacgaagtcccccgcctacccaatgatgcatcaagtaagaaatcaagtttttatgcttgatacaaagagactagggactgcagaaactgttaagccaacccttgcatcgcacgccatccgtttaggcaatggtgttgcttgtgaccccagcgagatagagcctatcctgatggaaatccacaacatcctcaaagtcgattctaactccagtttatcctag

SEQ ID NO: 1720 - DNA, 585 bp, Saccharomyces pastorianus
atgaagtctagtaagctgttggtccaggacgctaaggattaccgcttcaatccgtccataccgctgaggatatatttgaaaacatgcatcggcatcttggaaaaggcgcagtgtgcgttccagaccggtgatctgtcgctggcgtttatttattactttagatacgtggatttattgactaataagctgtctaagcaccctgaattgtccatgatggacccgtcgtctatttataaaagagaatacttgcagctgataaaacttgaggtacccgcggtctgcaaaataattgaaggtctgcgcaaggaaatcgactctcagtatagcaagctgcagacttcattggccaataatatagctaaaccaaacacgaacacaaacacaatgcccgcacaactgcagcaacagtcgctgccgaaggagtcgttcaacgaatacagattcaaccagtcaatctccttcttccagaaaatatcaaattcgcaactaaacgccacaaccaactcaccgagtcaggataccgcccgtgacgaagcctacagactgaattacccagaactaccacggttcacgttttctacatag

SEQ ID NO: 1721 - DNA, 666 bp, Saccharomyces pastorianus
atggctagaagaccagctagatgttacagataccaaaagaacaagccttatccaaagtctagatacaacagagctgttccagactccaagatcagaatttacgatctaggtaagaagaaggccactgtcgatgaatttccattgtgtgtccatttagtttccaatgaattggaacaattgtcttctgaagctttggaagctgcccgtatttgtgccaacaagtacatgaccactgtctctggtagagatgctttccacttgagagtcagagtccaccctttccacgtcttgagaatcaacaaaatgttgtcttgtgccggtgcggatagattgcaacaaggtatgagaggtgcctggggtaagcctcacggtttggccgctcgtgtcagcattggtcaaattatcttctctgtcagaaccaaggacaacaacaaggatgttgtcgtcgaaggtttgagaagagccagatacaagttcccaggtcaacaaaagatcatcatgtccaagaagtggggtttcaccaacttggacagaccagactacttgaagaaggctcaagccggtgaagtcaaggatgacggttctttcgttaagttcttgtccaagaagggttctttggaacacaacgtcagagaattcccagaatactttgctggtcaagcttaa

SEQ ID NO: 1722 - DNA, 1752 bp, Saccharomyces pastorianus
atgtcactcagattattagcgagaagccaacaacttctgccccgtcgcaactggttcttccccgtcaggcagtatgccaaagaacctcaatacgatgaagctgacctatttgcagaaaacataaaccatggggcgtataaagccaagaaaagatcgtctcaagaccagttccaatggcctgaaaagtcagcagaacaggtctcgaaggaagcagaacggcaatgggaaagaatggctaaattgtctgctgttgggcaggggattcttatcatcctggtagtgggtgggttaggatccgcctacttgcgttggcctgaattgaaatcctggtggttgatcaagatgaatggaggtcgtgtaaacacagtccaagagcaaaatggacaggactccttggagaaactggccaggcaaaaggccaagaatcttcttagggagatcccgcaggtgcccacctttcaacacggaatagactatcccggtgtgtacatatgggggaaatgtcattctaaagattcgttgttccccatcagagtccccaacttggataaccgtaaatttagagacatcctactggccccctccgacgacttcaactgtaactttgcacttgacgaaaagggcgatttgatatcatgggatgacttgggccaaacgaagacgttattggcaggtcaacatctgacttcaatgaagtactcaagcgactatctgtacgcactaactagaaaaggtgaaatactggtcgtaccgataaggactccaaatctgattgcatcgaagctatcgtcaagaagatcaaagctgttgccatggaaaaccaaacaaagatatgattggaaattagagacaaaacaagtatttgatactaaaaagggcgaaaatcgcgtagtacagttcgacactggtagccaccatttggtattgctatccaatctaggtaaagcctattcgtgtgctactgggaatgaccagaaacagcctcaattatcaagaggtcagtttggtataccaactttatctcaatttgatgagtttccgcctaacaatgagctgttcgaaattgaattactaaacaaatacaaaaatgaaggagagaacactattcagaaaagacaaatcgataagattgcgtgcgggtcttaccatacgctagcattggaccataatggggagctttacgcctttggttggaatcggtttgggcaattagctttgcccatctcgtacaatttagaatatgtttcattccccagatcagtcacacatgcattcaaaccgcatttccccgggttaacaaactggaaatgtgtggacattcactgtgatgacgaaacctcgtttgttaacattcgtaggccgggtgtaattccagatcattattatttcgcatttggtaatggacttttcggtgaattgggtaacaacactttcaagaactcacagtgtgagccaattaaaattaaattaaataacaagaaagtgatcaattggagttgcggttcacatgctgtctttggtgaaacagatcatgaacgtgaagtgattgtttggggtaataacgaccatggtcaattaggtataggaaagaaaaccatgaaatgcgccaagccaatgaatattccagacgtcttgaagcccggacaggataccacagacctaaagtcgatatacgacagcaaattccgcttaacaaatcaacaacgtattgtcacgaatggagataagagttgtatatattggcgagtttga

SEQ ID NO: 1723 - DNA, 3663 bp, Saccharomyces pastorianus
atgtttgttcatcgtctctggacactcgtccttcctcttcttacactgggttcgaaagcatcacaattacagagtatcaaatcattgctagatatcgaagacaatgtactgcccaacttaaatatatcgcaagataacgacaacgcggtacaaattcttggcggcgtggaggccttatcgttgtacaagtacatagggcagcagaattttaccaaggagataggcccggaaacaaactcgcgtggactagtgtattactccaatgatacttatattttattggaagacgccgacgaggacacccgaatagacagaatcacgccgtttggcaccgactcattcattcttagcgggtcaggctccataaaggatgtacctctgggaaaccagatactctacaatctgtcaacactatccatggagcgcatattcacccagccgttgggccatgtggaggccgttcttgtaaatgacacttctgtttacttcgggggtaacttttcatataacaacggttcaatgacgggccatggtgcccttgtttgggaatctacgtcaaataccacccagcttttaccttttggagggttcggaaaagactcctacgtgaactcgattgtcaaattgaatgatgataacattttatttgcgggcaagttttatacgttggatgactcttcgatcctcaccaccagctccaagaacactacgagtgcaacctccgcgttgaatgccacaactttggaattgggacaacggatcccattgagatacgcctcgtgggactcgcagggaagtacaacgtttgaatccagttacctcgtctgccctgatacggataaagacgcatggacatatccgggtacatcaggatctttcgtttgcactttgccttatgaagtcgcaccaacaaagataagactttataactctccaaattctaataacgaaatttccttatttcaaatactgaccaatccatcgcgcagtataatgaatctaacatatctggatccaataagtggggaactacagaattgtgacgaattctgtccattatatagtcgagatactctactgtcagcaagccaaaatgtgtcttcgtccctggatatgatttccttcattgacaataacaatacagatgtcaaatggtcgtcggacttccaagattttgcatttgcaaacgaagttgccgttacatcgttaaaactcaccgctttaaactcatacggagataacgttgcgttatcaggtttggaactttatcaagatacgttttcgacctacgctaacaattcactaaacgaatatggttgcagtgcactcgccaacgattcatcgtcatccacattatcggacaatgagtggtatgacggcttaacaggtcaaagttatatagccatcgactacgttccgaaccaaaataagccaactccaactgtgacgttttaccccagtatcattcaccctggtcattataccattaatacatacacacctgggtgcgtccaggataacacgtgctcttcaagaggtattgtaaacgttactatgtggaatccacagaataacacaatgatggagacttacctaatttacctaaacaatgacaatttgaagtatgataagatctattcgggatacttggatttctcaccggaaattgtcatggagtacgtttctggaatatatgcaagtaatactgcaacgatcatggtggcagaccaagtcaatatcatcaccgattcgttggattcttttagcagtctttcagaaactacgaccacgaaaagacatactcccttgaatggtgtccttcaataccaaagatcaaattttactgcccccacgtcaaacgaaatgaagatagccaatactactttgaaccttttctcagtggataactacccaaagaactcttccatattcgctgacatttacgatacgaaattaatacttggtggagcagataaccacatttctgttatagacttcaatgaaagtttgagggtaaccgcaagtgaaaacaaaaccattcagggtgatgtgtatggtatgacgcaaactaaccaaggtctgttgatattcggagatctccgttcttccgatgataaaccaacagtccttatgttcaatggatcatttgaaaatctatcaaactattctaagacggtggacaatgccattaacataagcttagcaaataacgacctgattgtgtttaacaacaattacatactcaacacatcctcgaactcagaaatatcgaactcctcctcttttagtctttcgctttggtcagccggtaataacggtaacggtgatgttttattttcaggtgcagtgtcacaaatgcagttcagtgacttgagtggatcagcacgattcttaaatgaggatatagtagaagcgttgaacctaaataaaggtattgtaccgtacttgggtgcgtatttgaatgagtccactatagcttatgcttacaaaacagattctttgagcaagatctatttttctaacaacgttaatccttcctggaattggtctaataacataactaaaatggtatatgcgaataatcaaacgttgctagctgtcggttctgagtcctcgacaacagcagaattatcgattttcaacctaaaaaatttcacaacaattgctaatgaaaccattgggtccaatgcaaagataaatgcatttgtcaatttcgaaaaaaattctagtctgttggtgggcggagatttccaaatgagcaagccgaattgctccggattgtgcctatacaactatgaaagcaaaagttggtctgcattcctcaataatactatttttggcgaaatcactgaattaaccttcaataatggatcagaattaattatttcaggtctttttgctacagaaaaatatcagtctatacgtttggggtccttcaatctcaccaattcgaccatgattccattattaacaggttcgggaggcaaaataaagtcatttaccgttaccgaagattccattgtggcatggaatgacacctcgttgcttatctacagggatcaaaaatggaatattacctcactaccaggtaacggcagctctgttagctctgtgacaacgatcaacacaaacgcagactcctatactttgagtaagcgagctactgacaatgttgagaaggggagtatcctgctcctcaacggtaattttagcattccgcagtacggaaatttgcaagggctgctgtttgattcccagaactggacaccttactttacgtcagaagcatcggaagcttccggtcacaatccaacaatttttataaatagagacgtgtcagccgaattcaactctcaaatcccactctccaattcaaacatggccgtgacaagtcctcaatcaacatcgcccctatctccatcttcatcggccagtagtgagtcgaacaagaaatcaaagaagaagaatatggatcgtgggtttgtcgttttaattgggctggcattagcattaggaacagtttctgttctcggtattgcaggcgtcattcttgcctacgtgttcaaagatccggagggcgattacgagcccattaaaccacgaattgatgagaatgaaatgctcgataccgttcctcccgaaaaactcatgaagtttgtctag

SEQ ID NO: 1724 - DNA, 1317 bp, Saccharomyces pastorianus
atggaaaacccgcccatcgtcattgataatggctcttacgagattaagtttggaccttccactaacaaagtaccctttcgagctttgaatgcattggccaaagataaatttggtacgtcgtacttatccaaccacatcaaaaatatcaaggatatctcctcagttacatttagaagaccacacgagctgggacaactgacactatgggagttggagagttgcatatgggattattgccttttcaatccatcagagtttgatgggtttgatctaaaggagggcaagggtcatcatttggtcgctagtgagagctgtatgactctgccggaactaagtaaacacgcggatcaagtgatattcgaagagtacgaattcgatagtctattcaagtctcctgtagccgtatttgtaccatttaccaagtcatatcaaggcaaaatgagaactatttcaggcaaagacgaagatgctgacgttgctattagcgacccggacgacaaaacgtttacgtccaaggagtctataaatcaaatgaactcgaacaacgattatcacgatttccaactggtcattgattctggctttgattgcacttggatcatccccgttctcaaaggcataccgtactataaggcagtaaaaaaactggacattggggggcgttttctaactgggctgttgaaggaaacactatcatttagacactacaatatgatggacgaaactatactcgttaacaacattaaggaaaagtgtctctttgtaagcccggtctcctatttcgatagtttcaagtcaaagaataagcacatagtggaatacgtactgcctgattttcaaactagtttcataggctacgtgaggcaccccagagaggaagacagcccgctgccggcagatgcacagaccatcgcattgacagacgagctgttcacaattccagagacgtttttccatcccgaaatttctcaaataataaaaccaggcatcgtagaggcaatactggagagtctgtccatgctgccggaaatagtacgacccctcatgataggaaacatcgtgtgcactggagggaacttcaaccttcctaatttttcgcagcggcttgccagggaactacagaggcaactgcctacagactggacttgccatgtgtcagtgccagagggcgactgcacacttttcggctgggaagtgatgtcgcagtttacagagaccgagtcctaccggagagccagggtcacgagggaagaatattacgagcacggtcctgactggtgcactaagcacaggttcggctaccaaaactggatatag

SEQ ID NO: 1725 - DNA, 1377 bp, Saccharomyces pastorianus
atgagtggcagtgatagtaaagatcgtttatatgatgttttgggggtgacgagagaggcaagcgtacaagaaatcaagacggcttataggaagcttgccctgaagcatcatccagacaagtctgtggatcaggactccaaggaggtgaacgagatcaagtttaaagagattactgcagcctacgagatcttgagtgatccggagaagaagtcgcattatgacttgtatggtgatgataatggcaccggtggtggtggcggtgatgagtttggagatgacgattttatgaatttcttcaataacttcttcaacaatggagcccatgagggaaacgatttttctcatgagcaggagatgtacgaggaagacggaactgcgagctccaagaatatcgacattaatttatcttttacgatgacagatttatatatgggtaagaagttgaagtttgatttaaagagacagattatatgtggcaagtgccaagggtctggttggagagcaaagaagaaaatgcatgttacgcatgaaatggaatgtgaatcctgcagcgggaaaggttccaaagagcgtctcaagaggtttggccccggtttggtagcatcacagtgggtcgtgtgtgagaaatgtcacggcaaggggaagtacatgaaaaggcccaagaaccctaagaacttctgccctgattgtgaaagtgtggggcttcagtctaagaaggaagtcatcactgtaaatgtgccaccgggccaccatttcaacgatgttatcatcgttaagggaatggcagacgaagaaatcgacaaggctgtctgcggagacttgatctttcatctcgttgagaagcaagaggacctgcaacagaagcaaatcttaatgaagatgttcggcgacgaaaacctgcaagatttatacgtaagcattacggtatcactaagtgaggcgttgacaggttttgaaaagtttttaacaagaacgttcgacaacagattgctaacgttgagcattaaaccggggaaagtcataagacctggcgatatcattaaaatcaccagcgaaggttggcccatcctggacaaccctcgtggccaatgcggcgatctgtacgttttcgtggatatcgaattccctccagataattggttcaatgaaaaatcagagctacttgcaataaagacgcacctaccgtcgtcatcatctcgcccctccaacatcactgcaaataccgggagcgacaacagtccgattaacaacgaaaccgtatcgaacttccagatcatccacacagatgatcttcctgaaggaatgaaggcgttcaatcccaaaccgcaagcctcagcgcaccagaaagcaagcagttcgtactgccccatgcaatga

SEQ ID NO: 1726 - DNA, 2685 bp, Saccharomyces pastorianus
atgccaagggaaacacattcgagtatcgaagaagaggtggaaatccccgattttcaagatagcgcaacagttcctgatcttgatgacttagagctggagtacgaccaatacaaaaataatgaaaacaatggtcccttcaacgataatgatctggaaagcaattccgttgccaaccacaacacggtgagcaattcgaagggcattaatggctcgaaggtcgagtattttaacgcttcggatatctcgttgtatgacaattctgtttcgcagttcgaagaatctactgtgtcgttcaaagattactacgaccatagtatacgttctcatcttactttgaaaggtgctagcgattatcttaaaagcgtctttccaatcattaactggttgccacactataacgttagttggtttattgcagatctgatcgcgggtatcactatcggctgtgttcttgtgccacaatccatgtcgtatgcgcaagtcgccacattgcctgcacagtacgggctgtactcttcatttattggtgcctatgcctatgcgttttttgcaacctccaaggatgtttgtattggacccgtcgccgtcatgtccttacagaccgccaaagttattgcagatgtcacatccagatacccagaaggtgacactaccattacgggtcccatcatcgccacgacattggcgttattgtgtgggattatttctgctgctgttggtttcttacgtttggggttccttgtcgaattcatttctttaaatgctgtcgctgggtttatgaccgggtctgcctttaacattttgtggggccaagtgccagctcttatggggtacaacaaattggtcaatacaagagtcgccacttataagatcgtgatagactctttgaaacatttaccggacactacactggatgctgtgtttggacttatcccacttttcattctttacacttggaaatggtggtgtggtacatatggtccaaagttgaatgacagattcaattctaaaaggccaagattacacaagattgtcaaatggacatatttctacgcacaggcttctagaaatggtattattatcattgtattcacttgtattgcttgggccatcacaagaggcaaatctgcagctgacagaccaatcagtgtcctgggatccgttccatccggtttgaaagaggtcggtgtcttccatgttccacccggactgatgtctaaattgggtccaaatctgcctgcttctattatcgtcttgctattagagcatattgctatttccaaatcattcggtagagttaacgattacaaagttgtccctgatcaagaattaattgctattggtgtttcgaacttattaggtaccttctttaatgcctatccagccactggttccttctcgagatctgctttgaaggctaaatgtaatgttcgtaccccactatctggtttattttcaggttcttgtgtgcttttagcattatactgtttaactggcgcattcttttacattccaaaggccacattatcggctgttatcatccacgcagtgtctgatcttctggcctcctaccaaacaacctggaatttctggaaaatgaacccactggacttcgtctgtttcattgttacagtcttgatcacggtcttttcctccattgaaaatggtatttatttcgctatgtgctggtcatgtgcaatcttcatacttaaagtggcattcccagctggtaaattcttgggtcgtgtcgaaatcgccgaagttactgatgcttatgtcagagctgattcggacagtgttagcttcacatctgaaaacaacaatcgtattttaacattggaagaagatactactgatggtgaaaaggaggggcgtaccggttatataattaactcctctaaaaaactagacacaaaagtccaaacgaagggtttcgaatccccatccccttcaattggccaaccaagaataaagtatcacaccaaatggctaccattcgaccacaaatacacaagagaattaaacccggatgtccagattctcccacctccagatggtgtcctcgtttacaggctatccgatagttacacgtatatcaattgttcaagacactatgatattataatagaccgagtcaagaaggtaacgagacgtggtcaactaattcgccacaggaaaaaatccgaccgcccttggaacgatcctggtccatgggaaccacctactttctttaagaatttgaaattctggaagaaaaaggaaacggatatcgagcctgccgaaaatgctgccaacaacccaactgatgctgaccgagatgatagaccattactaaaaatcgtgtgtttggatttctcgcaagtggcgcaaacagatgccactgctcttcagtcactggttgacctaaggaaagtcatcaaccaatatgctgatagacaagttgaattccatttcgttggtatcatttcatcatgggtgaagagaggtttgattagtagaggttttggtactctaaacgaagaatatagtgatgaatccattgttgccggtcatacaagttatcacgtcgcaagagtacctcaaaacaaagaaaccccaggcaaatatagcgtttacactgtttcaggtacaaacttacctttcttccatatagatattccagactttgctaaatgggacatttag

SEQ ID NO: 1727 - DNA, 1509 bp, Saccharomyces pastorianus
atgctgctgaacgtggagacaaatcattcagtaatgcatggtcatgaacaccgcctcatcggaagcatgcgcaatgacagcgcattgcattcatgtaacgactcctcgaaggtcttttatcctaagtcgttctacgccactgctaccaacaagaagaacaacaagctggccactgccagcttgaacaagacgatcccgagtacaagaacagtaagcgaccagagctacttctgctcctctgctggagcaccactcgatgggccagcgggttctcgaagtagcaatgtacccaccaagaggaagagctttaagcggaccagaatactgaaggctcgagtcgattccgaaatgtcaaacgaaaatcgctcatctttcatgaccccgtctttaagttcggttttgtcgcaggtcaagaaatcaaattctgtaaagacagtatcgggcgattgtccgatacatgagaacctcttaacacagagcattaagaggaagttttcggaggagacgcaaagtgactgttcttctttgggctcgtccaaagaccatcccttgacagataacattgcagaggctgccgatgcgcagacccccgccatcgacgacgaaaaccagatcgaggcggaggcgcccaagataaaaatactaaacatgaaggaccttgacctgttcgatgactgggaggttaaggatctggtagacctgttcccacccgtatacgaaagacattcgcaaccgttgtctgatctgtcgccggtaccgtcgctgtccgatgcgagtgcaaaacctcgaccaacctccgtggacttccagattgtcaacaaaacgggcggcgcctcgagaaggaagagcaagagcaagtccaccacagaaaacatgatatacgagaacgacctggttgaactggaacagtggccttccaccacgccatcttccgagaccaaggacgcggctgctcctaacgacctgcttctaccgaacaaaagaataagacagaaaagtttgaatacaaacttcttacaattgtattccatcgaaacatcttgcaaaagaaaaaatattctaccagaagtggaggtggacgaccatctgctgaagcaactcacatactccgatatctggtcgttggagataaaaaaggaacccaaggtctccacacgggacatcaaaattgccctcatcaccagaaaaaaactgtggtcagacatggtccacgaaacaaggaacgatctctttggcgattccacgccgtggaacctgcctttcatcgcaacggcgtccacggtgccgccagggacggaccacgaacccgcaaacgaacccggaacgatggacccaaagagctctttggttcgcgtgcactcggacgtcaagccttggttcaacaatcgcggtacaatgctcaaaccatgcgggaaactaagcttgggtaaagtctcaaacaagactactgcacccacaagagatatccagtatgtcgtaaagggctggtgcgacgccaggtttgtgtga

SEQ ID NO: 1728 - DNA, 1968 bp, Saccharomyces pastorianus
atggtgctggagccttcacctccaccgctaatagcaacagcgacaccgtctcttccatccagtttgaaaagatctgttgccaccgatgaccagagcaataatggcgggaccagaaagaggaaactggcgtgtcagaactgtcgtcgtagaagaagaaaatgtaacatggagaagccttgcgcaaactgtatcaagttcggtaccgattgtgtatttgctcaacaagacttgagaaacaaaagatactccacgacgtatgtcgaggccttacagagccaaattagcactctaaaagagcagttacaaatgctaaagtcttcaactcccactatagccaacgactccctgtctccactgaaagatgacgacgacggcgacggcgacggcgacgatgacggtgatgatatctccaatgagaaaattttaaagtatggtcaatcaccttcaccagcattaacgtcctctgagagcaccggcgaaaacgaatccgatacgtttaccaagaaactgccctcagaaagtcctccacccgtcggtacaaacagtatatatccatcaaattcactgtccataacaaagaaaaagacagatggcacgaggtaccagcaacaacaggtcagcttgaaaaatttatcaagaagcccgctcatcttgaggtcattatcgctgtttttcaagtggttgtacccaggtcactaccttttcattcatagggaaactttcctaagtgcttttttcggtgatacaaacacaaagagttattattgctctgaagaattggtatttgccattgctgcgttggggtctttaatctcttacaaatcggaaactgaacttttccaacaatctgaagtattttatcaaagagccaagacaatagtattgaaaaaaatttttcaactcgaagattcttcgttagctgaatcctcatcttcttccaaattggcaatcatccaaactctactatgtttggcgttctacgacattggaggcggtgaaaaccccatggcttggtatctttctgggctagcatttaggattgctcatgaaatcggcctgcatttgaatccagaagcatggagcaatgtttatgaggatgaattatcaataatggattttgaagtgagaagtagaatatattggggctgttacatcgcagatcatttgatagccattttatttggaagatcaacttctctacgtttgtccaattctactgttccagaaacagatgaattgcctgaaatcgagactggtatcgaagagtatatatatgatccaaaagttatattgtctacagcaaaccctttgaaaaaactgattgtactgtcaagaataactgaaatttttgcatccaagattttcagtcccaacgaaactttacttcagagaagcgagtacttatctaaattcaacctcgaagtttacaattggagaagggatttaccaattgaactgcaatggaccaagagatcattaatgggaatgtctgatttcaatcccaccattgcttatgtttggtttcattactatatcgtattgatatcctataacaaacctttcatatacgaaatcgaacagagtagagaattagtggaaggatatgttgatgaattgtactacctcttgaaagtttggaaaaataagttcaagacttttgagaaagctacgatttacatgatttattctgcgattttagccatccaatgcatgaagtcgaacctgattaagaaggacagaaaacaagactttttgaacttcttagacgcacctacattgaactatgaactcgccagaaaattcattgaaaactccgaagacactttgcataattctgaaacaatggatttattgggtaccttatctcacggtaatgattttgcattagaatataattttgacttcaccttactgaatgaaattgatatgttaattggtgggaacaccaacgacggtgtcaccaaataa

SEQ ID NO: 1729 - DNA, 1185 bp, Saccharomyces pastorianus
atgtggactaacacttttaaatggtgcagcaagactgagaaggaaaccaccactgcagacgctaaggtttgtgccaatgtgcatggcttgaaggtgctgcaacagcagatcatggacagcaccaacgtgaacgggtctgtgaacaacacgatgacccctggcgggatcaaccaatggcacttccacaacagtcgtgccagtaaggttaccacgcccacggtgctgatccatgggtacgccgcctcgtcgatggcgttttacaggacgtttgagaacctctccgacaacatcaaggacctgtatgctatcgatctgcccgctaacggtgcctcagaggcacctgctctcctggtggagaatgcgaagaagatcaagtcgcttaggttcaagcatatagaggacgacatggtgacccccgtgctggataaacgcccccccgccgaggagatcaagtcacacctggagcagtacgagaactacttcgtcgacagcatagagcagtggcggaaggacaataatctgcgcaagatcaacgtggtgggccattcctttggcgggtacatctcgttcaagtacgccctcaaatacccaaaatccatcgacaaactgtgcctcatatctcccctcggcgtagaaaacagcatacacgccatcacccacaagtgggacgccaacacaacctatccgatcacattgaccgacccgtcctcccgctactacaccagaaagctgaacgttcctcggttcatcttcgaaaaccaactgaacgttctgaagtggatggggcccataggctccaagctgtgctcgagttacatctccaccgcttacgtcaaggtgcccgaccaactgtacaaagactacctcttgcactcatttgtgggcaagaaccagagcgtgcagccacaaacgatcaaggtgttcacacaactgttcgaaaggaacctgattgcgcgagatccaatcataaacaacgtcggtcttttgaatccagcaacgcacgtcatgttcatgtacggcgaacacgactggatggataaatacgcaggctacctgactactgagtcgatgttgaaaaacaaggcaaaggctagctacatggaggttcctgatgctggtcacaacctatttctggacaaccctcaccacttcacctcttctttagtctccttcctatcgaaatag

SEQ ID NO: 1730 - DNA, 264 bp, Saccharomyces pastorianus
atggcggatatcgaggacacatcggttgtcctgcaaggccttggcacgatcagcagcctagagggtctggaggacgatgggtacctcagcgacgaggacacatcgctgagcaacgagctggcggatgcgcaacgccagtgggaggagtcgctgcaacagttgagcaagctgctcaactgggtgctgctgcccctgctgggcaagtacatgggcaggaggatggccaagacgctttggagccggttcatcgagcactttatataa

SEQ ID NO: 1731 - DNA, 1047 bp, Saccharomyces pastorianus
atgaacaggaaagtggcagtcgtgacggggacgaacagtaacctcggtcttaacatcgtgttccggcttatcgagaccgaagacgctaatgtcaggttgaccatcgtggtcacgtcgaggacgttgcctcgagtgaaagaggtcatcgagcagatcaaggacttctacaagaacaagtcaaagcgggttaatgacttggagatagatttcgactatctattggtggacttcaccaacatggtgagcgtcttgaacgcgtactacgacattaacaagaagtacgatgcgataaactacctctttgttaacgcagcacagggcatcttcgatggtatcgactgggtcggcgcggtgaaggaggtcatgaccagcccattagaggcagtgacgaatccgacgtacaagatccagctggtgggtgtcaagtccaaggatgacatgggtcttattttccaggccaatgtgtttggtccgtactacttcatcaccaagatcttgcctcagttgaccaagggcaaagcgtacattgtttgggtgtccagtatcatgtccgatcccaaatatctctcgttaaacgacatcgagctagtgaagacgaatgcgtcgtacgaagggtccaagcgattagttgacctgctgcatttggccacctacaaggacttgaaaaagctgggaataaaccagtacgtggttcagcccggtatcttcacaagtcagtccttttccaagtacctaaattttttcacctattttggcatgttgctcctgttctattttgccagatgggccggatctccatggcataacatcgacgggtataaagctgcaaatgcacccgtgtacgtgactaggttggccaaccccaatttcgaaaagcaggacatcaagtacggttctgccacttcatgggacggtatgccatacatcaagacccaggaaatagaccctaccaatatgtcagacgttttcgcttatctacagaagaaaaagttggaatgggacgagaaactgaaagaccaaatcacagaaactagaatccccatttaa

SEQ ID NO: 1732 - DNA, 801 bp, Saccharomyces pastorianus
atgaaccagaatggtgataaaagcgaaagtaaactgtttcaattaccatcattgccgccctggaggacaccaaggttcaacaaagtaaactttaacaacttcaccacaccgctaaggaaaagatcgacaagaataataagtaatgatccgatacccataacgaataaggtgttagaggagaaaagtgcggatgacgtgtatggaatggacatggatgaggatgaggttgatgacctcgatagtttgacccatatcgaagaagagaaagcatatgattacgcaccattttgcggccgtaatacattaagagaaagcaaaatcgataattttttgcgggctgaaagggcagcacattgtcttgtattccacaaacagggccatcttgatggtacagacacctatcgaccagatatcgatgtgatgtgcggtggtgaaaagcccgatgcgcatgagaacgacaacccagacgacagtgctgcaatgctgctggagagcatacctggatgtagtaaagaagacctgaggaagctatcgaggcgagagtttgtgacaagttcgaggccgaacatgagacggctggatgacataataaaccatgaaacaaacgcattgaaagatttttggaacgactcggatctggtcagttctttgcaaagtcaccatttacacgaagagtatctgctcttgcaagaagagttgaagaacgtttacaagatccaatgtcatgagagggttcccatagaaagtctgcgggataagtgcagaagacattataacaatgacgatagctcatttctttaa

SEQ ID NO: 1733 - DNA, 1974 bp, Saccharomyces pastorianus
atgtattatggaatcagccagtttagtgaggcctataacaagatcttaaggaattcatcatctcattcatcatgtcaattagtcattttcgtttcgtgtctgaacatcgatgcattatgtgcgacgaagatgctatcgctattattcaagaaacagctggttcaatctcagatagtaccgatcttcgggtattcggaattacgacgccattattcacagttggatgacaacataaacagtctgctactagtgggatttggaggcgttgttgatctagaatctttcctagggattgatcctgatgagtacgtaattgatacagatcaaaagcccggtgaaaaaagcttcagaagagacatttatgtattagatgctcacaggccgtggaatcttgataatatattcggatcgcagattatacagtgttttgatgacggtaccgtggatgacacattagctgaacaaaaagcagcctactacaagctattagagttggaaaatgaaagagagcaggatagcgatgatgggctttcagatgacgatgacgatgacgataatgatggcgaggatgagatgactgacgccgacgaggctactgacgaaggtgaagataaagaagaacaaaatggtagcacagcatctactaaaagaagtagttctgataaaaatccaaatgctcttccaaagaaaaagcaacgaaaaaagcaaatccatgaatctgaaggtgtgctagaggaatattattcgcagggcaccacggtggttaattcaatatctgcacaaatatattcgttattgtctgctatcggtgaaacgaacctatcgaacttgtggttgaatatattgggtgccacctcattagacaccgcttatgctcaagtctacaatcgactatatccattattacaggacgaagtaaaacgtttaacaccaagcaatagaaattcagtaaagactccggacacattgtcattgaacatccaacctgactactatctttttttattaaggcattcttcgttatatgatagtttctattattccaattatgttaatgctaaactttctctatggaatgagaatgggaagaagaggttgcataaaatgtttgccagaatgggcataccattaagcacggcacaggagacttggctttatatggaccattccatcaagagggaactcgggctgatatttgacaaaaatctagaccgttatgggttacaggatattattagagatggatttgtcagaaccctgggatatcgtgggtccataagtgccagcgagttcgtagaggctctaacagccctgttggaagtaggtaatacaagcgataaagacgacgtaaagataaatgataataatggagaagacactgatggagaagacgatgatggtgataatgtcgaaaaattgaataatctaaggaagaaatgggtctcgaatttctggttaagttgggatgctttagacgatagaaaagtagaactactaaatcggggtattcgattggcacaagatttacaaaaggcaatttttaacaccggtgttgccatactagagaaaaaattaataaagcatctaaggatttatagattatgtgtcttgcaagatggaccagatctggacttgtacagaaacccgttaacgttgttgagactaggaaattggctcatagaatgttgcgctgaatctgaagacaagcaattattacccatggtgcttgccagtatggatgaaagtacagatacgtacttggtggcggggctaacacctaggtatccccgtgggctggacacgatacagacaaaaaaaccaatcttgaataattttagtatggcgtttcaacaaataacggcagagacggatgcaaaagttagaatagataattttgaaagttctataatagaaattcgtcgagaggatctgtcgccattcttggagaaattgaccttgagtgggttattataa

SEQ ID NO: 1734 - DNA, 1134 bp, Saccharomyces pastorianus
atgtccaaagggagggttaaccagaagcgttacaagtatcctcttccgattcatcctgtagatgacctgccagacctgatccttcataatcccatttcttggatatattggacgtatcgatttttcaaaagtacaaatgcattaaataaaaaaatccatgtagactttattggagatacaacccttcatataatagtccaagatgacgaacagatgctatatctctgggataatggattcttcggtactggccagttttccagaagtgaacccacctggagaggtagaacggaagttaaactaggtctgaatgatgatccacgccaaattcaaagtggaaccaagaatgatgctgaaaatcagctaactttagaaaaaatcacacagcaaagaaggcagcaaaggtccgagttcaaaaaagaacgtgcaaggttagagaaagaacttctagcattgaggaagaagggtggccaaattgacggggagactattcttctagagaagcaaagagaatcgttaagaaaatttaagctcaaacaaacagaaggcacgaagacagtcgcacagcctcaagacgtttacgaattcaatccaagaaacgaagacaacgatcttctcgatgaaaatggtgaacttaagcaattagaatcattagaactcatgccggtggaggccttgtttttaacctttgcactgcctgttctagaaatatctcctgctaacctggcggggaaactatttcaacccggcgctaaatatgaggatatacattctttcgttcgatcctacgtgatatatcaccattacaggtcgcatggctggtgcgtacgatctggaataaaatttggttgcgattatttattgtacaaaaggggaccaccatttcaacacgcagaattctgtgtcatgggccttgaccatgacgcctcaaaggactatacatggtattccagtatagcacgtgttgtgggcggtgcaaagaagacttttgtactctgctacgtagaaaggctcatcccagaaaaagaggcgatagcactatggaaatcacataaatttactaagctgtttaatagttatcaagtcggtgaagtgctatataggaggtgggtccctggaagaaatagagactaa

SEQ ID NO: 1735 - DNA, 1455 bp, Saccharomyces pastorianus
atggctgatcaacagagcaaggttgtggttcatgcagagcatacacccgggatatgtgaactcttacccataaacgagcttttcaagatcaaggtcggtcagaaggtatttgaggtctcaggcgtcgtgttgaattcggatggccccaacttctttaccaagttttttacccagcatgacaaagacgttgttctgtttgtcgatagatcggaggatgtgttcatcccgatctacaggcatttacaaggttatttcgccgatgttaaagacgaagtggagtatcgcgttcttctcacggatgcgttgtacttccagttgccaaagttgatcgaactcctcaaggagagtgaatactactttaccaacgtgggcggtgtctccttcagggtgcccaaatcgttattccatcaggaaggcaacaggcaaaactacttcgaaatattatcccgctcattttacaaggagattgagaagcgggtgctggatgagcggttggttttctttctacatccacccacgtatgttcccaggtccgcagaattctttcaagatctgctgtctttgttaagcggcgccgaattagaactctccgaaaagaaaacagaatccttgatcaaagagtgtcgctattatcggttcagcaggttagagcaagaactagtgaaggcgaagactatctataaccccctaaccaacggccaagaaatatgcatagctctgaacaatgttttcaaaaacaacgtcacgatcaaagaattatcgtcgccctgtgctctaaaccagtcaccagctgcaaatagctgtctcagccaagttacagggcgaaattccgtcaccgcaaatgaaatcgaatcaagtgaaaatgatgactccgagccaccaaccaagagggcaaaaccgtctgcagaaaaaaacgaaagacaatggaatatgatcaagtaccgaaggccttatatcgacacggtttcatatgatcttatatttcaactgggttctaatcagtgtaagataatattcaacaaaaaggataagacagtccatgtagacctatccaaagaggctgcggaactatttgaaaggcaattttcagatgtcctgttgaaaactcccagcggtagaatcgatctgtccgaatacaaagtcaaactccgtaaaggtaaaaaccaacccgagtcacatctgataatccccgcatgcgtctccatctgtgatttggcggttaacggtacgaaatgcgccaatatcttttcattagtaaatgattccaaatgtaaagaaagagttttggattgtaccaacttgaagaatttgaactgtacacacggtttgaagctacatttatccaaatcgatgtggaaattgggcacaaataatgggaaattcattttaattgctgtaaaggcagaaactttttcggggacgaaggaatattgcaagatgattaattttctgtaa

SEQ ID NO: 1736 - DNA, 531 bp, Saccharomyces pastorianus
atgtccaacttagttaacaaacaattcccatccggtgactacaaattccaatacattgccatcagccaaagtgatgctgacagcgaagcttgtaagatgccacaaaccgttgaatggtccaagttgatttctgaaaacaagaaggtcatcatcactggtgctccagctgctttctctccaacctgtaccgtcagccacatcccaggttacattaactacttggacgaattggttaaggaaaaagaagtcgaccaagtcattgtcgtcaccgttgacaacccatttgccaaccaagcctgggccaagagcttaggtgtcaaggacactacacacatcaagttcgcttccgacccaggttgtgctttcaccaagtccattggtttcgaattggctgtcggtgacaatgttttctggagtggtagatgggccatcgttgtcgaaaacggtgtcgtcacctacgccgccaaggaatctaacccaggttccgaagttaccgtttcctctgttgaaagtgtcttggctcatttatag

SEQ ID NO: 1737 - DNA, 1713 bp, Saccharomyces pastorianus
atgagactggcaactataagatctgcgctacttccgtcgctctttgcatcgcaggcactggccaagatcataccggtggcggacaaccgcgacgacggtgacgacacgggctccaagtacgtgaagctctccttcgataagctttacggggattcgctggaaaatgctggcagcgataaaaccctagaagttcggctactcaagagagacgatggctacgaggaaattataataacgaaccagaaaagtttctactcggtggaactggaggtggggacaccagcccagaatatcacagttctagtggacacgggttcttccgatctatggatcatgggttctagcaacccgtactgttcgtcaagcagcggcggtttgcttgatggtatcaacccatttggctggcttacagaaacaggaagcgccacagccacgggctctgcaggaggatccggaggaggttctggaggaggtggcggaggaagcactggaggaggtggtggaggaggctttgcaacggcaactcaatcagtacccgcttcagaagccaccatggactgtaaggagtacgggacttttaccacttcggattcctccacgtttaaatcaaacaactctgatttcgaaatcagttacggagacggcacttttgcctctggtgtttttggtactgacgttttgaatttgagcgacctgaacgtcactgggttgtcgtttgcagttgctaataaaacaaactcgtcaatgggtgtgttgggtatcggtttgcctgcattggaagtcacctattccggctcttccgcttctactggcgggaaatcgtataaatatgacaatttccccatcgtattaaaaaattctggcgctatcaaatccaactcctactctttgtatttgaacgatctcgatgctaaacatggcaccattttgttcggaggtgttgaccataataagtattccggcactctgtacaccgttcccctggtaaacactttgagagggtttagctcccccatccaatttgaagttactttaaatggtcttgggacccttgaatccaacggtgacgaaaaaactttaactaccaccaaaataccggccttgttggattccggtaccactttaacctatttgcccgaggaaatggtagatctgatcgcggaagaagtaggggcccaatactcttccagagtaggatattatgtaatgaaatgcccatcgtctaataatagcactcaaatcgtgttcgattttggtggctttcacatcaatgccgcgctgtctagttttatcttgagcacaacgggcagtacgtgtattttgggtattcttccaacaggtgatagtagttctatccttggtgattcatttttgactaacgcatacgtggtttatgatttagacaatctagaagtttccatggcacaggccaaatacaatgtcacaagtgaggatatcgacatcatttcaacttctgttccaaatgccgttaaggcgccaggctacacaaatacttggtccacaagtgcatctatcgttactggcggtaacatatttaccatagattcttcagcaactgcttcgtacagtggtaacgtgacatcaagtactgcatccgccacttctactacatccagtaaaaggaacggtggtgatcgtactgtgccatctctacttttcacgctgatctctcttatttctgcattcatttga

SEQ ID NO: 1738 - DNA, 756 bp, Saccharomyces pastorianus
atgacagtgagaaaaatagctattctttatacagatgaagacagtgagtggactaaaccatggggaaattttgttgatatggcaatcgagctgttagaggaaaccaagaaattggagtgtgttgaacaagatgttgaatacgaggtctttcatgtccagaagggcaagttcccccgattgtcggaacttcaaaaagatgaatgtttggggatttacattaccggttccaaatatgattcatttgataacgaaatcgggtggattatagagctaagaaagtttttaaacgacatgttaactagcgactttgaacatccacccgtagcaggagtttgttttggccatcaggtaattgcggctgccctaggcagttcagtgggtcggaacccaaaagggtttgaaggaggcgttgtaccgcttaaactaaattcagtgggccaaaaattatttggagctgaaacattaaatctttccgaggtgcatagcgactgtgttttcgatgtcccagaggggtaccaaaattgggcatcgagtaacaaatgtggaaaccaagggctttatcggaaaaataaagtgctaacgtttcaaggacatcctgaatttaacagtggtgttgctcagaaaggactgttgaagtcccgagacaaggtgaaccttgaagagtttgaaaaatacgaaaggcagtgccgagaattgaataatgacggtgtaagagctgccagaagtatttggagattgttcttgcagggtgtgtga

SEQ ID NO: 1739 - DNA, 2565 bp, Saccharomyces pastorianus
atgacatatcaaatcactccgactcgagatttgcaaattattacagacgagctacaaaccctttcctcatacatcttccacacaaatatcactgatgatctgaactctctgctagtatggatgagccctgatgatcccaagagtaaccatcaactacgacccccaagccttcgtataaagaatattatcaagaacctgttccccaataacgcatctacttctccctatggtgtcatgaatagcgctcaagcgaacaattcaatcgtcaacgaagggaatacgaataaagagctgcaattacagtttatatcgacattcaaagagtactacgttttccagattcggtatcattttttttcacattttagtagtatcaattacctaaaagatattcagagatgggaaaattactatgagtttcccttacgctatgtttccatttttgattcgagtgttaacggttggtccctcgaacttaactccttaagacattatttgttgaatagaaataaaacgttcaagaccaatttaagaacaagattgaataaattaattatggatgatgactttgacttggcaagcaatttaattcgatggctcaactcagcaaatggatctttatcttccatgggattgattgtaaatgctctttttgataaaatcagtacgttttgcgaaatcaacatgagcgggatttggaataaacggtttatgatcatggaaaccttcaataaatttatcaaccaatattggtctcaattttcagaattgatcggttgccctgaagatgatcatgagctgacgaccactgtgttcaattgttttgagtcgaattttctcaggataagaacaaaagaaatcttcgatatatgtgtattagcttatcctgactcaaagatcacgctattggaattgaagaaaataatgaaagatttcaaagattacacaaatatcgtgacaacctttttgtcggatttcaaaaaacacattttaaaccccagtattactacagtagatgcgttgttaagttatgtaaaaactatcaaggcttttttggttttagacccaacaggaagatgtctacactcaataaccacatttgtcaaaccttatttccaggagcgaaagcacttagtaaatgtattattgtatgcaatactggatttgcctgaagaggaattaaaggagaagatttcgtttaaagtggatatgaaggcattactcttacttgtagaaactttacatgattccgatattgaccaaagtacaaatacacccaaaagcaaagacaagaataaagtaggttcatttccatggaatctccacgttaaaggaaagaaggaaaagaatgggagttcttcagtaaatcagagcatgctatacgagcacatccttaaccattatttaacgtgggtcccagaacctaacgatatgattccaggtaacattaaatcaagctcaataaaaacaaatctttttgaggtacttttagacctattcgaatcccgagaattctttatatcagaattcagaaatctcttaactgatagattattcacgttgaaattctataaattagataataaatggtcacgatgtttgaagttaattagggaaaagatcgttaaatcagcagaaacaaatcaagctaactatattgcaaatgggataattggactaccgcaaacaacggcgcctgcagcagatgcagatctgtcgaatatcaacagcatcgatgtcatgttatgggatatcaaatgtagcgaagagctgtgcctcaaaatgcatgaagtggctggcttaaacctagcgatttttccaaagtttatttctctgctttactggaagcataatggggatacgaataataccaatgagttgacatttaatctaccagcaagtttagagaatgaactacaaaaatattctgatatatactcacaattgaaacctggaaggaaactgcaactatgcaaggaccaagggaaaatagaaatggatttgaatttcaatgacggaaggaaattagtgctggatgtatctttggaacaatttagtgtaataaaccaatttaactctacaaatgatgaaccagtctacttgtcattagagcagttgtccgaatctctgaatattgcaccaacaagactgcttgatctcttaaacttttggattcaaagaggtgtcctttctgaagagaatgaagtttattctgttattgaatatagccacactgattttaaccaaacacaagtagagcttcctataaagaatgaaaacaataataatgagctacgtgacgagtctgaagtagagaaaaaatgtgaactaacgttggaaagaagtttaccattcatagagggaatgctagccaacttgggtgctatgaaacttaacaagatacactcgtttttaaagattacggtgccaaagaattggggatatcaccggattactcctttacaattagagaagtatctaaacgttctagcggatgaaggtaagttgaaatacattaccaacggttcatatgagcttgagaaaaatgggcacaaaaactcttag

SEQ ID NO: 1740 - DNA, 2832 bp, Saccharomyces pastorianus
atggtcaagtcataccagcgttttgagcaagccgctgctttcggtgtgatagcgtcgaatgcaaactgtgtttggatacctgcttcatctagaactaataatggtagtgggccagggcaattgatcacaagtgctctcgaaaatgttaacgtatgggacatcaagacaggagatttggtcactatcttgtccgatggcttgcctccaggtgcctctgatgcaaagggctccaagccagcagagtgtacgtatttggaagtacatcaagacactaatctgttagttgtcggttatgcagatggtgttattaaggtttgggatttggtatccaagacagtgctcttaaactttaacggtcacaaggcggctataacattattgcaatttgatatcaccggtacaaggttgatttccggttccaaggactccaatatcattgtatgggaccttgttggtgaagttggtctttataagctaaggtcacataaggatgccattactggattttggtgccaaggagaagactggttagtcagtacgtcaaaggatgggttgattaaaatatgggatctgaaaacacaacagtgtatagagacacatattgcgcatactggagagtgctggggccttgcggtaaaagacgacttattgattacaaccagtacggatagtcaagtcaagatttggaaattgaacatggagaatgacaaaatgggcgaaaagctaactgaaatgggcatttttgaaaagcaaagtaaacaacgtgggttaaagatcgaattcataacgaacgcatccgatggagtctcgttcttttacatccaaaacgcagacaaaactattgaaacctatagaatcagaaaagaggaggaaatagcaagaggtttaaagaaaagagaaaagagattaaaagaaaagggtttaacagatgaggaaattgcaaaatctatcaaagattcttactcttcactcattttacaccctttccaaactgtaagatcactgtataaaataaaatctgcatcatggacaacagttacaagctccaaattggaattggtcgtaaccacatcgaataataccatagaatactactctattccatacgaaaaaagagatccaacaagccctgcacctctcaagacgcatactattgaattgcaaggtcaaagaacagatgttcgtagtattgacgttagtgatgataacaggttgttagccaccgcatccaacggtttattaaagatttggaatgttaaaacacataagtgtatcagaactttcgaatgtggatacgcactaacctgtaagtttttaccaggtgggttactggtcatcctgggaacaagaagcggtgaattacagctcttcgatctagcatcatcaagtctcttagataccgttgaggatgcacatgaagctgctatttggtctttagatttgacttctgatggtaaaagactagtcaccggttccgcagataagactgtcaaattctgggatttccaagttgaaaaaaccttagtaccaggtactaaggacaaatttgtacccatgttgaaactaaaccacgacacaactttggaattgaatgacgatattctaagtgtacggatctcccccgatgacagatatttggccatttcattattagacaacaccgttaaggtatttttcttagactcaatgaaattttatctaagtttatatgggcataaattgcctgtactgtctattgatatttcatttgattcgaagatgattatcacatcttcagcggacaaaaacatcaaaatttgggggttagattttggtgactgtcacaaatctttatttgctcatcaagattcgattatgagtgtaaaatttttaccagagtctcacaatttcttcagttgctctaaagatgcagtggtgaaatattgggatggtgaaaaatttgaatgtatccaaaaactatacgcacatcaaagtgaagtctgggcactagcggtttctactgatggtagttatgttgtctcctcatctcacgaccacagtataagaatttgggaagaaaccgaagaccaagtgtttttagaggaagaaaaagagaaagaacttgaagaacaatatgaagatacattgctaacatctttagaagaaggtaatggtgatgatgcatttaaaggtgacgcaactggtgaaattgtcgaagatgaagcatctggtgttcataaacaaactctggagtcattaaaagctggtgaaagattcatggaagcactagatttaggtatcgctgaaattgaaggcatggaaatgtataacaaggacatgaagttgtggcaacgcaagaagttgggtgaagcgccaatgaaaccacaaggtaattctgtcttgattgctgtaaaaaagacgcctgaacaatatatcatggatacattatcgaggataagggcgtcccagctagaagacgcgttgatggtgatgcccttctcgtacgtcttaaaatttttgagatttactgatgccgtcatgaaaaataaaactttgttgcataatcacctacctttaatttgtaagaatttatttttcattatcaaattcaatcacaaagaattgatttctcaaaaaaatgaagaactgaaattgcaaataaatagagtgaagaccgaattgagaaacgcattaaaatctaccgaggatgatttagggtttaatgttcaaggcctgaaatttatcagacaacagtggaatctaaagcataactacgaatttgccgatgaatatgatcaacaagaaaaggataattctggcgcaaggaagagagtttttgaaagagtaatataa

SEQ ID NO: 1741 - DNA, 1263 bp, Saccharomyces pastorianus
atgatcgatctactgataagggatgactctacagatagctgccaggcatccaatgactacaatgggcacagtggtctccgaatactggcggtattcatcatattgatttcgtcaggactgggagtgtatttcccaatcttgtcatcgcgatattcgttcataagactaccggactgttgtttcttcatagcgaaattcttcggctctggtgtcattgtggccacggcattcattcaccttttacaacctgcagctgaggccctgggaaatgaatgtctcggcggtacgtttgccgaatatccatgggcttttggaatctgcttaatttcgcttttcttactctttttcactgaaataattacacattattttgtagcaaagacgctcggccatgatcatggagatcatggggaagtcactgctattgatgtaagggttcccagctctgaatataccatcagaaattcgaactcggatactgcatctttcaacaatgaagcggtttactctattcataacaacaaaaactcatacacaaccaaaaacgaagaacttgtcgctacttctgtaaaagaaaaggaaccagatatgttgaaatatgatctggaagtcggaaatacagagtcaattgcgaatgaaatagttccatcgagctcgcgtatgacaaatttcgcatctgtaccggggaaggatcactattctcatgaaaatgatcatcaagatgcttcccagttgggaacacaaatcgaggaggaagataaggagcaatacataaatcagatgctggcagttttcatccttgaattcggtatcatcttccactctgtgttcgtgggtctttccctatctgtcgctggtgaagaatttgagactttatttattgttttaactttccatcaaatgtttgaaggtttgggtcttggaacaagggtcgctgagacaaactggcctgacagcaaaagatatacaccttggctaatgggactagccttcactctgacgtcacccatagcagtcgcaataggcattggtgttagacactcttggatccctggttctagaagagcattgattgccaacggtattttcgattcgatatcgtcggggatcttaatttatactgggttggtcgaactaatggctcatgaatttctatattcgaaccagttcaaagggcccgatggcctaaaaaagatgcttagcgcctatttcatcatgtgttgcggcgctgccttgatggcactattagggaagtgggcataa

SEQ ID NO: 1742 - DNA, 1749 bp, Saccharomyces pastorianus
atggtttcagaatcgcgtcgagggagtgtaaaaagttattcggtcggctatcaagcaaggtctagatcgagttcccagaggagaccttcattgacacgtcaacgctcttctcaaaggttgattaggactattagcatcgggtccgatgttactaatgttactgacgatgatgatttgaaggctgtcaatgaaggagttgcagaccttgaattagatatttcagaaactacaaataagggacaaaggattacatcagcaacagacgccgcagacaatttgggctcggttccatcagaatgtattgagataccttttgtcgaggaaacactggatgcaagtttaccgttggattatttaaagcaagacatattaaatctcgttcagagcttgaaaatatcaaaatggtataacaacaagaaaattcaaccattggctcaggatataaacttaacaaagatgtccggtgcaatgaccaatgcaatcttcaaagttgaatatcctaatttgccgtcgctactattgaggatttacggtcccaacatcgataacatcattgatagagaatatgagttgcagatcctagctagactttcgttgaggaacataggtccgtcactttttggctgttttataaacggtagatttgaacagtttctagaaaactcgaagaccttgacgaaggatgacatcagaaattggaaaagctctcaaagaattgcaagaagaatgaaggagttgcacgtaggtgtacctcttctgagttcagaaagaaagaacggctctgcctgttggcaaaagattaaccaatggctgcgcacaatcgaaaatgtccaacaatgggtgggagaccccaaaaatcttgacaagtctctattgtgcgaggactggtccaagttcaaagatattattcaaagataccacaaatggttggtcgtacaagaacatggcatggaccgagtcaacaagaatttggtgttttgccacaatgatgcgcaatacggtaatttgctttttaccgcacctgtgatggacacatcaaatctgcactcggcgccttcctccacgtcactctcgtcacattcgagttcattgttcccttcagattctaatgtcatcgtggatgatattatcaacccgccaaagcaggaacaaagccaagattctaaactggtcgtcattgattttgaatatgcaggcgcaaacccagccgcatacgatctagcaaatcatctctctgagtggatgtatgattacaataatgcagaggctccgcacaactgccattctgataaatatcccgataaggagcaagtcctaaacttcttgtactcttatgtctcccatttaaggggcggagctaaggagcccattgatgaggaagttcaaaggctctacaactcaatcctgcaatggagacccacggtccaattgttttggtcgctctgggccatcctacaaagcggtgagttggaagaggaagagcctcacactgtcaccgccaaagaagaaactggccccaatggaaacaaatacatcatcaagacggatcccagccctgtggaagaggatctcgtggataacgaagatcagccagaggctggtgtcagcatcgacacgttcgattatatggcttatggccgcgacaagattgcggtcttttggggtgacctcattggtctgggcataatcaccaaggaagaatgcgaaaaatttagctctttcaaattcctagatactagctatttgtaa

SEQ ID NO: 1743 - DNA, 1692 bp, Saccharomyces pastorianus
atgtctgaaattactttaggtaaatatttattcgaaagattgagccaagtcgactgtaacaccgtcttcggtttgccaggtgactttaacttgtcccttttggataagctttacgaagtcgaaggtatgagatgggctggtaacgccaacgaactgaacgctgcttacgctgctgacggttacgcccgtattaagggtatgtcctgtatcatcaccactttcggtgtcggtgaattgtctgctttgaacggtattgccggttcttacgctgaacatgtcggtgttttgcacgtcgttggtgttccatccatttcttcccaagctaagcaattgttgttgcatcacaccttgggtaacggtgacttcactgttttccacagaatgtctgccaacatttctgaaaccactgccatgatcactgacattgctaacgctccagctgaaattgacagatgtatcagaaccactttcaccactcaaagaccagtctacttgggtctaccagctaacttggtcgacttgaacgtcccagctaagttgttggaaactccaattgacatggctttgaagccaaacgacgctgaagctgaagctgaagttgtcagaactgttattgaaatgatccaagacgccaagaacccagttatcttggctgatgcttgtgcttctagacatgacgtcaaggccgaaaccaagaagttgattgacttgactcaattcccaaccttcgtcaccccaatgggtaagggttccattgacgaacaacacccaagatacggtggtgtttacgtcggtaccttgtctaagccagaagtcaagaaggctgtcgaatctgctgatttgattttgtctgtcggtgctttgttgtctgatttcaacactggttctttctcttactcttacagaactaagaacgtcgttgaattccactccgatcacatcaagattagaaacgccactttcccaggtgtccaaatgaaatttgctttgcaaaaattgttgactgctatcccagcagttgtcaaggactacaagcctgttgctgttccagctaaaactccagctaacaaagcccttccagctagtactccaatgaagcaagaatggatgtggaaccaattgtccaacttcttacaagaaggtgatattgttattgctgaaaccggtacttctgctttcggtatcaaccaaaccactttcccaacagacgtttatgctattgttcaagtcttatggggttccattggtttcactgtcggtgctcttttgggtgctaccatggccgctgaagaacttgatccaaagaagagagtcatcttattcattggtgacggttctctacaattgactgtccaagaaatctccaccatgatcagatggggtttgaagccatacattttcgtcttgaacaacaacggttacaccattgaaaagttgattcacggtcctcacgctgaatataatgaagttcaaccttgggaccacttggctttgttgccaactttcggtgctaaggactacgaaacccacagagtcgttacaaccggtgaatgggacaagttgactcaagacaaggaattccaagataactctagaatcagaatgattgaagttatgttgcctgtcttcgatgctccacaaaacttggttaaacaagctcaattgaccgccgctacaaacgctaagcaataa

SEQ ID NO: 1744 - DNA, 870 bp, Saccharomyces pastorianus
atgtgggccccattagcgcataccagaccggaatctcaaaagaccgacttaacgtcattgttctcgaccgatcgcgagcagaacccattgaacgactaccaataccagatcaacatcagggaactggaggattactacaacaaaaccatcttgaatgaagacaccatacaggagacaagcagcgagatatcttctgcggtctcgttctccccctccaaacagaaaaacgctattcagccaggacttctgtacgacccacaattgataaaccctttcctcccatccgctagtctggacactagcacactgaccactttcaaaaagaagctggaggtacagatcaacccagattacgtccccaaatcttcacaattgccattgactttgcaaaatttgcagcagttgtcccagcaaagccccgaagacgatgctccatcttctccacaaaagatctctccctctcaacctaaggtgaaatgccaaccgcaggagaccccaaagcagctatacaagaccgaactatgtgaatcttttactttgaaggggacctgcccttacggcaccaaatgccaattcgcacatgggttgaacgagctgaaagtcaagaaatcatgcaaaaacttcagaacgaagccatgcatgaactgggaaaaactaggatactgcccctacggcagaagatgctgcttcaaacacggcgacgacaacgacattgctgtttacgtaaaagctggtacttattgtaaccgcagtgccaacaacaaacagtctgaccaaaagagaagcaccagtcgcggcgatgatcgtaattatgcaaagaagaaaaacctcaacgttaaagtgaaagctttgcaaagaatgacttggtga

SEQ ID NO: 1745 - DNA, 2973 bp, Saccharomyces pastorianus
atggctgtctgggaacaactagaagtctcaaaagcacatgtcgcttacgcctgcattggtgtattctcgtcagtcttctccttattctcgctttacgtgaaggagaagctgtatatcggtgaatccactgtggcagggatatttggccttatcgtgggtcccgtttgtctgaactggtttaatcctttggactgggggaactcggacaagatcacgttagaaataacaagaatagttttatgtttgcagattttcgccgttgccgtggagctgccacggaagtatatgctgaaacattgggtatccgtcacgatgctattgcttcccgtgatgacagcaggctggcttattataggcctctttgtctggattcttataccggggttgaacttttctgccagtctgttgatttcagcgtgtgttaccgccacagatccaattttggcgcaatcggttgtttctggtaagtttgcacaaagagtccctggccatttgagaaacctgctgtctgcagaatcaggttgtaatgatggtatggcattcccctttatattcctttcactgaatttgatcctgcatcctggcaatggaagggagatcgtcaaagattggttttgtgttaccatcctgtacgagtgtctattcggatgcctgttaggttgtttcattggttatgccggcagaatcactatccggtttgcagaaaagaaaaacattatcgatcgtgagtccttcttagcgttttacgttgtcctggcattcatgtgcgcagggttcggctccatcctagatgtggatgacctattagtgtcgtttgcagccggtgcggcttttgcatgggatggatggttttcccaaaagacgcaagagagtaacgtttctacggtgattgacttactattaaactatgcatactttatttatttcggtgccattattccatggagtcagtttaacaatgggttgattggtgcaaacgtttggcgtttgatcattctgtccgtagtggtcatttttctacgtagaattccggctgttatgatactaagaccacttattcctgatattaaatcgtggcgtgaagcacttttcgtgggccatttcggtcctattggtgttggtgcgattttcgccgctatattagctcgtggcgagttagaagctaccattaccgatgaacccactccattgaacgtagtaccgacaaaagaagaatccaaacattggcaattaatagcttgcatatggcccattacgtgttttttcattgttacttccattattgtccacggatcttcagttgccattataactctaggtcgtcatttgaacacaattacgttgaccaaaacatttaccacacataccactaatggtgaaaatgggaaaagttcatggatgcagagattaccttcattggataaagccggacgttccttttcactgcatcgtatggatacgcaaatgacactttcaggagatgaagaagaagaagatgatggagaccgtaaaggactcacaggaggcgaagatgaagaagggttaaacaatgatcagatcagcggcgtcgaaacaagcggagttccttccagacctattggcggtatgccgagaagaagaaaacgttcaatgagagagaagagactaagtcggggacaaaaactaaggaataaaggtagagaattgttttcatcaaaatctaaaaatgaaatgtatgatgacgatgagttaaacgatttgggcagagaaagactacaaaaggaaaaggaagcacgcgccgccacatttgcattaagtacagctgttaacacacaacataataaagatattggaatgggtggagaagaggaagaagacgagtatacaccagaaaacgaatacagtgacacttgcaattataatgataaagatatcacaccaagttatgaatcttctctaggatctccgtctctgagagaacaaagaagatacgtaccgagaaaccgttatgatgaagaaggagtagaaagtgaaattgagagccaagatgagacggaagacgaaagtgaaagatctatggccagcagcgaagaaaggagaatacggaaaatgaaagaagaagaaatgaaacccggcacggcttatttggatggtaatagaatgatcattgagaataaacaaggtgaaattctgaaccaagtagacatagaagatggcaacaagccgaaagatgaagaagccagtattggaagtactgcccattcaagcttaaccaccacaatgaccaatggatctagtaatagtgggggaaggttaaggagaatattgacgcccacatctctgggaaagatacactcactggtagataaggggaaagataagaacaaaaacaacaaatatcatgcattcaagatagacaatctgctaatcattgaaaatgaagacggtgacgttataaagagatacaagataaatccgcacacgactcgttataaggagaataagaaccgttcaaggaatgatagtgttgtatcaagagcactaactgccgtaggtttaaagagtaaagggaacagtggcgtgccgccgtcattaaatgaagagagcgctgtcgaggggtcttcaaagaagggacttgggatgttgaagaaaagaacattgacacccgcaccggtaggaggagtccaagcatcactaactttagaagatgcgacatcttctgaagaagacctgggtgacagttacgacgtggatgatagtgaagattacgacgataatgcatacgaatcagaaactgaatgcgaaagacaaagaaggctgaatgcgttgggtgagatggtggcaccagcggaccaagatgatgaagagttgccaccattacctgtggaagcacacggagggaacgatggttccggcggtgcggaaggcaagaaaaaacaaaagagtgctgctgttaagtccgctctatcgaagaaacttggtcttaataagtaa

SEQ ID NO: 1746 - DNA, 1920 bp, Saccharomyces pastorianus
atgtggaaattcaataggaagctagcccgtttaacctgccgtctctattcgaactcgggcgccagctcgcctgtttgcggtaaaaaaaaactgccccagaacttgaaattcgtcgttctgaaccctacccagtctggactggtcaagaatgaccagaagctggctaggcaccaaccctcgagcaggcgcgcttacaaagacaccggcaacgacgacaacgacgacttcggctcgaagctgctcgtcttcgagaagcagaactcgctggactccgcattgaactccatccgcttgaaaaaaccaaccaacaccagcttgtcctccctcgagtacaacgctcttctccagacgctcacgtcgagttacaaccgccaccagctgcgcgagttcatctcctctaaccacccggactcccctttgcatttgacacattggaagaaaagcaaactgtcacagtacatcattggaaacatctggaactgccacccagagtcaacaccgtccacgcccacgggaatcaagtccacgtcgttgaccttccagttcgacactccaagggagatcttccttttgctcatcacccaaaacggtaaaatcctcacaaacttcaataagctgggcttgaccttcatcatctccatccaggacaacgagttgaccgtcaagggctcgtccagtctgctcaaatatgtggagatttctcttaacaaaatatggtcaaatattacccaagaaacagtcgacatacacgcttccgccccgtcaaaagacctggtgaaccttattcagaaggaatctcacacttttttcgaatacctcccggagtcgccagcgtataagatctctgcactaagtcccaagaagatatccatggcgaaggcccttctgctgaacgcaatctcttccaacccgcacgcatcccaacaataccacacaatcgaatcggccccgccaaccaagctggcatcctacccattcaacaacactctggagaacttggactggctaaacaagtcccgagattggtcaagactgcagtcaaccgtccctagacccggcgcggatttgggaaccagcgccaccgctccacaagtgacagatgcgcaaattaaccaatacaatgctttcttgtccgcgaacgcgccctcttcccccactcccagctccatctctcagtgcctctcaatgacactaggctattccttacaatcgccggcgtctcccagcgtcttccagcctttggtacacaaaagctttatttcaaaactactaagcttatccaattttacagaatcgtcgtcgtcattgacgcccgcatctctggaccagcatctgatcacaaaccctcaccactcctttgtacagttgaattttactcctatgccgcccatctcgaacccatcgcccccttttttacaagtctggttcgaaaccgatgaattcgataatattgttactgcttcaatgagacctctcctgaaactgcaggaaaactctatcgttttacgaaccccacaatcccaaacagactacaaaatcacatccgactacatccaagatttgctgcccaattttgaccagacccacccggacgcttggttaagtgatcaaaaaggtctccaggaatttctcgtaaagtcccactggaaactaaacaagtaccaaaaccttatgaaaaaaatcacgatcgcagtgccgaatagccaagcacagcaatatcaattgaccgatatcttaacacatcgtgtcttgaatttgcaattccccgccggcagtgcccaggataaatacatcattcaatattctgatatcaaccgcggctttgtaaacaatggttcatacaggcagttggacttcattaatataaacccgaacgaaacttccttgaaaactttcattaatgacgttttgaacttctaa

SEQ ID NO: 1747 - DNA, 2061 bp, Saccharomyces pastorianus
atgaagtttctagcgctcatatcaggtgggaaggactcattctacaatatttttcactgtttgaaaaacgatcatgagttaattgcactaggaaatctatatccaaaggaatcggacaagcaagagttagattctttcatgttccaaactgtgggacacgatctcattgataactactccgaatgtattggtgttccattattcagacggcatatactatctaacagttctaaaaatgtggaactgaattattcagccactcaggatgatgaaatcgaagagctgtatcaactactgaaaactgtcaaagatcaactcccagatttagaagctgttagcgtaggcgccattctgtcatcttatcagagaaccagggtcgaaaatgtctgttccagattaggtcttgtagtgtttagttatttatggcaaagagatcaagctgaattgatgagtgaaatgtgtttcatgtccaaagacgttaacgatgttgaaagcgctactagttcgggaaataagtttgacgctaggatcatcaaagtggccgcaatcggattgaacgacaaacatctaggcatgtcgcttcctatcattcaaccacttttacataaactaaaccaactttatcaggtccatatttgtggggaaggtggagaatttgaaacgatggttttagatgcaccttttttcaaacatggatatctgaagcttactgatatggcgaaatctaatgacggtgatgtccataacgcaagattaaaagtggaatttcaaccacgtattttaagtgacgattttttacagactcaactggataagttacctgtacctccgattttgcatgatgactggctagaactatcccaagtactaaaacaaagacagacggaaacaagacaaagagagttaaaaaccctagcattagagaaagtaatgggaacgtcaaccaataaaatcaacgacaagctctacatctcaaacctaaaatcatgtacatccaaaacggtggaagaacaaagtaaagatatttttacagaactagctgagattttacgctccaatgggattccccgctctcatatattatcatcatccctacttgtcaaagatatgtctgattttggaaaaatcaataagatatacaatgagtttttggacgtgacgaaatacggtccattgcctccatcaagagcatgtgtaggctccagatgcttgcctgaaggttgccatgtccagctatcagtggtcattgatactgaagtaagaaaaaacagcggtgataatgttaaggaacacaagagcggcttgcatgtccaaggacgttcatattgggcgccgtgtaatattggaccgtattcgcaaggtatctggtcaagcgatgatgcaaaccaagtgtgttttattagtggacaaatcggacttatacctcaatctatggagctaatgcaacaggattctctccatcaaacagttctggctttacaacattttgacacactgtgtaaaacaataaacgcgcagagaaaattgtccatgacatgttatatttcagatgagtctatcattgacaatgcttgcgaagcctgggtgctttactgctgtcaaatgagtgatgaatcagacctatggatggataaaatggacgatgacaaagaatgtttaatcattgtaaagatttcggacttacctagaggtgctgttgccgaatggggtggtattacttgtaaggaattagttaaagaagaagaagacgaagttgatgatgacgaggaaacggacaacatctcacccaagattcaagagctaaacttagatactgatgacttacacaccatcacagtcaattcgcctggatctcataaacaattctctacagggtttgtagatgaaaaagagaagctattgcttgtcctaaaaaaaacctcaaaatcggctcaagtaactctctattataatccagacgatgacgttcctttttaccaacacgtagaatattatccggtagagagaatttttgactatcgtggtaatgagcatcgctttggcatacatgttcgttcatga

SEQ ID NO: 1748 - DNA, 606 bp, Saccharomyces pastorianus
atgtatgatatgaaggcagtaataagagccttagaacaagagtaccggttgatattgctgctgaaccacagaaataagaaccaacatagagtggccagttggtatggatcattcaacgagctaaaaagaaattgtgggcagatagtagagcttctgggattaacaagattaaaaacgacatgcatgagagatgacaagtgggtcaagttgcacagactattacagagggcgttgtttcggcagttgaagaggtggtactgggatttcaatagtattattgcactggggcaatttgtaacgctaggctgtgtactagtcgcattactagcaaacgtgagagccttatatatgaaaatatgggaactaagctatgatgagttcataaggtgtgaatgctttataaaaaaaataataaagggaaagaaagaatctgttatggacgacggagaggaacttggagaagctatcaatgaagatatccgcaacgttgtcagagaaagggagcatgtagagccaatacaggttgttgagccagagactgataaaaaaaagaagaaaaagaagaaaaagaagaacaaatcagccatcgacggcatatttggttga

SEQ ID NO: 1749 - DNA, 903 bp, Saccharomyces pastorianus
atggttaacagttcaagtcacccttgcatcaaggatggatggtttagagagataagcgacaaaagttttccaggccaggccttcactttggctgtcgactcgatactttatcaggctcagagtgaatttcaggacatcttaatctttagcaataaggtatatggtacggtgctagttctggatggcataattcaatgtacagagtttgatgagtttgcctaccaggagatgattacgcatgtcgccatgtttgcacattccaatccgaagcgtgtacttattattggtggtggtgatggaggtgtgctgagagaggtggccaagcacaagggcgtagaagagatcactatggtggagatcgattcttcagttattgagctatctcggaagttcctgcccacgttgagtaatggcgcttttgacgatgagaggttggatttgaaactttgcgatggcttcaaattcttagaagatataggtgaagctggcgctcaaaagaaattcgacgttattatcactgatagttcagaccctgacggtccggctgaagctttttttcaagaaaggtatttccaattgctacataatgctctaaaccctgatggtattgtcattatgcaaagctcggaaaacatttggttgaatctaaattacctgtgtgatttgaaaaacactgccaaaagagtgtttcctaacacagaatattgttataccatggttccaacgtatacctctggtcaactaggtttgattgtttgtagtaataatgacagtataccgttaattgccccacaaagatcgctttctggacgggagcaagaacagctaaagtactataatcctcaaatacattcgagttcatttgttttgcctacttgggccgataaagttatcaacaaataa

SEQ ID NO: 1750 - DNA, 2760 bp, Saccharomyces pastorianus
atgctgaaaacacgtatagaggaggtacagttacaattcctcatggggaatacagaactcacccatttgcaagtatccaatgaccagcttgtagtaaccacacagcgaacggtttacagaataaatctacaagacccagctatcgtcaataactttgaatgcccgttgaataaggaactagaatcgataatgaatgtacacatttctcccctgggtaccgccattttcattcgaaccaacttcggtagatatatgttgctaaaggacggcgaattcactcaatttaacaaaattaaaaaccttgatcttagttcattcttttggattgatgaaaccacctttcttatggggaccaagaaagtggccaagctgtaccgaatcgaatggactggcaaggactttacctcaaaactatggtacgacaacaagaaactgcccgggggtatcgatggtgtggcgtattggaaaggttctttattattaactattaaggacaatattttatattggaaagacataacgaaaatgaagcttcctttgctacaaccagatgaatctgagcaatttgagaggttgaagcatcacacaataaagaaatttgattcttataacgggttatttgcctgggtcacgtcaagtgggattgttttcggagatttaaaagataattttacggctaaagattctgcttcatctgataacgtggggaaattcttatcttcttcaaaagttcttctcaatttcgagttacctgactataacaacgataaagaccatctaattaaagatatagttttgactcccttccatattctacttttaagaaatgatacagttactatggtaagtcaattgaataatgacatcgtatttcatgaagctataccgagacaccgatttgcgagtgccactgctgatagtaatgaaaaattcctgggacttgtaagagattcggaaaaggaaacattttggtgtttttccaatagaaacgtttttgaaataataatcgagaatgagtctaactcaatatggaacttgttagtcagagataataaatttgacaaggctctgtctctaaagggcctgacgcccagagaaatggaagctatcaaattttcaaaggcaatgtatcttttccacactgctaaagattttcattcagctgccaacactttgggagttatcaaagatttatcacattttggggaaatcgcactgaattttctacaattaaaggattacaacgacttaaacatagtattgataaaacagctggaaaatgtgccttggaaatcaacacaagttgttttgtcaagttggattgtttggaatttcatgaagcaattaaacgatattgaactgaaaatgcacactaccaagactacgtctgtcgatgaagataacttgttgaattggaatttaatgctcaaagagaagtcaaatgaattgactaagtttttagagcgtcatttagaaacgcttgataatgaaaccgtttaccagataatgtctagacaaaataggcaaaatgaattattggtttttgctaagttgatcaacgacatgaaatttttgttgtcatattggattgatcaaggaaattggtatgaatccttaaaaattctgttgactataaacgataacgacctggtttataagtactctttgattcttttgttaaattcacctgaggcaacaatatcaacgtggatgaaacttagaaacttgaacccaaacaagtttgttccaacaattctaaagtatttcacaaactggcaaaatagcgccaaactcgttagtagctcatcggaatatccagaaaactactcattaacttacttgaaatggtgtgtcaaagaagttccaagaacatgcgatcctataatatacaattcaattctttacatgatgattacagacccgaaaaatgatgcaatattagaaaacgatatgataaaatttatgaggtcaaatgaaaataagtttgacctgaactttcaattacggctatcattaaagtacaaaaagaccaaagtttccatctttcttttaacacgcctaaaattattcgatgatgccattgatttagctttgaaaaatgatttgattgatgactgtaaaataattgtgaatgatgaaattcttatagaggattataaactcagaaaaaagttatggttgaaaatcgcaaaatatttattactttcaatgaaagacattgacattaaacaattgattaggacaattttaaatgattctaatgaagttttgacaatcaaagatctcttaccatttttcaacgaatatactacaattgctaacttgaaagaagaattaatcaagtttttagagaatcacaacatgaaaatgaacgagatctcagaagacatcataaactctaaaaacttgaaagtggagataaatactgaaatttccaaattcaatgagatttacagaattttagaaccaggcaaatcttgtgatgaatgtgggaagttcttacagataaaaaagttcatagtttttccctgtggtcattgtttccattggaactgtttgatcaggttgatattaacctcaaatgattataatttgagacagaagatagaaaaatttttaaaagccaagaacaagcataatctaaatgatttagagtctattattgtggaaaaatgtggattatgcagtgatattaacgtaaacaagatcgatcagccagtgcgcattgatgaagcagagttagcgaaatggaatgactga

SEQ ID NO: 1751 - DNA, 2196 bp, Saccharomyces pastorianus
atgaccattgatggtacggggcaatctaaggaggccttgcaagatgaacggttgaataccgggtctgataagatctatcagaactatatgatgcccgctttggagctttatgatgcaaaggtttctattaatcactggcaattacgagattgtatcaagccgagctccttgaaccagagcaaactgtattatatctacgaccattcgataagagtattagatacggactcttccaccttaaggcctttagtaaggcggcatcactctatccaaccgagtaacgccagtaagcactccatttcgaagacatccacaaagggtagtaaggcgacaggctcagtaatctcgaaaaatttgcacgtcccttccgaaaaactggtggaattcaactttaaaccaagatgttttaccgaattaaacgggttgactgtttgtggtgggctcattggctctgacgataaggggttcccttccaactggaaccgtttagctcaggatgcaaatacgtcactgcctccgccttctcaaccgattagcatttccaaaaatattagttttcctataaactcccactattcaaatcccaatatctggaaaggcattgtggaattttacaatgaagaaacagacactatgatgacattcactttgggccagttcattaacaattgtgttactcttcataacaaggccacgacacagttcgatctttttgcttgtaacaacgatgggcacctttatcaatgcgatgtaagcagtagggatgtaacattagtgaaacgctatgctgatttaaaatttcctttgaacaacgcttccttgtcgcacgatggccaaactatggtagtatctggtgattccaataaatttgctgtttacaaacagaatgaattaacaagccaattttccttacgttacgataataatccctcttggggcagttcctcccatcgcgtcagaagaataccgcggtttgctttgcctgatgaatcagaatgtattgaaaatgtatatgaagcgccaaactcagatcacgggttttataattgcttttcggagaacgatttacagtttgcaactgtattccaaaatggcacttgcttagtctatgatgtcagaaatatggctacccccatggcagaaattagttcaacaagaccgcattctcacaacggtgcatttagagtttgtaggtttagttatggcctagatgatttattattcgtctcggaacatcaaggtagagttcatgttgtagacaccagaaacttcgttaaccaccaagtcattgtaattcctgataaagtcaacatggaatacataaatgaacagagaaatagttcaaaccccagatttaatatgaacaacaataacgacaataatgataatgacaatagcaaacacgaatctcatttttctcaagggacagattaccgttccttagcaagaagaaggttctcattgccttctttgtcgaacatatcagaaccctggataacaatggcacaaagaatccctacaaaatatttagaaccacaaattttaccatttccaaaagttatggacaaaattagtaacgaatcaatcttattttcttcgccacgtaacccatcaaacgagacttctcatccaaacaagaggcgatgttcatttagaataagaagggtgtctacatcgggtccaattactgactcttctaatggccacgtaaatttgagcgcgcatactactgattcgactgcaacttcatcgtcaaattctgcatcccaaaatttgattgaccctttgattctttctcaccagcaagcacacaatgatgtttttgaagatgatgaatattatgaggcttataatgacgttcattcaacataccgtgtttcttcggactatcctggtctctcaccaagagcttttgaaagtttcctaagaccgccttcaactcctgacttaccgtcggatgatgacaattttgccacaaataatagaaataataggggaacatcaaattttttgagaagagcagtagtttcaactcaagagaataacgaatttctagaagaaaacaatatatcaggtgttgattgggttgaagacagaaacggtagttctttgattattggtacggattatggtattatgaggtggaatatcaactcatgggcaagaaggagtttctctagttacgatttatgttaa

SEQ ID NO: 1752 - DNA, 852 bp, Saccharomyces pastorianus
atgtccaacccatttgatttgttaggtaacgacgtcgaagacgctgacgtcgtggttttgccaccaaaggaactcgtcaagagcagcacttcttccaagaaggctgacgttccacctccatctgctgacccatctaaggctagaaagaacagaccaagagcttccggtaacgaaggtgctattaaagacaaggctgccggtagaagaaccaacaaatcaaaggatgtcactgactctgccgagaccaagaagcctaacactagaaaggccactgaccgtcactctagaacaggtaagactgacactaagaagaaggttaaccaaggttggggtgacgacaagaaggaattgagtgctgaaaaggaagctcaagccgatgccgccgctgaaattgctgaagatgctgaggagtctgaagacgctggtaagccaaagaccactcaattgtctctacaagactacttgaaccaacaagccagcaaccaatttaacaaggttccagaagccaagaaggttgaactagacgctgaaaagatcgaagctgctgaaaaggaagcttacgctccagccaccaaggtcaagaacgtcaaatccaagcaattgaagaccaaggaatacttggacttcgatgccacttttgctgaagccaactctaaaaagaactttggtgacagaaagaacttcggtgacagaaacaacaccatcaacagaggcaacttcaacaaccgtcgtggtggtagaaccgccagaaagggcaatgacagcactgccaccagcaacactgctaactctgctaactctgttcaaaagaaccgtaacatcgacgtttctaacttgccatctttggcttaa

SEQ ID NO: 1753 - DNA, 1761 bp, Saccharomyces pastorianus
atgtctcttactctaggtgccgctatctacattgctttgaaaccaatttttaaaatatacaccattatatttgttgggtttttattggctaagtttgatatcgtttccatggaaaattctaagggtatatcaaatatggtcgttaatgcaatcttaccttgcctaacattcaacaaaattgtagccaatatttcatgggaggacatcaaagagatcggagtgataatcctttcagccttcgttttgtttgttttaggtgccacaggtgctatatttacgatatttgttacaacagttcctaaaaaatttttttggggcctcatatttgcaggcttctttcctaatatatcagatttacctattgcttatgtacagagcatgggaaacggttctatatttaccgctgacgaagctgacaaaggcgttgcttactcgtgtatctttttatttattcaaagtttcctaatgatgaattttggaatgtggagggtagtcggactagattttagagatggaggaaaacgagatggagaaaatgctcctccagctgcaagtcctgttaccgaagagtacgaacttaccggggcctcgaaaatagagaatattgtacgtcctctaaacacttaccagtcgaaggaaaagatgagtaatagcgatttgtctttgaattcaatagcgacaaatgatatgacatctcaagaatcttacgaaaatccaagcggctacatcaagccttacaaagggatatcccttcggacttccaatgacggatcctttaagtccaaaaataatccgccacacactgaaatatataggacgtcctcagctttttcaagccctggtgccctggagatgtcgagaatacaggagaagtcttcattacacgacctcgcatccattcgcagcagccgcggaagttcgagttatatgaggcaaagaagaccagtcgtgaatgaactcatttcaaaatatagcgctgttgacaagattaaaaagggagagctagatctgtcaagaccactttctttgacggaagaagtcggtagtaaaaatgcaagtattggaaatgcgtccgccgacactaccaatgatgaattcaacaatgaagaaaactacactagtgacaatagaagcgacagtgacaaaaaaagcaatatatccgcgttcatagaaaggcataatcttaaatggttacagtattttattataaattgcctgagaccagcatctctgggagccatactaggcattttatgcgccctaattccctgggtgaaggcatgtttcgtatcaacatatgtccatgttcataaagcacctgacggagagcccgtattaaattttctcatggatttcacagaatacattggaaatgcgtgtgttccattaggacttttattgttgggcggtactttagcaaggttagaaatcaaatcactaccccctgggtttataaaatcggcaatattaatgacatgctttcggttaattgtcattcctattatcggtgttctttgggtaaataaattgtattctattaaatggttagatacgccaattgggaaattcgatatgatcttgacatggtcaatgcctagtgccactgcccaggtttatttcacggccttttatacgcctgcgtgtggagagcatattcaaatgaactgtttatcagtcttatttgtcatacagtacgcagttcttttcatcactgtagcgtttgttgttacgtacactttgaaagtagacctaaaagtttaa

SEQ ID NO: 1754 - DNA, 330 bp, Saccharomyces pastorianus
atgactaaagataccgggagtctagacgcgtacacagtgaacttcatgccttgttacacagaatatcaaggtccaaccacagagttcaaagactacaaattcgacgacaccatatacttccgtgggaaggagctgcaaaaggagaagcccgcctccactgctacacacgatacctcgagtgccgctctaagcaatggcgctatcttgtcgggaaatacagttacgggcaaaatagtcacagttaacaactacgaaagagagggcaccgaccgtaacgaattggggcgtttgcaagaattgatctacatcaccaaagtcatcaaccagtaa

SEQ ID NO: 1755 - DNA, 1389 bp, Saccharomyces pastorianus
atgttttctagagcagtatccaggcttcgcaacacaaaaaggcttctcagtacagtttcgtcacaaatcccaggcacacgaacctcgaagttacccaacgggctaactatagcttcggaatacatcccgaatacatcttcagctacagtcgggatattcgtcgatgctggctccagggctgaaaatatcaagaataacggaacggctcattttttggagcatttggcgttcaagggaactcaaaataggtcacaacagggaatcgaattggaaattgaaaatataggatctcacttaaatgcgtatacctcgagagaaaacacggtatactatgccaagtccttacaggaggatatccccaaggctgttgagatcctgagtgatatattaacaaaatctgttttggatagtaatgccattgaaagggaaagagacgttataattagagaaagtgaggaagtggataagatgtacgacgaagttgtttttgatcatctccatgagatcacttataaagaccaaccattgggaaggaccattctgggacccattaagaatatcaaatctataacaaggtctgatctaaaaaattacataacaaaaaactataaaggtgacagaatggtactggctggtgcaggtgccgttgaccatgaaaaattggtggaacatgcccaaaaatattttggtcatgtacccaaatctgaatcacctgtcccgttaggttcaccaagaggtccactgccagtcttttaccgaggtgagaagcttattgaggaaaagacgctgcccaccacacatgtcgccattgcactagaaggtgtttcgtggtccgctcctgattattttgttgctttggctacgcaagctattgttggtaattgggacagagccattggcacagggacaaattctccctctccattggctgtatcagccagtcaaaatggacctttggccaattcgtatatgtcgttttccacatcatacgcagattcaggcctgtgggggatgtatatcgtcactgattctaatgagcataacgtgaagttaattgtagatgaaattttaaaggaatggaaaaggataaagtcaggaaaaatctcagacacagaagtgaacagagcaaaggctcaactaaaggcagctttgcttctatcgttagacggttcaacagccattgtcgaagatattggtagacaagtggtgacaacaggtaagagattatcacctgaagaagttttcgaacaagtggataaaattactaaggacgatattattatgtgggcaaattatagattacaaaacaagcctgtttcaatggttgctcttggaaatacatctactgtccccaaagtctcttacatcgaagagaaactaaatcaataa

SEQ ID NO: 1756 - DNA, 459 bp, Saccharomyces pastorianus
atgcaaattttcgtcaagactttaaccggtaagactattacccttgaagttgaatcttcagacactattgacaatgtcaagtctaagattcaagacaaggaaggtattccacctgaccaacaaagattgatctttgctggtaagcaattggaagacggcagaactttgtctgactacaacatccaaaaggagtccactttacacttggttttgagattgagaggtggtggtaagaagagaaagaagaaggtctacaccaccccaaagaagatcagacacaagcacaagaaagtcaagttggctgtcttgtcgtactacaaggtcgatgctgaaggtaaggtcaccaagttgagaagagaatgtagcaacccaacctgtggtgctggtgtctttttggctaaccacaaagacagattgtactgtggtaagtgtcactccgtctacaaggttaacgcttaa

SEQ ID NO: 1757 - DNA, 693 bp, Saccharomyces pastorianus
atgaagttattccaaaacagttatagttttgaatatccgtgggaccaagtaactgcagctaactggaagaaatatccaaatgaaatatctacacacgtcatcgctgtggatgttctgagaagggaattgaaagacgaagataaggtcttggttacagaacgtttaattacagtgaaacaaggtgttcccaaatggataatgatgatgctcgggggcactaatacgagtcatgtaagagaagtttcagtggtagatctgaataatcagagcttaaccatgagaagctgcaacttgacgatgtgtaatttattgagagtctatgaaacagtaacatatagcccgcacccagatgactctgctaataaaacacttttccagcaagaggcccagattactgcatacggatctataaggaaactgtgtaacaaggtagaagattggtccgtgcaaagattttgcgagaacgctaaaaagggtaaaatgggattcgatactgttttgcaattattcagcgaaaactgggaaaaacatgttgatgatttgagtaatcaaatcgtcaataaagttaacgaaactgtggaagacgtcaaaatatccgcagggacgcttttcaaaggatctgaaagaggcggtagaaccattttgcagcaaaatattgatctgtttagagaagcatacaaccacgaaaactag

SEQ ID NO: 1758 - DNA, 471 bp, Saccharomyces pastorianus
atgacacaattaaggtatttgatattggtttctagacaaggaaagattagattaaagaaatggtatactgcaatgtctgctagtgaaaaggccaagatagtaaaaaatctgacacctacgattctagcaaggaagcctaaaatgtgcaacatcatcgaatacagcgaccacaaagtggtatataagcgatacgccagtcttttcttcattgtgggagtgacgccggatgtcgacaacgaactgttgactttggaagtcatccatcgatttgtggaaacaatggacacttatttcggcaacgtttgcgaattggatataatcttcaatttcaataaagtctacgatattttgaatgagatggttatgtgcgatggatccatcgcagagagcaacaagaaagaggtgctgcaccatgtgactgtgatggacactatggagagcaacgataacctggaaagagtgctaagttag

SEQ ID NO: 1759 - DNA, 903 bp, Saccharomyces pastorianus
atgctttacttgattgggttgggtttatcgtacaaatcggatatcacagttcgtggcttggaagcgattaagaaatgttctagagtttatttggaacactacacaagtattttaatggctgctagtctagaagaactagaggagtactatggtaaagaggttatcttggctgatagagagttggtcgaaaccggctccaagcaaattctgagcgatgctgataaagaagatgttgcatttttggtcgtcggtgatccattcggtgccactacacacacagatttagtccttagagctaagcgtgaaggaatccctgtagaaattatccataatgcatctgtgatgaacgctgtaggtgcatgtggcttgcagctatacacttttggccaaactgtatctatggttttcttcactgagaattggagacctgactcatggtacgacaagatctgggaaaatagaaaaatcgggcttcacactttggtgttgttggatatcaaggtcaaagaacagagcattgagaatatggcccgtgggagattgatctacgagcccccaagatacatgtccatttctcaatgctgcgaacagttattagaaattgaggagaaaagaggaacaaaggcatatacttcagacactcctgtcgttgccatcagtagattgggttcaagctctcaaagcttcaagtctggcaccataagcgaattggcgaattacgattctggtgaaccattacactcgctggtcatcctgggtagacaatgccatgagttagagctggaatacttgctagaattcgccgatgatagagacaagttcgccaaagatgtgatgaaagaccaagagtatttcaagcctgcagcatgggttccacctacagaagtcaatgacgacgagtaa

SEQ ID NO: 1760 - DNA, 1446 bp, Saccharomyces pastorianus
atgtctaaggaggatttcgttattaagcctgaagctgcaggtgcttccactgatactagtgaatggccattacttttgaagaattttgataaattactagtcagaagtggtcactatacccctatcccagctggtagttcaccattaaagagagacttgaaatcttacatcagttccggtgtcatcaacttggacaaaccttccaacccatcatcccatgaagttgtcgcttggatcaaaagaatcttgcgttgtgaaaagactggtcactcaggtaccttagatccaaaggtcacaggttgtttgatcgtctgtgttgacagagccactagactggttaagtcccaacaaggtgccggtaaggagtatgtgtgtatcgttagattacacgaggctttgaaggatgaaaaggacttgggccgctctttggaaaacttaactggtgctctatttcaaagaccacctttgatctctgctgttaaaagacaattacgtgttcgtaccatttatgagtcaaatttgattgaatttgataacaagagaaacttaggtgtcttttgggcttcctgtgaagctggtacttatatgcgtaccttgtgtgttcatttaggtatgctattaggtgtcggtggtcacatgcaagaattgcgtcgtgttagatccggtgctctatccgaaaacgataacatggttactttacatgatgttatggatgcccaatgggtttacgataatacaagagatgaatcttacttgagatccattattcaacctttagaaactttattggttggctacaagagaatcgtagtaaaggattccgctgttaacgctgtatgttatggtgctaaattaatgattcctggtttattgcgttatgaagaaggtattgaactatatgacgaaatcgttttgatcaccaccaagggtgaagctattgccgttgcaattgctcaaatgtcaaccgttgacttagcttcttgtgaccatggtgttgttgccagtgtcaagagatgtattatggaaagagatttgtacccaagaagatgggggttgggtccagttgcacaaaagaagaagcaaatgaaggctgatggtaaattagacaaatacggtcgtgttaacgaaaacactccagaccaatggaaaaaggaatacgttccattagacaaggctgaacaatcatcctctgttactccagaagctaagaagactgaagaagaagctaagcctttgatcaaggaagttgaaactaaagaggaagaagtaaaggaagaggtaaaggaagagaagaaggaaaagaaggagaagaaggaaaagaaggagaagaaggaaaagaaggagaagaaggagaagaaagataagaaggagaagaaggagaagaagagaaaatctgaagaagacggtgaatccgaagaaaagaaatccaagaaatctaagaaatga

SEQ ID NO: 1761 - DNA, 1875 bp, Saccharomyces pastorianus
atggagctgccttcgatcaacagcaccacgagtatttccgacaatcaggagttgaggaactactacgataagttgctgttcaagaacaacagtggcaactcgctagcggatttgcccggaaagctgacagacttcaacgacaagagtgctgccgctgcccacccacgctcccgagtggacttcattaacgggtacatcggccccagggaggacaagcagtctctgttgggacagaaaaacaccaagagagcgtcctttagcgccttcacgggcgatgacgggaaacagcacgagaggatttctagcaggaatgggcccaacctgtcccttttctcgtttgagttcaacggctccccggcgcaggagacgaatacgtacaagcaggaccacttgaacgtggtaaacgcctcgcccaacaatttggtctctcccttaaacgataacgctcaaaagtactacccgcatcagcagacgcagcagctgcagctgcagcagcagagcattttcgacccgggaagaagatcctcctacattgccgatacattgattcatggtaacgccgccgccgttcagcaaccgcaatatacgcggcccctataccgccacaacaatccgtcattgcaagtgccatacactgctccctccgagtatgcgcagcgccaaccgtattcatcatctttcaatgctcggcgcaacacccagcctgtggtcaatatgcatccgccaccagccaactccaatgacaccgggctgacggtcgttgatggtaagaacttgacgtcgtcgagggaactgcatgacttgtatcttgattgcgggtccaattattttgccagtgaaaaagtctacggattcatcgacgccatcaaggaaaccttgcagagcaatggtgcctccgccgccgattccagaattatagagtttttgaattttttgaaaaattgtaatttaaactacaaccctcagtcggatgcgttcacctccaacgacgcttccaacaattcgtctggggccaaggccagcaacagcacttcaatgcatttacactataaacctttagtgctggtttcattgaaaaacgggaagctcgaactactttccaaaccacaaaccgccacgcttgtcctgaaaagaggcgacttggtcattattgatggagaccgtggtaaagatctggttctagtggtggaaccggtcgtggatgttaacttggctctattcgtcaatttcttgaagaaaaaaatacatttcgattcccttatcacgagcaactcgcaacacttccctaacgaccaattcgtaaagaccctgatcgacacgaccaatggtaaacctgttcctcgcgaactggacccgaaactgtacgacatcatcgaactaacacagttgatcatcccatcaaaacaggttttgagatttgcgaccccgtgggaatcctccacaaatttgcacaacaagttccaagatgagttgaaggcgctccacattgctcagttgaaactgagatcgctgaacaataacaactcaagcggcggattgaatatcaaaatcttaaacgcggagttccaattcgataggaaaaaattaacgttttattatatttgccaggagcggaatgatttcagagacctgatcaaagaattgttcaaattttacaagacaagaatttggctttgtgctataccgaacaacttgtctattgattccaagttttacgactctaacaagttcgagtgggagatgtatcaggatatgatgtcccactactccatggacaacgcggggattgtcgtggcgcctgaattgaaccgcttgaaactagacgatttccaaattggcgtctacatggagttggtaaaggctttgtttggctga

SEQ ID NO: 1762 - DNA, 660 bp, Saccharomyces pastorianus
atgaaccaggcaatcgatttcaccaaagtcagcatcgactctttcaagaagcacggcattctggaagacgtcatccacgacacaagtttcctgccttcagggatactggccatcgagtacacgtctaatgccccagtggccatgggcaatacgctgtctaccgacaagacgcagtcgaagccccaatttcagttcactttcaacaagcagatgcaaaaaaacacgccacaggcggacgtgtacgtcccccaagatgacgacttgttcactatggtaatgaccgacccggacgctccttccaaaacagatcacaaatggtccgagttttgccacctggtcgaaagcgacctgaagctgcagaacaagtccactcacgaaacttccggggccacggatttctttgcatccgaattcaactccgcaggctcgaggaccctgatagaatacatgggtcctgccccacccaagggctcgggcccacacaggtacgttttcctcttgtttaagcagcccaagggcgtggactcgtccaagttctccaagatcaaggatagacccaactgggggtacggcacctctgccactggggtctacaaatgggctcaggaaaacaatttgaagcttgtcgcctccaatttcttctatgccgaaactaagtag

SEQ ID NO: 1763 - DNA, 606 bp, Saccharomyces pastorianus
atgtctagtgccattattgccaagttggacaaagaggacgtcgccaaggacgtcgtcaaggacctggagttcaagctgctaggagagctgtctgtttcgtacgccgctacaaacgatgtccaattgggcaacgccatggcgatggaggccacgcagagcgcccctaccgtcactttcacgcccttcgacagaggtcaattggccgtcggcgataagctggcgctgctgatgaccgacccggatgcgccctctaggacggaccacaagtggtccgaggtctgccactacattgccacggacatccccgtcgagtacgggtccggaggcgagattgccatctctggcaagggtatcgtgagaagcaactacatcgggcccggcccacccaagaactccggataccaccggtacgtgttcttgttgtgcaagcagcccgagggcgtggattctgccaccttcaccaaggtcgacaacatcgtctcgtgggggtacggcactcccggtgcgggcgcgtacgactacatcaagcagagcaatctgcacttgatcggcgccaactacttcatggttgagaacacgaccgtcgacttcaactacgacatgtga

SEQ ID NO: 1764 - DNA, 1149 bp, Saccharomyces pastorianus
atggccggtacatttttattcacttctgaatccgtcggtgaaggtcacccagacaagatctgtgaccaagtctccgacgccatcttggacgcttgtttggccgaggaccctcactccagagttgcgtgtgaaaccgctgctaagaccggtatgatcatggtcttcggtgaaatcaccaccaaggcacaactggactaccagaagatcgtcagagacaccatccaaaagatcggttacgacgactccgccaaggggttcgactacaagacctgtaacgttcttgtcgccatcgaacagcagtctccggacattgcccaaggtgtgcacgaagagaaggacctggaagacatcggtgccggtgaccaaggtatcatgtttggctacgccaccgatgagaccccagaaggtctacccttgaccattctgttggcccacaagctgaacatggtcatggccgacgctagaagagacggctccttgccatggttgagaccagacaccaagacgcaagtcaccgtcgagtacaaggacgaccacggcagatgggtcccacaaagaatcgacaccgtcgtcgtttccgcccaacacgccgacgacatctccaccgaggacctaagagcccaattgaagtccgaggtcatcgaaaaagtcatcccaagcgacatgttggacgaaaacaccaagtacttcatccaaccctccggtagattcgttatcggtggtcctcagggtgatgctggtttgaccggtagaaaaatcatcgtcgatgcctacggtggtgcctcctccgtcggtggtggtgccttttctggtaaggactactccaaggtcgaccgttccgccgcttacgctgctagatgggtcgccaagtctctgcttgccgccggtctgtgtaagagagttcaagtccaattctcctacgccatcggtattgccgagccattgtccttgcacgtcgacacctacggtactgctaccaagtccgacgaggaaatcatcgccatcatcaagaagaacttcgacttgagacctggtgtattggtcaaggaattggacttggccagaccaatctacttgccaaccgcttcttacggtcatttcaccaaccaagaatacccatgggaaaagccaaagaccttgaaattttaa

SEQ ID NO: 1765 - DNA, 1494 bp, Saccharomyces pastorianus
atgagttctcaatttcctttatcgtcaccatataggacagcggattcacatgtaaagaatccatattttccatcttctggtttcaaccagcacactaaactaccatcgccaagtcatgtgcaaactggtaaagctgtaccaaaaatcattgggaatttctccaaagttgattatccaactccatttccttcttctagtataggaagaacttcatcccctgttaggtcaattgatgttgatgctattccttcttctccagccttccgtgcgccgatggaagaggcatcgcccagattatctcccaggctttcttctcctttaagacacgttaaagtcatcaatgctgaattagatcctactaaggccagcaccattactgttgggcgtaatagttcgcagtgtgacgttgcgctttgtaagaacaaatttatatcaaggattcacgccgatatttcttaccttcctcaagccaatgaactgaagattcattgtgtcagtatgaatggtttaattgtgatatatcgtaagaaattcgattgttatctcttaagggacactgaagtatcaaataacaatgagaacgtttatagacttacacccaggttctcaatcgaagagagcgtaaaggaaattcaagacgaagacaaatctgttagttttacgctggaaggtggtgacaccgtttacatgccatataacaaaggcatcatgttagattttagacaggttttgcttcgtgtttcactgaagaagatgtggtcttgtccagagtcgacaggattagaaaagcaagctgaaaacgaaaatgagaggaaacatatgggaggtataaggaagcatccattaatattttctaaagccccatccgagtcccccaagaaaatactaaagaataacaccaacaaacatacagccggtgatgattctggtgtcgctgaaagaatgttaaatcattttttgaactcaaaatcatcttcgatttcctctgtctcttctgctgaaaacaatgagcaagtttttaaacaggattcattaccatatgaaaaaatccctgtggttataaaaaagcaaaagctaaataagagcgttttatcttcaaaaccgaaaaaatcagtaaaagagactttggatgagttatccgggagaaacgtggatgttatgaatttacaacatattttgacaaatcacctggcttttgcgaacgttcaacaaacaccattattccaattacaacaggttaactcgcaaatttctgaattgtcaagagacgaattgcgtacgatcttgagcgacgcgaaatgcgttggtgtcatttatcgtcacggtaaagatgccgctggtaaaccattagacgaagaatatttctatgatttggaaaatgacgatgactacgaaagaagaaacttggtgagttcgttgaaaggcggaagaactggtttaagatcttgtagaaggacgcataaacagtatttttggaaaaaaccagctaaataa

SEQ ID NO: 1766 - DNA, 759 bp, Saccharomyces pastorianus
atggttgaagattccagagttagagatgctcttaaaagcggtgaacaaagggctttaccggcttctttagttccacaaacacctgccgtcttgacatcaaaggacaagatttccaaaagaatgatcgtggtgttagctatggcctctctcgagacacacaaaatatcttctaatgggcctggtggtgacaaatatgttctgttgaattgtgacgaccaccaaggcctgttgaaaaaaatgggtagagacattagtgaagcaagacctgatattacccaccaatgtcttttaactttactggattctccaatcaacaaagctgggaaattgcaagtctacatccagacaagccgaggcattctcgttgaagttaaccctaccgttcgtataccaagaactttcaaaagattttcaggtttaatggtccaattactacataaactatctattagatccgtaaattctgaagaaaaattactaaaagtcatcaaaaaccctattaccgaccatttaccttccaaatgccgtaaagtaacgttatcctttgacgcccccgtcattcgtgtccaagattacattgaaaaactagacgacgatgaaagtatatgtgtctttgtcggtgcaatggcaagaggtaaagacaatttcgcagatgaatacgtcgacgaaaaagtcggtctgtccaactacccattgtccgcttcagttgcatgttctaagttttgtcacggtgcagaagatgcttggaatattttatag

SEQ ID NO: 1767 - DNA, 3573 bp, Saccharomyces pastorianus
atgcctatcactcaaattatatctgcttctgacggcgaagcgggttcaaagccaaccatctcgctcgtacttgataacttatctaaactggaaaaactatctcccaggcatcaccgtctttcaaagtcgctttcaaagatcaagcgttggaggaacaggtcgaatagtggttcatcgatggattccagtgaggaacaagataagctcggtgaggcttataacgataacgataatgcagacgatttggccaaatcgaagtatatgatgaaaagcattgcaggcctattgacgactgcgagtgtgtatgcgggcatgaatactgctcaagaggtgagcgctttggcgcaggatgactttcaagaattagggtccagtggattgagtcaggcaaatttaggtaaaaatgaagtaaaaagcaaaaaggaaaacagtaaaagaaaatccggaccagacgtgccaagagtagacaagagaaaccccacactatttgatttttcagtaactaggggaaaaatatcgaaggacagtatttccaaactaagacaacgttttcacttagacgaacaagaaccgtttttaaatgatttccctgcatggctacttaaggatgtgcttgttcaaggtcatattttcattacgatgaaacatttcctattctttgcatatttacccaagaacccccgctctgttaaaatgtctgggaacttgaacattagaacaaaactgatcagatcaactagatactggtgtgtgttgaaaaatcatttgttttcaatgtatacctcatcgacggaactatacttccccattttaactatagatttaagggaaacccagaaaattgaaatagaaaaacactccttaaacgggaatacgacaaaaaccttcaagctatcaaccaacgaaagcacattcaaattcaatgcagactcagaattctctgctaaatcttgggtgaatgctttgaaaaaagagcaatttgcagctcagaattcagaagacaattcgataagtttaaaaattccactacccaatattatagaaatagatgatcagcctattgtcaataaagctttgacattgagattgagagcattggaaagctcacagacttacgctattgatgacttcatgtttgtttttatggatgggtctggcagtcaagtcgaggacagtctttgccaacagttagctctattgcagaagtctggtgtaagtacactttataatgacacttcggccaaaaatgtaaaatcaggtaatcagaaaggggatttaatgacaactgagcaagaaaatgatgataacaagaattcaaaatatctcaatctcctaagttcaaccgtgccctcttctgaaaatggtaaaaagagcaagtctagatttagagaaagaagtaatagctggtttcgtagggctaaacctctcgaagactcgcaagtcgaagacgtggaggaaatttacaaggacatagctgatgatatagactcttctgtttattctacaattcaggtgcccgatcaaggagacaatcaagatcaaactgtagactggaaaccaagccacctcagaaattttgctgatatgtgggcagctaaaccaatacactaccagaacaaataccttgagtttggaaaagatgatacttatttagtaaaggaaactgaggaactgtctgctaacgaacggttcagatatcattttaaatttaacaaggaaaaatcattgatcagcacttattacacatacttgaatagaaatgtccccgtttatggtaagatttatgtatccagtgatactgtatgtttcagatccttgttaccaggctctagtacgcacatggttttaccattgtccgacgtggagacatgctataaagaaaaaggtttccgatttgggtatttcgtattggtagtagtaatccatggtcatgaggaattattctttgaattcagcacggaagtcgccagagatgatattgaacgcatacttttgaagcttttggatgctgtatatgcgggtagtggagagggatcgaatgcatcaactacttctatcggcgatgtgcaacataacactgattcggcaaagctgaaattatttgaagacaaaatcaatgcagaggggtttgaggtaccattaatgattgatgaaaatccgtactacaagacaagtataacaccgaacaaaagttataagtttgggttattgaccattggttcaagaggtgacgtccagccgtatatagctctcgcaaagggtttaattaaagaaggacaccaagtggtaatcatttctcattctgaatttcgaggctttgttgaaagccatgaactgcaatttgaagagattgccggcaatccagtagaattaatgtccttaatggttgagaatgaatctatgaacgttaaaatgctgagagaagcatcgagcaaatttaggggatggatcgatagtcttttacagacatcttgggaggtttgtaatagaaggaaatttgatattttgatcgagtcgccatcagctatggttggtatccacattactgaagccttacaaattccttacttccgggcattcaccatgccatggacaaggacaagagcatatccacatgcgtttattgtaccggatcaaaaaagaggtggtaattacaattatttaacacatgttctgtttgaaaatgttttttggaagggaattagtggacaggtaaataaatggagagtagaaactctcgggttggggaagacaaatctttttcttttacaacagaataatgttcctttcttgtataacgtatctccaaccatctttccaccatctattgattttagtgagtgggtgagagttactggatattggtttcttgatgataagaatacgtttaaaccacaaccagaattagaaaatttcatttcagaagcaaggtcagaaggaaaaaaactagtttacatcgggtttggctcgattgttgtatctaatgccaaggaaatgacacaagctcttgtcgacgcagttgtagaggccgatgtttactgtattctaaataaaggatggtcagaaagattggatgacgttgcggcaaaaaaaatagaggtaggtcttccaaaaaatatcctaaatgtagaaagcatacctcatgattggttattcccacaggttgacgctgcagttcatcatggtggctcgggcaccacaggcgcttcattgcgtgctggtttacccactataataaaaccgttttttggtgatcagtttttttatgctggcaggatagaagatataggggttggtattgctttaaagaagctaaacagtcaatcattagcagaggctctaaaggttgttacgactaacaaaacaatgaaagatagagcggagttaataaagaagaaaatctccaaagaagacggtattaagactgcaataagcgcaatttataacgaacttgaatatgcgagaagcgttaccttatcaaaagtaaagaaccctcgcaaagatgaagatatagtggatccaaccaaactgccctcagctgaaacaacggatgaagcctggacaatgatttaa

SEQ ID NO: 1768 - DNA, 1485 bp, Saccharomyces pastorianus
atgaattctccaacaatgaagtcagaacagctcactccaaaactttcacctatgtccttttgcttagatgatcaaagaaacgcaaacactttccaaaatatattaaactcacccacgaagcttaaattggacaccgggtcgcttggtaactcattactgtatccaacctcactctccaaattaagcgagttatcgagaaatggccgttccaaacaaagaaggggttccgacactatgaggtcggtatcccctatcaggttccaattttttaacaacactccaaagatgctaaaaccggagtatttatctcaaaaaagtagtggtcttccattgttatcagcccttctgaaaaatagcaaacagacctctaaatcgaactccaatgaggatcagagcgtaaatcctgatccgctaaatatagaacaaaatattgttaagcagagtatcaaggataaactagagcagttgcgccgacaaggttcagagcaagtcgcacaaattcaaaagaaagaacaacaaacaacgttgcccgaaatcaaggactatgtagaagaaccaactgtacagaatgtatccgaaaattctgtttgtttaaacaccattgctcctgaatctcctttggaggaagcgttggaccatgtggtaccagaagttgaagataaagaaaatagatttgtctcaatcagatccactcagtgcttgcagactgaaataagtgacttacccaaggatttgaatttagatagcttgcctacagataaaaacgggttcgttcaatatggttccaaatgcaacaataataacagatatagtttcatctcttccacgtcaacagattatgaaccagagtggtacgatggccagcaacatatctcaatgcacattccatcgatgatcaatacggacgaggcaaccagtcaagacaaatccaatttggacataaagattaaacagttggaacttgagattacagagttgaaattacaaaatgaaaagctagttcattccatgacgacgaatagatacattgaagaaagattcatgcttgaggttatgaaagaccccagcgtacaagcacaaaaatctcaaagagatattgaaagaaaagtcaaacagttggagaaaaaatttttcaactgtaagaaagtcctcagtaaattgactgagtctcccacagtagtggctacctccacttcaaaaactgatgggacctcaacaaggatcccgtgtccaaagacaagactagcaagagtttctgttttagacctgaaaaaaatcgaagaacaaccagactcgtcgtcgggaatctcatccgaggaagaacattctgcgaatgacgaaacaaacatcaacgaagaggtggataccgttatgttcgaagaattaacgtctgcaccttcatcaacaacctctatgcagagcagagaaagtagaagaggatttcaactcaatctgcctgttcaagtcgatagcaagacaaaatag

SEQ ID NO: 1769 - DNA, 798 bp, Saccharomyces pastorianus
atgtcttgggacgacgaagctatcaacggttctatgggtaacgatgacaccgttctaatggactcatgggatgctggactaggagacgatgaacctgttatgcaatcttgggatgctgtagaggaagaaaagcaaccggctccaaagccaaagaaagcgcaaccaaataaagctaagaaaggcaaagaatcctccgtcgataaagtcctattggacatagacaccctagacgaaaagacccgtaaagagttgattaagaaggctgaaatagaatccgatttgaataacgctgctgacttgtttgctggtttaggcgtcgctgaagaacacccaagggcccgtgctttacaaaaggaacaagaggaaatagctctaagaagaccagcttttaccagggatacacctattgaaacgcatccactgtttaccgctgaaacaaagaaggagtatcaagatttaagaaaggccttatctaccgctattgctcccatgaacaacaaatctccactaaactattcttcatcattagccatcgatttgattagagatatagcaaagccaatggccattgagtctataagacagacagtagctactttgaacgtcttgatcaaagaaaaagaaagagaagagagacaagctcgtttggcccgtgtcagaggcggtaccgctactggtggtgcaggtaagaaaaaggccaaaggtaagaccaacttgggtggtgcattcaagaaagatcaagatttcgatatgggtgccaccgatgatttcgatttcgctgatgacgacttcatgtaa

SEQ ID NO: 1770 - DNA, 528 bp, Saccharomyces pastorianus
atggttcttttacacagaagtacgcacatattccctactgactttgcctctgtttcacgcgccttttttaataggtaccccaatccatactctcctcacgtgctctcaatagacacgatatcaaggaaaatagaccaggacgggaatttgcgcacgacgaggctgctaaagaagtcgggcaagctaccaacctgggccaagcccttcttgagaggcatatcagagtcgtggataatcgaggtttccgtagtggatcccgctaactccaccatgaagacgtatacccgaaacctggaccatacaggaattatgaaggtggaagagtacacgacctaccagttcgacagtgctacaagcagcacaatagcagacagccaggtgaaattttctagcggtttcaatatgggcataaaatttaaagtggaggattggtcgcgcaccaaattcgatgaaaacgtgaagaaaagcagaatgggcatggcttttgtcatccagagacttgaagaggcaagaaatgctcgattctag

SEQ ID NO: 1771 - DNA, 1368 bp, Saccharomyces pastorianus
atgtcagaagaagataaatccaaaaaactagagaatttgttaaagttattacaattaaacaatggagacacttccaaatttactcaagagcagaaaaaggctatgaaagaccataagttctggaggacccagccggtcaaagacttcgacgaaaaagtggaggaagagggtcctattgatgaagcaaagacaccggaagacatttctgataagccgttgcctttattatctagctttgaatggtgtcatattgatgtagacaacaagaaggaactggaagatgtttttgttctactaaatgaaaactacgtcgaagatcgcgatgcaggtttcagattcaactacaccaaagagtttttcaactgggcattgaagagccctggctggaaaaaggaatggcacatcggtgttcgtgtcagagaaacacagaagttggttgccttcatttcagccatcccagtgactctgggcgtcagaggtaaagaagtacctagtgtagaaattaatttcttgtgcgtccacaagcaactaaggtctaagagattgacccctgttctaatcaaagaaataaccaggcgggttaacaaatgcaacatctggcatgcattgtatacagcaggtatcgtattaccagcacccgtgagtacttgtcgttacactcatcgtcctctaaactggaaaaaactttatgaagtagatttcacaggtttaccagatggacatacagaggaagatatgattgccgaaaacgcattgccaagcaagacaaaaaccgccgggttgagaaagttaaaggaggaagacattgagcaagtctttgacctgttcaacagataccaatcgagattcgacttgatccaaattttcactaaggaagaattcaaacattatttcattggtgaagcatcgttgcctttggagaaacaagtggtcttttcgtacgtggttgagcagccggatggaaaaattacagatttcttttcgttctactcattgccattcacgatcctaaataacaagagttataaggacctgggtattgggtacttgtattattatgctactgatgcggatttccaattcaaagacaggttcgatccaaaagctacgaaggcgttgaaaaaaaggttgggcgaattgatttatgacgcatgcatcttggccaagaacgccaacatggatgttttcaacgccttgacttcgcaagataatccacttttcctggatgatttgaaattcgggcctggtgacgggttcttaaacttctacctgttcaactacagagcaaacccgataaccggcggtttaaatcgtgataacacgaatgacgttgacaagcgtagtaatatcggtgttgttatgctttga

SEQ ID NO: 1772 - DNA, 1755 bp, Saccharomyces pastorianus
atgatctctgctacaaattgggtcccaagagggttttcttcggaatttcctgaaaaatatgttttagatgatgaagaaatggaaagaatcaaccagttagcacaattgaacttggacgatgccaaggccgacttggaagaagccgggggtgaagtcgaagttgaagatgatgttgaagctgaggctgaagctgaagctgcccctgctggttctgagaacttgaaagatcagctagagatggacgatgatttgaaagagtataatctagaggaatatgacaacaaagagactatcggcaacgagaacggtgaagacatatccatgtttccaggtctaagcaatgacggagatgttaagttccatgaaggggaagaaggtgaagatccatatatttcattgcctaatcaagaggacacccaagaggagaagcaagagttgcaagtctacccatctgataacttggttcttgctacaagaacagaagatgacgtctcgtacttggacgtttacgtttacgacgacggtgccgggttccatagtgatgatattccggttgaaaaaggtgacgaggttgatccggatgttgcccgtgggttagttcgtgatggtgcgttatatgttcaccatgacttaatgctgcctgcgttcccattatgcgtggagtggcttgattacaaagtcggttctaactctgaagaagctgctaattacgccgctatcggtacatttgatccacaaatcgaaatttggaacttggactgtgtcgacaaggccttcccggatatgattttgggtgagccacttgacaattcaatggcttctttgcagagcaaaaagaagaagaagaagtctaagaaccaacacatcaagacccatcatactgatgctgttttgtctatggcacacaacagacacttccgttctgtattagcatccacctccgcagatcataccgtgaaactatgggatttgaattcaggtagcgcagcccgttcgttggattccatccattctaacaagaacgtttcttcatctgaatggcacatgttgaacgggtccgttcttttgaccggtggttacgattctcgtgtggctttaactgatgtaagaatttccgacgagagccaaatgagtaaacactggtccgtcatgtcaggcgaagaaatcgaaaccgttacatttgctgatgaaaatataatattatgtggtactgattctggtaacgtatactcctttgatatcagaaacaatgaaagtcgtaagccagtttggacattaaaggcacatgatgccggtatctccactatatgttcaaataaattcattcctggtatgatgagtactggggccatgggtgaaaaaactgttaaattatggaagttccccttggatgaaactacaaacggcaaaggtccaagtatggttttgtcccgtgactttgatgtcggtaatgtcttgagttcatcatttgcgccagatatcgaaatagcaggcagcatggttatcggtggtgtcaacaagggtttgaaactatgggacgttttcaccaacagatccgtacgtaaaagcttcaatagtgaactacacgacgtgcaaacaagagccagggaagaagccaagcaactgggcaagagttcgagaatcgcaagaaaatacaccaacaatgataatccagacactgttatgaccattgacgatcaaggtgaagacgaagaagaaagagaaggtgaagacgagcatgatgacatggcataa

SEQ ID NO: 1773 - DNA, 1509 bp, Saccharomyces pastorianus
atggctcctattgaatatttactgtttgaagaacctactgggtatgcagtcttcaaagtgaagttgcaacaagacgacattggttcaagattaaaggaagttcaagaacaaatcaatgactttggtgctttcaccaagttgatcgaacttgcctcctttgctccgttcaaaggtgctgctgaagctcttgaaaatgccaatgatatatcagaaggtctagtctctgaaagtttgaaagctatcttggatttgaacttaccaaaggcttcttctaagaagaaaaacatcactttggctatttccgataagaacttaggtccttctatcaaggaacaattcccatacgttgattgtatctctaatgatcttgcccaagatttgattcgtggtgttagattgcatggtgaaaagctattcaaaggtttacaatccggtgatttggaaagggcccaattaggtttgggtcacgcttactccagagctaaagtgaagttttctgttcaaaagaacgataaccatattatccaagccattgctttattagatcaattagacaaagacgtcaacacttttgctatgagagttaaggaatggtatggatggcatttccctgaattggccaaactagtaccagacaactatagttttgccaagttggtccttttcatcaaggacaaggcttcattaaacgaagattccttgcatgatttggctgctctattgaatgacgattcaggtattgcacaaagagtcattgacaatgctcgtatttccatgggtcaagatttatctgaaactgatatggaaaacgtttgtattttcgctcaaagagttgcttccttagctgattacagaagacaattatacgattacttatgtgaaaagatgcacactgtcgctccaaacttatctgaattgattggtgaagtcattggtgctagattaatttctcacgctggttctctaaccaatttatctaaacaagctgcttcaacagttcaaattcttggtgccgaaaaggctctgttcagagctttaaagactaagggtaatactccaaaatacggtttgatttaccacagtggtttcatttctaaggcctctgctaaaaataagggtcgtatctctagatacttggccaacaaatgttctatggcttccagaattgacaactattccgatgaaccatctaacgttttcggttccgtacttaagaagcaagttgaacaaaggttagagttttacaacaccggtaaaccaactttgaagaacgaattagccatccaagaagctatggaactttacaataaagataaaccagctgaaaaggaagaggaaactaaagaaaaagactcctcaaagaagagaaaattggaagacgatcatgaagaagaaaagaaggaaaagaaggaaaagaaaccaaagaaggaaaagaaagacaagaaagagaaaaaggagaagaaagagaaaaaggaaaagaaagataagaagaagaaaagcaaggattga

SEQ ID NO: 1774 - DNA, 666 bp, Saccharomyces pastorianus
atgaatccgttattccctaaaaatctacttaaattaatctctattggcgaaattaagacttcattaatggtaaaggaatcaaatcctgttcaatctacagatacccactcatggaattatgatgaaaattttcccaatgaaatcgaccccgactcaagaacagccacatcaaatgaagaaacactctacaatttctcttttcccatttattcctttggaaagacattattattctccatcgaagagaattttataaatatatcaccgatttttggtaatatgataagtagatctattgtttcacaattggctaaaacctcccctgacataataattattggtacttctgatagaatctctaacatgaaaataatgacggaagacgaatgtacactccaaccaccagaattcgtaacaggatttataggaagtgccctcacacaattgataaccggccctaataagggaataaagttcaaatgtcttgtcgtgcctagcgaaggtcctaacggtttcgaaaaattctcattgtccgatatgggctcgttgattgatgtctgtagtcaatggttcggacttgatcattcaaagtattccgaagagtgccatcgtctttggagatgtgatagtgcagcctttggtgcccaatcaggcctatacatatga

SEQ ID NO: 1775 - DNA, 345 bp, Saccharomyces pastorianus
atgtcagagctgggtacgaaatatcaacatttgcagagtgaattagaagagtttattgtagcaagacaaaaattagaaacacagctacaagaaaacaagattgtaaatgaagaatttgaccaattgaaagaagacacacccgtgtataagctaaccggcaacgttcttttaccggtggaacaaagtgaagcacgtggcaatgtggagaagagactagaattcattgaaacagagattaaaagatgcgaaaagaacataaggggcaaacaagaagaattggaacaggtaagaaacgaactggtcaaactaaataatgccgcaactgccgctggcccagacaggtaa

SEQ ID NO: 1776 - DNA, 1311 bp, Saccharomyces pastorianus
atgaccgcgctatacgctccctcgggtgctgcccagctgtattcccatctgctaaggagatcgccacagaacagactcgtggtatcacaccagacacgccgtcacctcatgggctttgtcagaaacgccctggggttggaccctccaccctctccagacgatccgaccccggagaaccggtttcatccatgggatcagtcgccctcggtggacttgcgtgagagggccgctaagatcagaacccttgcacactgtcctgtcaccggcaaagacatcaactacacttgccctctctcagggatccccacacaccattcgcgggaggcgtgggagatggataaggcatatcacgattccaaaaaatatgaaattttgaaaaaagttaacatttacgagcacgacttgagaagcggtaggcctttccctgagtttgatttccctcagcatcagggctatgacaaggccgtcaacctcaccaactgggacttgttcctttacacaaggtccttctattccatggatacagagttccaattggctgcggtcaccaagatgctgagttacccaatcactatcgggtcgctgttacacaaattctccccatattcgctaaaccccaaggggcccatcactttagaaggcttgaagtctttggccgctctcaggtacactttatacccgctggaaaatagatctgtactggctactacgaggaatcgtgccatgagaattttcattctgggtgcccgtgctgaagctcagttgccgggccacgtttggaaacaactccagtttctcttcccagaacaaaatttcgaaatccacttcatcgggcctgaatgtctatacaagagagataaacaggaatatgtcaaatccgccacaccggtagtgcaaagaatagatgaaactttgaagttcattcaccacaccgatttcttccaagttttccacgaagctcaagattttttcccctatgatccatacatggatgtcttttttacgttccatcctggttacgcatccccagagtctcacggttcgtggatgggcgaaacaatgaaggccctactagaaactaagtgcgccatctttactaccggtttcaacaagaaagatttaatggacgacataagcctggtcaagtccaaatacggcaaagaaatggatatcctgatggacccagtcaagaacgtgtttggaagtaccaagtgggaactgaacgacatggaccctcaagaagtttaccaattcaacatgtacattgccggtttcagaggtaaaaggtaccatacaatcaagagacaatga

SEQ ID NO: 1777 - DNA, 2499 bp, Saccharomyces pastorianus
atgatcacgctcttatcctacttgtgcgcgatatgccacgcagtgctgttaataagggctgattcgatagcggatccttggcctgaagcgcaaaagttactatcaagcataccgaagtccagagaccccatgaaagaagctgccatggaatccaacatcgatgaatttgttgggttttacgtaccgatggattattctccacgtaatgaggaaaaaaactatcaatacgtttggcaaaatgaaattacagatcttcaacatcaaatctacggtttgctagtgcagtctagtgaacaattcaacaactcagaagcaacatacactcttagccaaattcatctttggaaccaatatgatttcccccacaatatgacattggcacacaaatacttggaaaaattcaatggcctgactcacttcaccaatcattcagccattttcgacttagctgtaatgtattccactggtggtattgctggcagtaataatctaagcacgattcctcaggactctgctaaggccttgttgtattaccaaagagctgccgagttaggaaatttgaaagctaaacaggtgttggcatataaatattattcgggattcaacgttcccagaaatttcaataaagctctgatattatatagagacattgcggaatatttaaggggaatgtattcgagggatgaatgggatattgtatttccctcttgggagagctataacgtgagaatatctgatttcgaaaacggattattgggaagaggtttaaattctgttccgttctctacagtgaggaaaagagctacgtcggatattggctcaccctttatcgcccaagttaatggtgcacaaatgactttccaattcgaaacaatgggcaggttcactctcagcggccacgagggtcatattgatgacgacgaagacgacgaagacgccaatgaaagaagaataatcaggatatataacgcagcttggaatgattatagagggacctattcgcaaagtaggaactgtgagcgcgctaaaaatttgctggaattaacctacaaggagttcgaaccccatgtagacaatcttggtcatttgcaagttttatattacgtgagttgcttgcaattattgggacacatgtatttcaccggtgaaggttcctcgaagcctaatatccctatggctgaagagattctgaccaagacgctaaaaataagcgaaagtattagcgcgtctatgggtagagcaaatatagatttaggcttaatcaaccaatacattaccgggaatgtttccaaggcagtttcttattacacgcgtgctattgaaactaacactaacaatgggattgtggaatttcagttatccaaaatagccactttattccctgaaaaaaaaattggtgatccgttcaatttaatggagactgcgtactcgaagggtttcattccagctatatatgagtttgcagtgatgaccgaatctggaacaaaccgcaaatatagtgtagagaataccgcttacctgttcaaaacattcgttgacgaaaacgaacctattatggcaccggagttaaggacagcgttcgctgaattgatcaacgaccgttcagaagtggctttgtgggcgtactcccaattggcagaacaaggttatgaaaccgctcaaatatctgcagcctacctaatgtaccaactgccatacgaattagaggacccgccaaggactacagaaccaagaaagaccttggcaatatcctactatacgagggctttcaggcagggaaacatagacgctggtgttgttgcaggagacatttatttcgaaatgcaaaattatagtaaagccatagcactgtatcagggtgccgctttaaagtattccatacaagccatttggaacctgggctatatgcacgagcacgggctaggtgtgaatagggatttccatctggctaagcgctattacgatcaggtgttggaacacgaccataaattctatttggcttccaaattatgtgtgctcaaattacatttaaagtcgtggttgacttggcttacgagagaaaaagtgaactactgggcacccactatccctcccaacacgagcgaagatacccagcctccaaagacttcgtggtacaagcagttgacgaacattttacaaaggataagacacaaagaggatgacacaagagctacagaagaatctcacaagcatagaaccgtcgtacaaaatggcgccacccacagggaccagaatgtacaggaaacttctgagatcctgggattccaagtagaagacctcatcaccatggggtgcatcttggggatattcctcctaagcattctaatgagcacattggcggctcggaggggttggaacgtccgtttcaacggcgcccagctaaacgcaaatgggaacccacagcagcagcagcaacagcagcaacaagcacaggggcctcctggttgggacttcaacgtacagatatttgccatatga

SEQ ID NO: 1778 - DNA, 894 bp, Saccharomyces pastorianus
atggtcgtcatagctaatgcgcacaacgaactaatccatgatgctgttctagactactatgggaagcgcctcgctacatgctcttctgacaagacaattaagatttttgaggtcgaaggggaaacacacaagctggtagacacattgactgggcacgaaggccctgtttggcgtgttgattgggcgcatcccaaattcggtaccattttagcttcatgctcttatgatggtaaggtattgatttggaaagaagaaaacggtagatggtcccaaattgccgttcacgccgtgcattccgcttccgtcaattccgttcaatgggctcctcatgagtatggccccctgttagtagtcgcttcttccgatggtaaagtctctgtagtggaattcaaggaaaacggtaccacttctccaataatcatcgatgctcacgcgatcggtgtcaactccgcttcttgggccccagctacagtcgaagaagatggcgaacatggtggtgccaaggaatcccgcaagtttgtgactgggggcgccgacaatttggtaaaggtttggaagtacaactcagacgcacaaacttacgtcctagaaagtactttggaaggtcacagtgattgggtgagagacgtggcttggtcgccaaccggcctcctacgttcatacttggctagtgtctcacaagaccgcacctgtatcatctggactcaagataatgagcaaggcccatggaaaaaaactttattaaaagaagaaaaatttccagatgttttgtggagggccagttggtctttgtccggtaacatactagccctttctgggggtgataataaagttaccttatggaaggaaaatttggaaggtaaatgggaacctgctggtgaagtccatcaataa

SEQ ID NO: 1779 - DNA, 936 bp, Saccharomyces pastorianus
atgacggatgttttggacacaaatcaacagtgtgaagcgattacaaaggccgctacttatctttcgggtattttggaaccacatttccaaagtactccaaactttaaacctccaagaactttgatcatatgtggttctgggttaggtgggatatccaccaaattatccatagataatcctcccccagtgacaattccatacgaggatataccaggatttaagaaaagtacggtcccaggtcattctggtacactaatgtttggatctatgaatggctcgccagtagtgctaatgaatggacgtcttcacggatatgaaggcaatacactgctcgagactacgtttccaataagagtggttaaccacatgggccacgtccataacttaattgtcaccaatgctgctggtggtataaatgcgaaataccaagcttgtgatttaatgtgcattaacgaccatttgaatattcctggcttggctgggcaacacccattgagaggtcctaacttggacgaagtcggacctcgtttcttggctttaagcgatgcatatgatctaggattgaggaaacttttattcaagaaatggaaagaattaaagatccaaagaccgctacacgaaggtacttataccttcgtctctggtcctacatttgaaacaagggctgagtctagaatgatcagaatgcttggaggtgatgctgtcggaatgagtactgttcccgaggtcatagtggcaagacactgcggctggaaggttttggccttaagtttgattactaacacttgtgtcgtggatagtcctgccagtgcattggatgaatctcctgtgcctttagaagaaggtaaagcgacacatgctgaagtgctggagaatggtaaaatcgcctctaatgacgtgcagaatttgattgctgccgtgatggaggaactataa

SEQ ID NO: 1780 - DNA, 2067 bp, Saccharomyces pastorianus
atgatccggacccgtgtgttattctgtctacttatatcttttgttgctacagttcaatcgagtgctataattgtaagctcttcatgcatttctcaagcctcgttatatcagtatggatgtattaataataaaacatctataggttgttactgtaaaaacatcaactggctcggctccgtcactgcatgcgcctatgaaaactccaagtccaacaagacgtttgacagtgccttgaagaaaatcgctgctcaatgttcaagtcacagatcttacactttggacgacatgaagaaaatttatttaaacgcctccatgtatttgagagcccctgcgaaaacagatatgaaggttctcgttaatcagccgctaacggcgaatgagacagccttccattattattaccaaaacaattatggcaatcaccttgccctaatacggtctcaatggtgcgcctggggtctcgtcttcttttgggcagtcgtgcttactatcgctactattctcaatgttatgaaaaaggtatttggcaaaagcattatgccaaactctgtcaaaaaatcactaatttatccctccgtttacaaagattatcatgaaagaaccttttatttatggaagtacttaccatttgatttcccgactagaggaaagagtcttgttgtcctaatctttgtccttttggtcatcttttccgttagttttggtcacggtgtcaaattccctcacccatatttaaaaccaagatggataaagagcatggattttgtaagtcgcagagcagatttgatggctcttgcccttttccccatagtatatttatttgggataaggaacaatcctttcattcctataaccggcatttcattttccactttcaattactatcacaaatggtccgcttacgcttgcgtaactttggcagttattcactcgattgttataactgctatggcagtgaaaagaggtagctatacttattatgtaaccgtgttctatttccaatggggtatggtagcaactgtattcatgtgtgcaattgtctttcaaagtgaaaaaatctttagaaataaagggtacgagatcttcctttttattcataagattatgaatattttgttcattattgccatgtactaccactgccataagctgggctggatgggttggatttggtcaatggcaggtattctgtgctttgacagattcgcgagaattgtcaggattgttttaaatggtggtttgaaaaccgccaccttgagtactaccgctgattccaacgttataaaaatctcagtcaaaaaacctaggtttttcaaataccaagtgggagccttcgcatatatgtattttttgtcaccaaaaagtgcatggttctacagtttccaatctcatccatttacggtgctgtcagaacgtcaccgtgatccaaacaacccagaccaattaaccatgtatgtcaaggcaaataagggtatcactagagttctattatcaaaagttctgaatgctccggggcacactgtcgattgtaagatattcttggagggtccttatggtgtaacgataccacagatggttagaatgaagagaaatctggtaggtgtggccgctggtttgggggtggctgcagtttatccacatttcgtagaatgcttgcgcttgccaactactgatcaattccagcataaattttactggatcgttaacgacttatcgtacatgaaatggttcgagaatgaactgcaatggttaagggagaggaactgtgaggtatctgtcatattcaccggttccagtgttgaagacacgaactctgatgaaagtacaaaagggtctgacgataaagaggacaatgaaatcacggtcaaatgccttaacaaaaggcctgatttgaaagaattagtccgttctgagattgcgctgtcagagtctgacaataacaacatcaccttttattcgtgtggaccatcgacgttcaatgatgatttcaggcacgcagtcgttcaaggaatacacccttctttgaagattgatgttgagctagaggaggaaagctttacatggtaa

(The sequence listing continues in the following parts.)
